United States Patent Application Publication US 2011/0189663 A1 - sequence listing, part 5

SEQ ID NO: 5647 - DNA, 420474 bp, Homo sapiens
  UNC5C gene - 96446867 - 96827340 of chr4; NCBI Entrez Gene ID: 8633; Build 35; sequence includes 20,000 bases upstream of initiation codon and 20,000 bases downstream of termination codon of the gene
ttggacttaatctgcattacagaagaaatggacctaataaatattcacacaatatttcatccaaaggctgaagaatacacattcttcacagcacatggtcagtgtcaaggacagacaatatcttcggtcacaaaacaagtcttaaaacattaaaaaaaaaaacagataaaatcaaacatcttctctgaccacaatggaataaaactagaaattaaacgaggaattttggaaatgatacaaacaagtggaaattaaacaatatgctcctaaatgaccagcaggtcaatgaagaaatcaagaaggaaattttaaaatttctcaaaacaattgataatgaaaacacaacataataaaacttatgggatacagcaaaagcagtagtaagagagaagtttatagttataagtgtgcacattgataaagaagaaaaatttcaaatacgtaacctaacaatgtatcttaaacaactagaaaaacaagagcaaactgaacccaaaattggtagtagaaaagaaataataaagatcatagtagaaatacatgaatttgaaatgaagaaaacaatacaaaagatcaataaaacaaaaaaattgtttttttttttttggacagataaaattgacaaacttttagctggattaacaaagacaaaaagggagaagacccaaataaatacatccagagatgaaaaagagacattacaactgatatcacagaaattcaaaggattattagtggctactgtaagcaactatatgccaatgaattggaaaatctagaggaagtgcataaattcctagacatacacacttaccaagattgaaccatgaagaaatccaaaacctaaacagaccataaacaagtaatgagtgaaaagtctcccagtaaaaacaaaaagcctgaaacccaatatatttaaagaactaataccaattctactcttctactcaaactattctgaaaaatagatgaggagggaatacttccaaactcattctacaaggccagtattattctgataccaaaaccagacaaaagcacatcaaaaaaagaaacctataggctagcatctctgatgaatattgatgcaaaatcctcaaccaaatactaccaaaccaaattcaaaaggataactgatcatgggcaagtgagatttactctaggtatgcaaggatggttcagcattcacaaatcaatcaatttgatatatcaacagaatgaagcacagaaatcatgtgattatttcaactgatgctgaaaaagcatttaataaaattcaacatcccttcataataaaaacaataaaaaaaactgggaataaaaggaacataccgcagcataataaaagccacgtgtgacagactcaccgaatgggggaaaaactataagcctttcctctaagatctggaacatgacaagatgccaactttcaccaggcttattcagcgtagtactggaagtcctagctaaagcagtcagacaagaggaaaaaaaataaagtgcatccacattggaaaggaagaagtcaaattttcattgtgtgtgtatgatataatcttacatttgaaaaaaatctaaagactccacaaaaaactactagaactgcagtatacaagatcaacatacaaaaatcagtagcatttctatatgccagcagcgaacaatctaaaaaagaaatcagaaaaggaatcccacttacaatagccataaataaaactaaatacctaggaattaatttcaccaaagaagtgaaagatctctacataaaaattataaaacactcatgcaagaaattgaacaggacacacaaaaaaaggaaatgtattccaagtctgttgattggaacaatcaatatcgttaaaatgtccatgctactcaaagcaatctacagattcaatgcaatccctatcaaaataccataatattcttcaagaaacagaaaaaaattctaaaatttatatgaaatcaaaaaagacccagaagagccaaaggtatattgagcaaaaagaacaatactggtggaatcacattgcctgacttcaagttatactacagagctctagaaaacaaaacagcatgatactgtcataaaaacagacacatagaccaatgaaacagaatagagaatcgagaagcaaatctgcataccaacagcaaactcgtcaacaaaggtgcccaaaacatgtattatcaataagtaggaacttactcctaccattttgttattagttttctggttgtttcggggtcttctcttttcttccttcctgtcttcctcttagtgaaagcgatttacttggtgctatgatttaatttcttgctttttattttttgcatatcccttgtattgtaatttgaggttactatgaggcttgcaaatactatcttgttgcccattactttaaattgatgatgactttacgcttattgcataaacaaacaaacatgtaaaagaaaactaatagcaacttatgctttaacttcatgacattggtttaagaaatgatttttatatgaccctaaaacacaggcaacaaagcaaacatagagaaataggaacatataaaactaaaaagctcctgcacagaaaaagaaacaatcaagagtgaagagagaacatgtaaaaagaaataaaatattgcaaattcattatcaaacaagcaacaagttccttgtgaatacacaaggaactcaaaccactcagcagcaaaaattaatccaattgaaaaataggcaaagattctaaacagacatttttcaaaagaagacataaatgatcaagtatatgaaaaaaatgcttaacatcattaatcataagagaaatacaaatcaaaaccacagtgagatatcatctcatctcagttagcatatctatcatcaaaaacacaaaaaataacaaatgctggtaaggatgccatggaaagggaactctcatacactgttgatgggaatgtaagttagtatagccattttgaaaaacagtatgcaggtttctcaaaaaaactaaaaatagaactattgtacaattcagcaatcccaatactgagtatttatctaagggatgaaaaataggaataccaaagagataccaggacttccatgtttattgtagctttattgaataaagttcaatttttagttctatttttagttcttagttttagtttaaccaagacatggcctcaacctaaatgtccattgcaggcgaatggacaaagaaaatgaatatatgcacaatggaatactattcagctatgaaaaatgaaatcctatcatttggggtgacattaattacctggaggacattatgttaagtcaggtagaaaaaaggcaaattattctcccttatgtgtaggagtgtgttagggcattcttgcattgctgtaaagaaatacctgagactgggtaacttataaggaagaggtgtaactggttcatggttctgcaggctgtacaagcatggcaccaacatttggttggcttctgatagggggctcaggaagcttacaatcatggtggaaggtgaagggggagcaggcatatcacgtgacaaaagcaagaacaagactgggtggttgtggggaggtgtaacaatttacaacaaccagatctggtgagaactcactcattattgcaaggacagcatcaagccatgacccaaacacctcccaccaggcctcacctccaacatgggggattacaattcaacatgagatttggtcagagacaaacatccaaattatatcagggagtttataaaaatttttcttatagaggtcgagagtggaattgtggttattagaggctgggaagggttgcggggaggaaagtttagggagatgttaataaagttacagctagactggaagaatactagtgttctgcagcactgaagggtgactatggttaacaataatttagtgtatattttcaaaaagctagaagggagaattgtaaaagtttacaacacaaggaaatggtaaatgtttgagatgatggatatgctaattatcctaatttgatcattacctattgtatacatgtattaaaagatcactgtatcccatacatatgcacaattatcatatgttaactaaaaatagaaggaaaaataataaacgtggataaacgttaaaaaaaagaaggaaattatctagggctgggataaacagataatccaaagaaggtaaatgagatcatacatggcttccatccccacgttctggccattgactatggaaggcatagttttgcaactggaggtttgtagagatttatagagtaagaagttggatgcacttttctgcaactgactttgaagggaaagagatgccctgtgtgccccccatgcatgccgggagaaaatatgacatcaaaggagaccatcagagacccaggcgggcatgaagccaaatgaggtatctacaaagtcaaagcagcaaatctaccccagaaggggtgaaattctataattttgaaacatgactatttatatcctctttgtattctgttttgtacctctttctaatataatacggccacttttgaaaatgtattatctcaactgttttgagggaaacaggctgctgtccacacttgagtaagaatgggagagggtacggatagccttacaaagaaaaaccttcaagaggaagtgaaccctaacaatacacgggggctgcagtggggaatagaaagtttaggatggagtaggtgttcagaaatgtcctcaaaacattttgccctatgcctttcaatgagagtgcccctgtagaggactgattaaacttgatatattgacccttctgtgaggtaaacagaatcagaaaggagctggctttacgatgctcaccaggagagcctactgtttcaaaggcctacacagacaggcccagcaagtggatggcgagaaatacaacactgattccaacacagaaatgcttgctctctgctctgttcaaaaagggaagcaaggacttatatgtttatgcaatcatttattcctttaatcattttataaatattcactggccacctcctaaactttgtgttttgtgccaatggccagagaaaggcagagctgctctgatgtggtgcagggaaagctcaagtcttgcagggagttcagagactcccactgcttgcaggagaggaagccactgcagctctgggttagttcagcattcagacatgcagaattctgcaaggcctgtaggtgtatgacccaccatatgctaaccttcagacaaaccagggcagacaggaaactgctctatcactcaaaatgttattaacaggtttggaaaagatttcttcagccactgaagcctgagtatgaacatgaatggtaaatatatatagtaaaattagaaaaaaacagaagtaattttgcacgagagaaaagattaaactaaagggaagattgcaaggtgaggtggcataaaagaaaaaaattggacttggtaggaaaatcctattttgcacttactatataccatgaatgatattaggtcattttatatccatttgtagggtgatacttcaaaacaactctatttattccaattttatcattccctatttaaagataggtaaaccaaagtttatttagttggtttaagtaacttgcagaaaatcatacagctagtaaagatcagaagtgaaactgatatcacatatattctattccagagtttttccaatatgagcagaaatcagaagagatcatcatctggtgttgaatctgtctctatctttctttggacaagtaaatttggcttttggggcctcagtttccttatctataaaattgtgttcccttgggtctcatcttaattatgattgaaaaattgatcatgctttggttctttacagaacataggtggagagaaaaagggcaaatgtagaaaaggctgaagtcgtgggaagaatgggcggtagaaggatacagagtaagaggttaaaaggttagaagaggattgggaattataagttgcaaggagggtaaaattttaagtgtatactctgtgtaggggtgtgtgtgtgtgtgtgagtaagggtgtgtgtgtgtgtcacgtacgttagtatcacttggaaatgctggaaaactaatgacagacaagtactggtctgaaccccagaagaaagaactggttcacacacatacacacacacactccacatctcccacatagcaattactaatcttgaaaatctgggcaggttgcctcacaaggaaaacataaaatgcagaggctactgttagccaagtggcatttgatctggtagccaggcatgcattcagggataagctagcttttccacccccaggactcacatggcttccagcatgaccctcatttgcctcagtccgttcctctcttctgttaagtcagccttatgtatccacaagttctgcatccacagattcaaccaaccacagatggaaaatatttgaaaaaaaaaagcagcataacaaaaaatacaaattaaaaacagtacagtataacaactatttacagagcattcacattgtattaggtattataagtagagatgatttaaggtgtacggaaggatgtgcataggttatatgcaaatactatgccattttacatcagggacttgagcatctgtggattttggtattctcaggggtcctagaactaattcccgtgaatacccagggacgactctataaattcccttccaggaaactcacagctgggctagaaaggcttctgcatctacttatcaaagcaaaacttaaaacacaatcttttctgtagtgtatggaaaattaatccaattctgacaacttcttctctttatatagtccaaattcatctatttacaacactatcaaaacaaaggaaatgacattatactcccaacctctcaagaataggaaccttcagtaccttcagaggaacacaagaaacaccctttgggtgtgacaaaggttgtttatgctccgggaaacccagttaactgtctggaacttctctctggcatcccttacttgtttggcattaaaaaactacctgaaattctcagcatttagctcctgcttataagtgagaacatgtaatatttggttttctgttcctgcattaatttgctaaggataatggcctccagccccatccgtgtacccacaaagggcataaatctagttgtttttatggctgcatagtattccatggtgtatatgtaccacattttctttattcagtgtactattgatgggcttcttaatacctgagtgatgaaataatctgtacaacaaccacccatgatacaagcttacctacataacaaacctgcgtacataccctcgaacttaaaataaaagttaaatcaaaatgaaactacctgaaatatataattgtgtgaatgctcagacatctgcatatagactttcccctatttctttagtttaacaagtggataggaaagtttataaacacatagtacatatactatttttcatggttggtttaaaggagttcaaacataattttgactataattattttcaatctcaaacctaaattcaatggttttactaataatatttgtgtgttgctttagttatgtcacatatgtacgattcatttattttgtggcctaatacatgaaaatacaaccaaaataaaaattatctttgaatgacattgtgggacctgcaattcagtgtcacccatacaaatggaaataatgtaggatttgaactattccgaagtttttaaatgggccaatttaaagatattattaagatgctcaggttttgaaaattatgacataaaatgcaaagaagagcaatcagacaagttgctaccaggaaaagcattcattttttactttgcagctcaaatcaacatctccatgacattcatgtatttataagctctaaagcagagcttcacagtgggggcgaggtgggagactatcagaatcacccaggaagccttttcaaactacaccagtcctcctctccctgcagtccctcctccccctgagattctgcctagatgtgtctctgaacttgagcaacaccatctgttcacttacaaagaggcatttttatctctaaaagggcaggtttctgcacaggagcctctaacatgtatagaaggcagggaggggaaaccctgaaacatacatcaataacataatctcccaattgaatgctgacatgttaaaagatggatatgtctataatattttctgagtgatatattcaattggttagcctttatgctaatgagatgaaaattgctattttaaatacacacataggttagtaagcttcattctgcaagttttccataaattcaggcttcattcttggaaattttcataaatgcaagcatttgtagaattaagtaaaagagtgtggcaatctcagctcaaatcaactagtgctattagaaaagcatggtgggtgagtaacatcagctttccatcataaggaatatgaaaagccattcttattatatacacatttcccattgggtgaattcctatgaccaacatgtcacattcccttgaatgttttccctctttaagaaatattgtgaacatttgtagatattgttctattctgcacagaactgaccttctaggtctcctttgctgcaagtgttaccttgagtttgtgaacataaggtataaacagaaacacgctgctcacatttttatgttataatcacataattgaatcattttcttctatcatgcttttgccaatttatttggaatatggaatatgttgaggttttgaaactaagtattcataaactatttcattttgaagagtaaaaatatttgtatgagtggatgtagcattagatcatttatgaaataaaaatacttaaaatgttacaaatatatagtcatgtgtcacttaacatcagggatatgttctgagaaatgcatccctaggtgattttgccattgtgcgaacatcatagggtgtccttagacaaacccaaatgaaatagcctactacacacctaggctatatggcataagcctactgctcctaggctacaagcctgtacagcatgttactgtactgaatactataggcaaatgtaacacaatggtatttgtgtatctaaacataactaaacacagaaaaggtacagtaaaaaaatacaattggtataatcttacgggaccattgttgtatatgctgactcttgttgactgaaacatcgttatgcagtacatgactatttaatataacaagccatttatatcagtgacatgactaaaagatttctgaaccatcttttacaaataggtacttagtaaattataataataatttttaaaagcttatatttattaatgtttactctatccaagcatgattattagtgaagtatgtgaatgaatttgtttgacctacacaacaatattacaaggtaagtactactataaagtggctattactatcccaatttatagacagggacagataacttataagcagctcatgaaattttctgtggtgacaaagttagtaagggacacagcaggaattagaagttaggaggcatttttgcttcagagttcatgctctgaaacacttgaccacggtagaggtgcgctggtgccccgtggctcatccttgtgttgagtcttgctagccctgcagcacacgattactacccatgcccttggcttctaccagtgtggagatcaagaaagttactatggttttttaactagtgttacctcctgtgtcctttttcactaagggcattcaggatgtctctgatgcaaaattgccttcgatgctcagaatgcagaatagcttcctttaaaaaaaattttttccagggtacatcatgttgatataaggtgatctccccctcttaacttaactagaagtttctattattccttccctattaaatacaccccatggagagcaatagaaacaaagacttgacttctttgttctttggagcaaagtcctgtgctactttgcattggagtaggtgatgatgatttaaatattactataacacagtaaaatccttcttgagaagctagctaaaagtctagaatagtaacatatataaacaagcaggcaaatcattgcaaggcatttattcttaaaaatatctaacttgtaatattttcataaattatagtgttggatcgcccactgaatcctgctccataatacctggctgttcttggctagtggggtagtggcccttgtgggtgattatctgaactattgcttccttactatttaacttcatctcattctttggggacttgtatttcacacagttctgtttaaaatacctctagaaaattctcccttgaattgttttactccttctttctttctctgtattttatatttgttttcctccatgtgatgacaaaaatttatttccgtttttaccttctttgttcttttaatttaatttcttaacataccgtaaacaaacaaaaaacaactatgatcaacataaggctagttagcactagtgcaacacctatgttaaaaaaaaatccttctatttcctattgaaattagacatgaaacaagaagaggggcttcacgtttggaattgttggaaataacatgaaatgaacttagaaatctccttaaaaactttacactttcctcctcattcttctttattttttctacaagtatagagatcaaatgttttgcttttgtttcatttaagttatatttggattggattatatatgctgtaatagcattgttttccacataatgacagatgattaacaagattgtgtgggctgaattccaaaccataatttatggcatgtttctgcaggataaagcacaacacatttctaacaataaagttataagtaaatttagaaaaaaaagaaagtaaaagatttctaattataatgactgatttaggttacatactataaaatattcttatttattattttactttaagttatttatttatttttaaaagatttattgattaccttctctgtgccaggtagagttttagggactttgagaaacaaataatatggctatatatccaaaatgttggtgagtcattacagtatttcttgaataaacgatttaaaggcccaatgaacaccagtaatcctaagaaattaatgtgtcccactttcctttaaatcttatttttaattctttaatgacttttaattaagttgagggtggcttactgttacaagtagtttttcagggttacatagtttattcttaattatatcatgaatatttaataacataaatttctcatcctgtgttctggcagtagtaaccaccatcccaatccggcatcttgtatatatagccttcactcattttctgcttactactacttacatccaggctctcgctgcttctcatcttgattgttggaatatactcctaaatggatactccatgatttttcttcccactttagtccagcttgcacattgctgcaagaaatggtcatgttattacctcattgcccaaagacctttggtcacttcctattctatgcataatgtgggacagacttcctagcaaaccacaaaacacctttgaaaaaatagctctatcttcatttccaaattttcctgccagtatttgcctgcatccagataaattcaacttcagatcctaagttgacactaatttagcataggcaagttaacccaaataaacctcaatttcctcatgcttaaaatgaggataataatgataccacttcatatgtagtattgttgtgtgtattaaatgaatatctctctttatacaaaacaacgtgtttgattaatgagtgttcaaaaatgttaacaattataatttatataatgataatgataagagcattaagcatgatgctttctggcctccaacctaagtcactcagtatttgctattcctgtgctccttttgcctgccgtggctccagttctttcttctccccaactcagcaaaagcaaattctatttatccttcaagacctgggtctaatgtgctttcacttaagatctcactgattcctcaatgtgaagtaagtgtcctttcctctcatctcccatagtgatgtttctataactctctcaccgcacttttcagagtcagcctatttagttctatagtctgtcttattttctattagcttagtaatactatcagggagattgtcattttatttatcttgagcttaatctgaggacacgatttctcacactaggcacattagacacctcttgctgcaacagtgctgcataaaaaattaaccctgaactcggtagctgaacacaagcaccttttttttcttgctcatgagtcatttggtctgatgcaactcaggctctgggctccacacagcaagcacaaggctccaggctgcccatctctccatgtgtctcttatccaccttggtttggtggttacctggaaaatgttctaatgccttaggactaatggtgagagcacatgaaaatgagtagaggtatgcaatgggagcaactggcacactgtagcacctgcccaagatcactggccaaagcaagtcccatggctaagctaccatcagtgagagaggaagccagtacgacccacagtgcagtgggtggtcctgcaaggcatagtgcaaaggaaataatcgggtaattctattaactggaaaggagtaaagaataaagaatactgcaacctatcatcctctgttcattctagaactgcttttttaaggacaggagttccctgtaatggtctttggaaaagcaggtctggggcagtgaggaatcattgaataagattttaggacagtaaaatgacaggttttacattttagaaggtctttctgggaggtgtggagagcatggattagaatgtaaaggcaaactagctactaaggaaataattacaagacctctcggtaacaagcaaatatattgtgagtctgtagggctggtgataatgggatagatcctgtagccctttaagtagtgaaattgaatggacttataaaatagtaattgaataggtgatgtgggcaaaggagggagatactgagaatagctccagaggttatactagggtggtatcattcatgtatagaaagccacatcactaatactattcttcagatgattatgtaaattaagtacaatagacaatgtaaagcatatcttaccataatgacatcttcagtatagacatattacaaagcactttcacacagattttatagtcacaggaactttgtgcattcatattgttatcatttcttataacaaatacgtgcaaagaacttacagggatttctgagcaaataacttagataaatggagacttaaattcatgtttcctgatccggagtcttcccaccattccattatgtattttatttcttccatctgtaaaatgagaaaaacgactatggtctaacttggcagataaatttaaaataaaatgagatattagaaaagctctggtaagcaataattataatctctatccccagtaatactcttctaaattagatattctattattttccttaagtttttattgaccttttcattgtttgctccctctaatagcagttacaacatgctacaccaatgcagaaatcacactggattttatttatctcttcctttatttcttctttttgtctttcttctttccctttcttcctttgtcccctgcatcctttcttcttttctccctttcctttcttttttctccatctttcctggtatctttctttattttttgctttgcttcttttttataaatattatttctacagtccaactataaactccatgaaactctacctcaatgctacacaatttccaaaagttcagtaaatacactttagtgaactgaataatggagtcctttccatctttctatttcccaatgtgatagaaaacacactcacccttcccctgttttggagactccagagactgaggcaagaggatcacttgaggccaggagttcaaggctgtcgtgccctataattgcacctgtgaatagccagtgaactccagcctgggcaacatagcaagactccatctctaaaaaaagaaaaaagaaaaaagaaaacactttcctcccttttctcctttttttctcaaccaactatagaactatttttcatttacctgtaattcttcaaatacaccctcaaatgccctgtcttaatgtctttctttctgtgccttccccttgttgctcctctccaacagagttgtgtccaactcagatgatctggccaacatgcacaacacccttctccttatccaccatttgtgattgatcttagggggctatttgacagaccgtcaaggaaatggaaactacttgggctgagggcttccagaaaagttatttggaaggcatctaggctagatgcagcccctcaggactgttccaccttcttctgcctgaaaagtgaaacatgactcctggaggtggaaaagctatcaagcaactgtgagaatgaaagctgtacattctggagcatggagccaagacatgaaaagagcataactgagcttccacagtggccatgtactgtctactcccaggttccttatcgttagagataaatacacccattgtgtgaagaacagtattgctgatacacaagtgtgtgtcttacttttaggtaaatcttcttctcaggctcccatatccttatattcccacaacatttttgtgtttatttaaaatccttttgtttattcatttatattgcctgtaagattctgagccattgctacacaaggactatacctcatgcatatttttccctagggatcctagagtggaaccacaatataacaggggggaagtgaaagttttctgaattgaattggatttaattcttccagtcagttaatgggaaaagcaatccacagggggctggctgctcttcagcctttcttaactagtgctcttcttttgctacagtgatgtgttgttgcacaaaagcctggagaactcatcttgcctcatataccacagaatagggatttgttattttgtctgccctacatccattctctttggcatctttttttttttttgtattaatcattttctattgtatccttttggagaaccccttatccccattttcaatccaagtttccagttggcaaatattggcacatgaccaggccttgccattcagtatatgccaaacatctggccatggtaattgcctcagttgtgagtatgtggcccaagataggccagggccataattctgtatttattttttgccatttggaaacgagtgtgctttgtgttgagattgacaatgataaagacaatgtaaacctggagctgctgggaatcccaggatggagatcataagtctgtgaatgaaaccaaaacagaggagagcataaccaagatattgagggtggggggaagtactaagtcccatgagtgatatttaaattcatgggtctaagacatcatccctcaaatcagactgtcgctagtaaatactaactgtgtgtgaccttgggcaaagttacataaccactctgtttcctcatttatgaaacggagataataatggcactttcattcagttatgatgattaaatgagatagcacatgtaaagagcttagaaagtgcctgacacacagtgagtgatagtaaatggtatctattattaaatagatatttcttatccatagtttttgagttatgcacagtgataaattatctttttgcttaagctggttcgagttgggtttctttcacttgcaaccaaatgggtcttatctaatagaattaataaaaagcagaaagccctagagagttttggtttatgacaagttaaatctctttctctgggctaaggcagggaaggaggattgaatcaactgaatctagaccatctggctctccttcgttgatgtctatcagtaacattatgtgaggtctctgaactcccaacttgtaggaaaggagttttcctcatcaccatcctatttattcactaaaatcctctttctcctatgttgccagttaatgcagttaataatatccctggtatgaagatttatttttaaacctacacaaaaaatataaaaagtgaggaatcaaacatataaggagagagatacaatgaaagaaaatatttccataattaaaatatatgatcaattgtttttgatttaagctttaaactggaaactttttcagtactagttccgagtaaatgatattattatgaagcagcctacatgctaaatagcatacttttcttggtgtagatttctggagggatatgcaggggatttgcatgcttaattcccattagcacctgtcactgggatttattatcctagagttaattctccactcactgcagccaagaaaaagaaagcccttgtatatggatttaaatgaagcttttcatttttcaagatgagatgaatttcctgtctgttccttaaacacctgcagtattccaaccctaaaaagtcaaattccaataaatttttggtgaaaatttggcaaaacttgattttattcaacaactagaaaagcctactcataatttgataacttgagaggctgaagaggagaggaagaaggtttaatgaaggacttagctcaattttaaatccattggttctgattcaatccattcaatattcagtaagtatttattgatcacctattatgtacaaggtattgttccaggttctgggtatagagcactgaatgtattagaaaaaaatttctcccctgagaagcatacattttattgcagactgcatatatatatacatgtatacacacacacacacacaaatatatatatacacatatatgtacatatataaagtaagtgttatatgcaaaatcaaagctggcaaatgatattttggatgatagattgttgctattttaggtaacttgatcagtgaatgcctccctaagcagtgtcatttgaacccagatctcgatgactttagtaaacctattctcaggagcctataaaacactattatttctctcatgaggaaaaaatgtgatgatcaacaaaagtagtcaggatgttaattcacaagacaagttccatctgtacttgtagagagcaggaaacttgcctgctgtgtaaagctgatgtattgctggtgtttttcctgtcctttgtgtggtgctctcactctcttcccccttttccacctcattactctataccacttctcaaaccattctcctgccatctttaggctgaatttcagtatttaactacatttcctcttttaatctcgtattctttattttaaggaactaattgcatgtggtatctgtcactgagtacctcaataccccaaacaggagtaggcgacaatttcaaccttctttagctgtcctagactttgaggagtcttccccattgagcttttttggcaggaaatcagtcaatattgattgagtaccaactatatatcaggctcagtttaggagctgtggttgaaataatgaacaaaggcaaaatctctgtcttaaaagagttaaattctaatttaagaagacaggcaataaaattgtaaataaataacttttggatgtcgttgatgtgatggtgagtatgtgtggagatttcttagtacttaagctgttgtccttcttagtaaaattgtacatataaatataaagtataataataatcccttgtgaagtcattctcaaaatacttgacaagttattagtggcctcgatacaccataaaatatggtagctgctggccacatgtgactatttaaattaaaattaaataaaaatttccaattcacactagccacattgcatgcaagtagccacatgtatctcataactacgacctcagaaagtacagatatgaacatgttcttcattgcagaaatttctgctgaacagcactggtgtagatagcatgaggctaatgggaatttttcatcaatggtaagaacagcagtttacaattttggcgtcaggcattttacatatgtttaacttacataatcctcaaataaccctatgagatagttcctgttactagacccatcttacaaattagggaagagaggcacctagctttaatgttcaatatcagtcaagtaataagaaatgctaagaactgaaggcagacagtctggtgccagcacccaccctgttgtcaaatatcttgatgtcttggtatggagaagatgaagagagtgaagaagggttttgtgtggtggacagagtctccacagaaataagaagtggccagttttgtcaatgtctttggcaaatactaccttttcggatctccctgattcatccgagataggtcttattgcctagatggggctgtgcaggcagaatcatagaatgttagaacttaagagaactttgaaactatcaaaatatttcacaaatgaagaaactgagacattcacaggttacctgacttacccagggtaacagagtagttatgaccacagccaaaattagacctcatgtttcctgcgtgtgtgtgtgcatgcgtgtttacacatggcccccttggcaccaagagcataaaattccctgatgtattattagtttaaagacatgctaatcttgggaagtgattttctttttcccaaaatgttgtctgtgtctgtgtgttgaccttttaataaattcactttccttttgtctagtcttattttacccacccaatcttgcatccctccatcatgaccacagggattcacaacccagctacgtagacaattatttcctgtagaaaggtaaacaaattcatagcagctcgagttcttacacacactattagaaatttgaaaaacatgttataggctccaccatcactttgagtatctacaaattttgctttgcattttttttttctaagagagtttctctcggtatcgcatcaccacccttgtcagccaccaacatgcacgcaaagaaagcactgttgcagaatgagtttccgtcgagcttttagtttctgttccactgcaaaggggtcatacgcgctcagaacataaagcagtctgactggcgctgacaaccccaggacagcagccggctggggcagtgcaaaagcttcatgccttcttccccaaccaagaaggacttcagttcgagcccgcaccggcttcgtcaaccgcgagacccgaagtcgtagaccgagtccagtcctagggaattcggctgaggctttgccggcgcggcgaagaaggtggcaggcggcaggctgagctccactggacacagcctagtggcccggggcgcgcccgctgcactcccggcgtccaggtctggcgcaccgcgggaggcaggcgcgctgccactctccgcagccgcttcgtcccctggtctgtctcgcctcggcttcagcgggcaaacccacagctggtctcctgggcgctgatctccctgcaatccttgcttacataaggcgggcgggcgtgctcccgcccccggttaccccccagaggagttgtgctgcgccctctacgcctccttggcgagcgccttcgcgcacccgtgcgccctactctaggatgtgaacctccttggccacccagcagcgacagccgggacatctctccgccggcgtgagaacactgagattggagaccagagcgcctgacggtgcccaagcttcctccctccgttccctcctcctccaactccccccacttcaacccccacccccacccccacccccggtgtctgtgtgtgttcctcacaggcgaggggacccggagagcagtccagacttcggcgtgcggcggagctgcggctgctcctgctgctggggggagcggcggaggtggccgccttgcgcctccctggacttcccaagtgggggcagagcagtcgctcgcgggagacgtcagttagaaggcattgggaaagagggaccttcaaactcctcctcggcgtctcctctcctcccccttttggcccctgcctttggagaaagtggagtgtggcgcttggttgtcgttatttcttcggactgcttcgcggtgcacggattcagcttctgcccagtggggctttcagctgtttgcgcgtctctctgtccccctcccctccccccggcacacctctgtctacgatgaggaaaggtctgcgggcgacagcggcccgctgcggactgggactgggatacttgctgcaaatgctcgtgctacctgccctggccctgctcagcgccagcggcactggctccgccgcccaaggtaagggggtccgccaagctccgcggccacctcccttagcttcttccttccctccttcctctcctcctccccagttctcttgacttcctcaatttgcctcgttgctttcaactggaaaccactctaaattccactttcccaactagtcaagaagctttgattataataataataattattattattattatgtttaatctatcttctgagatgggcacgaatggaccagggacgaacggggtgtggacacgcagccgatccgtctccatacgtgtgggagcctggagtgtcttgtgccctttcagctccgcacgcgcacgttgttgcatattgcacacacggaggtttggaaagactctcggtgcgggtggctgtgtgacataccgtagatgcaccccgaagcgcatgatgcgcagaggctccccgcgctgtgccaagactggggtagcaggatcttcactgagtctctgagcacactagaccccgaagggcgctcagctaaggaaatgtgtccattactgtcaaggactcaaaagcacccgtccccctcgcctgctgcttcaggtgctgtggaaatacacagctcacccgaatccgcgtacccggctggaggcaggcccgggatgtgcatgcctctgcactcatacataccccgcttcatgcctgcttcccaccaggggatgtagaaatgaaaatcccggagctctgggggaaccggctgcttgttcaaaccaaatccgaaactccccggggtagtcgaccagtttataactctgacattttaatttaacgcctgtgaactttaacataagtgaccggggccctgggcgaagccgggttgggaagagtgtggccgggagttggggatgggtaagggaggaggggaggctccggagctgatcgcccggctcccttcttgtccgcctagtttgaagtgttagcagcagctcccagccttcaaagccgggaaagctgactggaagggagcgcagaagaaagagccaaggctgtcccctccggggtctctttcaggtcacctgggccccaaaacttctggccaagcccagctcctacttgggtctcttagcccacttcagtggtgatagccggctcaggcgaggcagctcagcttttcctggaagaggagagaatgaaggaagcttatgcagcattcagaggcaattcagggattctcccttcactctcggttactcttccttccaaatttggagagtaaagggaggctttacgatagccccaactccccaggtgatgttcagacaccctagggtttccggacagcattccctctgatcttagagaggcgctgggggtggggatgggggtgttggaagcggaggagagcgcctagcataggagtgcggtctgggtggagaggtaagtgattagcaaggctttgtgaattagcgatagcttcttcggaagtaaattttcctgctgccctgctaagtggccctgctcataaatccttccttcctttctcgccagatgcctcccatccctgaggttctgctctggttttcttatgcacacctccagagttcatctgtctgtctatttaaaaaggaatctccaccgagaatcatagcttgtggatttcctaaaattgataagaagttctcagggcgctagccaagggtgcttagaggggggtgtttggaagcttaagtgaacaaccttatgaatagtcgtggaatcaaccgcgcgactccctgtggaattcgcctgctgttactgggcatacaaaggactgagccatgggggtgggtggcgggagagggggacggggcacggtgagagaactgtttgggaaaaagacaagttaaagtccccaaagatgccaaacaagagataggattcctgctaagagcttacaataaccaaattaaaaagactgggtagaaaaaggatcaataaagataatcaaacagcagattgtaaatggattaatattgaaagaagaagggagaagagattaaaaagaaaagatgcttaggatagactttttctcttgcactttttgtagcgtaggcaagttaaagattggggactgattctcatcttaagtggaaaaagaaaatgtactccgttgggtgtatgcatttcactgcagttcttgtccatttcgtttatttagttccttcagtttttgattagtaaaatttttgtttgaatctcatggtctgtaaaatgcactattccaccgcttttatctttgttatcctccatgttccagggatagcagctcttcctgtgttgtctgttagttatcaaaggaaggataaagcaccaaactccactatcagctactaccttcatcactgcagtacagtaacccagcctgtttatcttgagccaccgttaacactttccttgcagaatcacacattttataaatggtctgatagtcagacctccttttccttcttattcttcttctttctcctttccttggactagaacactagcccataccctcaaggtatgatttccttgtggtgatgacttaaagatccaaatgaactatttcttatgaatgaaagtccaagagcaattaacatgggaaagttactttaagcactttacaatgtggatgaggtttttattctgttgctgaagtactgcaaaaattagaagtatgtatatatatcttcagagataatcaaggaaacaacagatatttaagataaaacatagaataggcattatttgtgagtgtactgagttttgtaactgtggtttaggcagcagtcattttcaataggtccttgggaaattctctaggctgtaggcaacaactttctcctttctggctatgccctaattgtttcattcaggattgctgggaactcctagctccagggaatttgtagtgtttgtgacttccaagaatgaaagattttactagtaaaaggcagtgtgtgtgtgtgtgtgtgtgtgcgcgcgcgcgcgtgtgtgtgagatcagtgtgcttctgaattaggaccctcctggtttataaatgcattttatctgggctacacagcattgatatgctgcttatctagctccaactagtgttatgagtgttaacaccaccaaactcaggacaaaaaattactgaagtctctaattagattgggataattccctattatcttaattcatagtttttttttttaaataacatatgtcttcctacaaaagagtaaaaattcctttatgcatgtttgcatattggtgtggtacaaatagacagtcaacagtgaagacaactaaagttcattacaattctatcgtatactttttcattgtaggagtacagaaagtttatgaattcacattaggaatatgcaataaggaaaagtaggctagtttacttctgtttagaaaaataattttgtgtattctagcttagagaatgcttaaaatcttcaaagaataaacttttcaaacacttgcaaagaattaggaatcattagattataactgacatttattgactccctggactcctgtattctggatactgagggtaaagagttaaataagacagggtcctcgaacacctcctattgtagtttggagctggttgtcctagtcagaacttgtatgggtctattttaagcaaccccccctaaggacatgaacaaggcatgagctctgctaagtaaaccctgttagcttatttagaattattgttgagacttaaacataactgttctctaatgtatgctaggttctccaattagtgccaacagcaagtgtgctctattaggccttaactgcgtttaacacttttctgatttaggtcatggctttgcagaagcagcagagggagtcactctcagaagaaacattaaaattacaggctgcaaccactttaggaagataatggggaaaattgtgggggttgagattgagccagtgctattgccttgaagttttagcctacatatttttttagtttgacttttatatttgtggcagttaaaaacaaacctgttcacatttcctcacaaattagaaacaatggcttctatggatagagtatggtattagaagtaaagttcttaagcaattattgtgcactcatattgcatcctaggctgaatgctatttgttagaaacggaatgtaaccaggcagtttaagccctacaggaagacagaagtagaaccatggaattataattcactttcttaagtataaaagcggacacaggtatagtactttctggattcagacatccgaagatagtaaacataggtgaagctaggattctaatgtgagtggtgggtggggggttctaaaatttctacacagaagaacgtgggagcagtgatttggctggaagttgtatgttcttgaagctaagtttgcgttgcaacagcattttacttagatttaatgcaagtttcatctggctctggggaggcacaggctaagagctgttaatggtgtatgcccattctgtcagttaacatagtgattaccaatgtttcctaatactgcttccagcacctccagctgtgtgactatgagcaagacatttaacgtttccgtgccttagtttcctcatatgtaaaaatgaggataatatatactacaggttacaattagagcagcttttagctcatagaaaataagtattattccttgactttcaattctacaaaccgttggcaaagaaatctagatgtaaaagaaactaaaggtcaataattttgaactcagagtgatgatagctgctgacactgcttccccaaaagcaagaaatggagctatctgaagagatgctgcggagtagatcattgtaaactcctggacagagtacagttctctgaacagcctgtgggaatctcattcccttccacagtctcttttcttcccttctgttctctctgggaaaattaacctaatattagttctaaaaatgacacgttaagtcactcccagttaagtccttgcaagaagctcgtccttgactttctattttctcaagggatactgaaagataacttttcataaatccatgaacactattacagaaaaaaggtacaccccaggatttctgataagggtttggggaaaatcagacctttatgtgaatgtggacagtttttctttaaaagaaaatggacacaagtatatactctaaagaacataattggttttctgttcaaacaaaataaacataaaaataggtcaacacgaaggcaaagaaaattcaccagaactttcatttattcaaactatatttgcaataggaagtttcgttatcctaatttaaaacagcacagataatctagatgacatatattttggtgaaatatttgcatctaactcttattgtttaatggttattgccattctttgcatgtttggagcaaatgttttctgtcagacttttgagataaaataagagatttgtagggcattttatattacttacggtttagatttttctcctacaaaattgtcattctgcttctattattggttctggttctgcactctttcttttttaacctgatttcttaaacctatgtatggatgcttctttggtttcatttcttacttggatttgttattgcttatgtatttgtggaggagggctacatgaatatgagacctttggtattattccagtatctcttagctcaaggatgttttactcacagaaacttggtgctgttttttaatgctactttgaagtagagtaagtttgccttgagcgatattcaaacactagtgtttcccttttttctagttttaaaaaaagaaacttagtaatgggataatttatagtttctcttattttaaatatttgttattttcaaacttacagagattttaataaaaacattttataggaacacttttatgagctaacaagatcagaaatagaaaacttttttttttatcctgtctacctgtatggagccaccagaagaatttctgccttttcatgaaaacccaaaacatatatcatgttgcagatatttggactctttatgaacaatatgtttgaaaatattgagctgaaatttcagaattaaaaaaatagttttgtgttgaagttgtactgtggttttttgttttgagcattgctgctccccaaaatgttgctcatatataatgagattttgaaatacacagaagaatgtttccagattttataagtatttaaaacatacctccccttctacatggagtacatagtgttaaagttgccatgacattaattaagttgaagttacaatttagaaagtgagctatagctttgaaagtgccaaatatgcagatatttgtccttaggtcagtatagcttttattagcaatgagcagtgattcaaaagtgccttgtgtggcaaaagtgaagtataacatctgaaaatccccatgtttggtgaataccctcttttagttaaataactaaacacatcttattgccaacgtggtagtggaatgtgagcgtgaggggagccgggtgaaacttcattatatagatatgcctgttagagttcttattttaaataccagggctcacaataatcatattaacagatgatattgattactcagatttaacaccagagttaccagtcttacttattttaaaatgttgtgaggatagggggttttatcttcattaatcatgttgtcatgtggatcctgtggctagtttcatttctcagcaattatgagagctataaaaatgcctcatgtagatgaccatggattatatcctcttctaactgacgatgtgaaacaacagaaactccctcagcacacttaacaagttcattgatgcatgctagtatttctcagttttagtcaatctcttaattgattatttaatcatggactgcctgaactctattcttatttattgttttctctctttttatttctgttcagaagaaccaccttatatgtggatatttctttccaataaaaacagaatagtgcttgtttattaaaatgcatctacagtccagttgtaagggatatatccataaatagaaatatatccataaatagaaatgcaggttttctcaaaattaaaaaaacttagagtatataataatataaaatataaatatgtagtacagaagtaaagcacagcatttgtagataaaagtgatcattttaaattaattcataaaatacattctcttagataatagaagtttagtgcaatctaatggggtacgtgatataaaagtatccacttataattacaagtaaaagaaattcatgtgcagcagtccttccttaaatgcaggagatactttccaagacccccaatggatgcctgaaactacagatagtatggaactcccatctacactgcttttttttcatctgataaccgagataactactaagtgactaccaggtggggagtctatacagcatgggtacattggatgaaggagtgattcatgtctgagagattttgtcacgctactcagagctccatgcagtttaaaacttacgaattgtttgtttctgaaattttccatttaatgtttttggaccacagttgacctcaggtaattgaaactgcagaaagtgaactgcagataagcagggggactactttacctttactaaaggtaaaaggagcaatttgggactcttctattctctatgaatttgcatatttgttacttgtattcaaattcaatattttaaataattctaatatctttttggaatttcatatggccttaaaaaccctttgaagaactagatcaaagattatattttagccagtggtattccataacttttatagaaactaaaaatgatagtcagtgaaaagagcactatgttattatacatgatttttggagatctgtattattactaatcaaaatcaaacaagtaaccaaattattaccacaacaaaaactttatgattggaaatacaaagtaaataatggtaatttcactttgaactgtatgtctatgtgaaatacattgacatttgaatttcgtttttgattaagggaaaatgatatattttatctcattgaataaagtgtttggcaaatatacacattgtagccgcccagtggaagtgctcaagtttagcaagcagcaatcttgaagtcattctaaatgaaacattgattatggtgcctgtcattttatttagcaactttcctttttccttctggatctcctctgtaagatgatgaaagaataaagcttaaaaatgtgttagggatcaaattcaaggattgaaggaggctcagacattccccgccctgcctcccacagccatcacccacagagcatgcagggtggtggaaaacagaagcccatttgagtaactgctctcagaagctgaggaaaaaccgacatgttcaaatgatttatttgtgctatccggaatagagaccctagatcagtatttcatcataatattattcaacaggccctctgacttgaaacttttacctaaatagagtcttgatttgcacttatttcaattaatatagcaaaagaatttgggaagtatttaaaaggtataaacttgtaagaagtttgaattttattggaactatttgggcaggatgtgcttgtttgagaaatctagatttaaatcagtgctatactagtatcctccaggggttttataaaatgctacttcctaagctactccgttaagaattgttgtcatttttatttttgtttatatttatacacacatatataaatctgtatagaattaaaatgaccacagtgaaaaatattatagtttatttactattacatggtaaaaaaaaaaaaagtagaaggatggctaggataagttttggcagtaagtatgttttcccggtagcaagggagaggagatcattttattggatttattagacgtggtgatcacatgaaagatacacatgccattttttattgaattaaataaatatggaaatatttcctgggagggtgtttccaggccgattcttaacgaaatgaagaatgacaaggagaagacaaatatagttcactaattccctgtgagcatatatgtgcttacacaaattgtatgtgagtgtgtgtgtttgtgtagctttttatgttttaggagcaagagttcattttcaaacagacttggcaatatcctcaaaaaaccaatggagtctatcaaaccaatggaaaaaactttttaacttataaaacaaattcataaagatagtcaaggacttgaaacttggatttaatcactgatttctgaatgaagaattatatcttacttttctgagaaaagttgccttgctcttggcaaattgcgaagtcatttccccagtttccaaagagatgtttttgtctcattagtgcagtggcttatctgatggaaacaagttctctcctgtcatccaagtgacagagactaggggatctccactttcactgacttgtttcaaagccgtggaggagaactgctgttgttttcctacacggtggactataatttgttgaccaaaggagactgtcgacttttatgcatgcagtgcacgcaggagtaaaatcctttcttcacatttatgaacccctctctgggtgctctctggaagagacagcatgtccctggtaagcaccctacatgaggtgacctctcatgtgggctgattgaagaagaggtcagttgtactgttcttctctgaccagaataaagtgatggtttgtttcaagctcttaatcaaatggagttatgtttgattttcttggacaccctcatatgccatattggtggctttatttccaggtttatccattacttccatttaaagctttatttaaatggatgaagataaagtcaattgcgaggaaggaaagcttgttactaaagaaagaataaacataattttattcaggatatagtgatatatgcttccttacttatattcactactgtattaaatacaggttaacatatgaatatttacataatacatcaatatataaacatatattgattattattgtcatacattcccatatcacttggcatttttgaactaggatttttaaagtgtgtaagtaaattctaggattaagcaaactgttttgaatgttttctttcatacatataccattcattgatgatgtggggttttcatagtgaaatatgtagtgcactgctaagaacagcaaaataaataataatgcattacaaagttttcagattacaagtctaaatcctaatgagggaggttgcctgtttaatgctgaatgcaagtttaaaaagagggtcttaaagataacagcggactccagagtccttgagtttgttttgcattcagtgacagtcactaaattagggaaaggaatgttcaaacaacacacttgaggaaaagtgatttttatagaaaggagccatttctgctaatagccagtaactgcacataaccccgctgacattaaaagtccattagctaagcccagtttcaatagcagctgatgcagtgtcagctaaatgtacattggaattttttcatataatgcagtaatagcagttctataatttttttccctaaaactacatacattaagtaaaacaaatgtcatctgatagtagtggcagggctgctaataaacaggcagagatttgtgatgaaacaaaagtaacagtctatataacaagaagataataaatagtagtgatggtttttaaagggagcctttgagaaaaatcatatggagaagcttaagctgacattcagaaagagttgtttccatagaagcacatattaacatgagctactttgagaaatttatttaaagtgaagtgattttttttacttttagctgagtgtctggtttttcagtgtattttgaaactatacgacgctccccccaccccaaacactgttatgtgtgtaaatgggagagagagtaacgaaattagaaaagagagcaagtaaaaacaggaatgtgtcctaatatttttaaggtgatcactataataatccttttgaaagtagtatgatgcattattgctgtctgaaatgaaattgaagtttgacacacccatattatctcccccaaaagagttgcttatatatacattttttcatcttttgaatattttctaatcttcatttcaatcatctgaaaggcaagaagttttaccgcaaatttacactagtatccaaagttcattagtaagtcgtcctaacatattctctaggacagtgttctgcaactatgaagccattgtggagacaaacgagattgcttagtaatctaatgtgtgttgagaacagggcagtaattaatcagtggctgtcgtgcttacaccactataaagtattacgagaacctccacgccgaccttcccctcccctattatcagaccattagtgaagctctgtacaagtaacaacagtggagccctgcttaagcatatgaccccaatagcttgtggataagctttgtgagcattttcacaacggtcacttgaattctcattatactttctagtagtcagaattatttattcaatattctaaccagaggcatcacatcttttatttatttatattttaaaattaagtccatatttccttatatgggttttaaaaaaaaactctcacataacccatcatttgttggaaaaagagaaagcaaagaaaggaaaaggaaaagcttactcttaaccgtagtggggtggcagagatttccccctatgttaatagattttcatacatgcatttcttaataaaatcaagaggtactctttggtgttgttaactgttttaattcagttcaggccattgtaaaagcttattttgagtgatttgggagcttacatggtcagggtttaagcaattaaattactaaccaaaatcccatttactaacatattgcatgagggacttgatgaataatctcgtctttagcatataactcaaacattaataacagaaggaaatatgcctcagttcaagccatgggctttgatttttaattctaaacccattttatttttttcagactcaaatatctattaaaagtgactattttccatatgtttttccttttgtattgcataaaacttaattctattgtgaaatgaataaagaatgtcattgtatttggccacacaataaatttacacacatctatgaactagtattatgaaactgaattatgttgaaaataacaagatgatgccagactgactgaaataggacaattattacattagattttggaataggttttagaaaaaaattaccctgcactgttaatgcactgttactttcatggataactttaaaagtgtgttctttttttctgtatgaatgacactaaaaaaaaatatattgagtggctgggcgcaatggctcatgcctgtaatcctagcactttgggaggccaaggccggtggatcgcctgaggtcaggagttcaagaccagcctagccaacctggtgaaatcccatctctactaaaaatacaaaaattagctgggcatggtggcatgcacctgtagtcccagctacttgggaagctgaggcaggagaatcacttgaacaggaggcagaggttgcagtaagcagagatcgtgctattgcactccagcctgggtgacaagagcgagactccatctcaaaaaaaaaaaatatatatatatatatatatatgtatgtatgtatatggactgccaacacattagagtatggattgatccttacttgattatttattatttatgcttataaaacttttattaaaatagtctttaataactttcattttttaaagtatatcatggctgtgtttccttgagtgaatgctttaagtctctttttttccagctcaatctttctttaattgctagagaattaaaaatgtactggatgtgtgcatatatttgtatgtatgtgtgcacccgtgtgtgcgtgtttggatctgataatttcctgatataggaaatgaatcaaattactttgaaaaaaatattaagatgtacaaccaaatatattcatctgacacctgtactggccaaatactaatggcagcctttatctaagtctcttggtaaagatgaataaattgtgctaaaatatgtcctttgcaaattgcatacaagttaaaatcttagtttcacttcatattttcaaggcgaagattccaataataatagtatttacatcatagaattgtaattaacagcgtcatcaaaagtgaagaactgagaatagctcctggcaccaaataacacttaatgcacattagcaattgttgctgtgccgttttattcttatcatgtaagtctatgctatacaatgatttttcacttgacgttactatgaaaataattagatataagaatgacaaaattgcattccattagggttaccatcaggtgaaagaatgtcatatggaccaataaaagcatgttgtcaaaggtaaaattcttaaaataaattggtatgttttaaaatcacattattttttgtacccagttaggttatgagattctgattttacagtaaaactctttggaaagtcaacacacttttgttccagttttatgaataagcaagtttaggtgatttcttttttcctgtgccaggttctgaatctagaatatatttctataaaactactacttcataaattttaatgaaaaaaataagtttgtgcttttctccactgtacatttgctgtattcgtaaagacaaaaataattagaaagcaggaagaatagttagcaaactttttaccctttgctaacatttaaactctttataaaggaacagaaacaattaaccttcctcactgtatcagaaattttaacacaacgaagtctttactgatactagtataaaagcaaaaattaattaaactgaaatttccaagcaaggtcaaagttctacatttgcgaggggacacattatagtataagcaaaaaagaaattaattaggtaccctactcttaaatatatatgttttgactgacacatattgcatttaataaaatattcctaaaatggactaatgaacagactagttaaactctatagtttctaacaagcatatatgtgttaatcatgatgtaattaaggagaagggaatggaaaaaatatccaaagatcatagttctacttgaaaatgttttctagtgtgtatttgtaaaatgaaagtgtactgttgcttaagtaacaactttattttgaaaaataatatgaataaagaaaaaacctttcagctacaaagaatactcattcttatttgttttggttcactgtgacatttcttttatattttttaaaatgtgtcattgtaaaattaaaacaagacaaaacgtaaaaaattcttatcttcagaatgtgtcaacttgataggaagaacataacccaatatatttataacccaaattaatgcaatggtggatctttagcaaacataatgtaatagacgcattaactaactaaataaacaaggacaactcagtcaccacttcaggatgatacccccacaggaaacactttaagtaggtctataaaactgattcacttgtaattttctttgtccgaaaatcaggttaacactcttttatttttttagcccaaccctcctccccaacttcctcaagtgctgtgctgtagggaacgttccacgtttaaaactctgcagtcaacagtatggtttagtccctacataattataaaaatgttttatctttataggatattattccatctaaagaatccaacagaagcaactagaatgcttttaatgattgattaaactgcttatgtggggttttatgctacctagaacattgaatttgtaggaatttttatttgaagatttccagggaggaaaaaacaaaacaacaaaaaatatgagactatttagaatcccttctttcaggctatatctgtgttgttttctgaaataaaaacacgcctctcaaaaactaattttctgaatattaaactgtcttaggaagttctattgaatgattactgccttttttgtttttgttttcaaactaacaagaacgatgcttattttgtgccataatgtattatttatttgctattacttcatcgaggatgtagaagagcaattcagagagccaagttattcaaacaaataaagaattaaattatttcctggagtcccacatatttacatgttcacaaaaaatgtaaacatattcaaacatttgacgatgttatatttaatgatgtattatttaatgatatcacattaaatgataaaaattattttatcatttaaaatattaataaaataatattattcatattatttttcttgtttttttctttttttgagacggagttctgctcttattgccctggctagagtgcagtggtgcaatctcggctcactgcaacctctgccttccggtttcaagcaattcttcctcggcctcccaagtcgctggcattacagacgcccgccaccatgcccagctaattttttttgtatttttagtagagacggggttttaccatgttggtcaggctggtctcgaactgctgatctcgtgatccacccaccttggtctcccaaattgctaggattacaggcgtgagccatcatattatttttcaaaataaagttgttacttaatgattaaatgatgttacctaaatatttttaaaaatatgtccatttctctcaactggttcactgaagaaggttcttcctgcttcctgtcctttctcactctcctcaaacctccacactgaagtcaggaaaattctaagagacaccatcagtagaactttttttcttaaaaccttttttttttttttagctttactaaacagttacctttagaatatgatctgaacatcttaccatgactgacaggagtatttgtgctaccctctgactctattccctgtcattacaatctcccggaccatgaaccctcccaaatttggcacaggctgttccagtgcagccccagtaggtgacatcctttagggttttctcacaagccaccttgctcacttactatcagctttcgcttaagctctttcatttgctatgaacaagtgttaattcctcagattccctagtttagatcttcaccccttcttacagcaacctttcccatctcacaggagcactcttcttttccctgtgtccccagttggtaggccagcatgatgagtacaggaattgatgagttgattctggtgtctccaggatgtgatacagcttttggcacacagccagaatgtaatcgggattttttttttttttttaatgatgttgggtgaatgcatattttgttgatgcatacataacgcatcttggaaggactttgaggactcaggttggtaaagttcattgaaacttcccaggttctcttcatcacccactttgagagttactagacagagcaaggtgaatgtgaagttgtaggtggaaatcaagactatctcaggagtgagtgcttcccatctcttagattctagctaaaaggccaatctcctcaccctcagagatccatctctaacttcagactttctaccctgtgatttgggactattaactaatgaagaacttggattctgttgtagttgagcaaataaaccccagacaattgatgtgtaagcattaagagcacggttgggctctaactggtttggtcaattttgatttggtcaatttacctaaagacagaattgggaattaaagaggtgtacaagtcaaacagcactgcagtactgccagagaatctttccttttattcaactgtagaattctatcttatggaatattgacaaaatacattgactttcaagttgagtgatgaaattttgttctatattggggttattgttgtgccaaaaatcaccctatggtgtatttttcatttttctccactataaagtcaacaagtctcgtgcagggcacaatggtgtgagtgtgaggtggtgggaaaggatgcctataggaacaggggtagagtagtaaaataaagaaaaataaatatgttttggagtacatattaaacccagtgtttccctgtaattgactattgtctgaaaattcttttggtaggaccacagcctattatttttgggcaggatattttgattttttgacaaggaaatagtacagtgaaatgtatcattataaggtgttattgaataaaatattctcataagcacttttaaggtaaccaaaatatgttgtggattatgctacactgctagcaaagaggaaattataacaagtaactgcttcttgtttcctaagacttcagtaaacacagacccaacttgccctgcataattaccgcagagagctgtgcactggtctttaactggtagttgtttgtaatcaagcagcctgaatcttgctttgacataaagcagaggaagtggttaggagacagacctgtaattatcagcagcaggtgcccataatggaatgccagagagatgtttaaacattactttaggaaagacttcaagactgtcaatttagaccaaacagcatttaaggaaaaactggcttgaaaacagtcttaaaagaatacttctctggaaacaaagaaaaatttaagaatcccattaatgcaagttaacttagtctttcttccatacacctaaatactattaaattatgaagtctaaaacaaggctggactccactttcagaaaagggatgatttaacaacattagactttccggttattaaaaggtttatttatgatgtaaacaaagctttgttctttattttagtaagaatcacatgaatatattggatgaatgacacacttccttttttaaattaattttgatggtttcaaaggtcatcgaatcttgatttcatattcatatatgaccaaatatatttacttgtcaagtgctgcacaaaaatgcacctttcagcagcagttttcaattttcacttttttttctgaaaagtcctttctaaatacaacttatgaagaataataagccatatgataagatgctgtatcttcgatagaaacttgtaatcatgttataaaggaactgttaaatgtcaattgatgatgccagcaccacttttagaaatgcacttagcgttgttattttgatagtgcaatatacttcaatatttctctcaagctatgcactactgtggttagtattaacttacaggaaattctgttgtatgaggcatagactaaagaaagccaacaaaacataattgccttggtagtgttttgcatttttaaatgaagaattttatttttctttcttttccaagtaagaatacacttttgtgtttgtttttctgttgtgggagtgaatgaactttgtggaactgaacacctcctaatggagaggggagtcatgatatatctgtatgaccccattcattaccagatgtgcttagcatatatttttggaaatacttattttcctgcctaatgctaactatatatttatcattatgaaaacaaatggaaaagtcaatcattcactgcacttgccagaaatgccttcagctcccacaatagttatatgtcagaatcttgccccacttaaaagcaagacagaaaatttattctggaaatttaccaggagagaccaaccctcaaaaatgtaaaggaaaatatctctgtagctaaataaaaataaacttaagtcacacttgatgcattacacttaagatagccccatctaaaaatatatatgcaagttgcagagcatttcagttgttgttcaaagtggacaccaaatatggaagacagattcaagaattacctaaacttcggtggattaaaaaaggagtgtaaaatttttatgatttgtcatttgtctgcatattttgacttatttggaattcttttttcttacattgtcaagtaaattaaactaagcctgacattaggcacacagtttatgtagttgtaacaaagcatcaaagtaattgaattctcgctagggaatttttaaattaatttattattaccattttttttttgagacagggtctcgctctgttactcaggccgaaatgcagtggtgcggtcacagctcactgcagcttcgacctcctggactcaagcaaccctcctgcctgagcctcctgagtagctgggacctacagggatgcaccaccctgcctagctgattttttagttttttgtagagatggggttttgccatgtttcccaggttggtcttgagctcctggtctcaagcagtgtacctgcctgggctcccaaagtgctgagattacaagcatgagccactgcacctggctggtattctaaaatttatatgaggataaatgtgactagaagtatagatgtggaactttgtatatatatattttttatgtatatatataatatatatatacacatatatacatataaatatatatacacatatatacatataaatatatatacatatatacatataaatacatacatgtaatgtattctctcaaatcacaattcagtttagtttttttaatggaggaaaaaaatcagtacagctgagatgaatccaattctggaagtattagttagtatatcccatagagagaaatgagacagaatagcataacatatggtacctgcctttaagaaacttaaaatcttgtcaggatgataaaatattacagataaaatgtataaaatcataagctggtaaacggatatgaaaaaaatgaataaaaatattttggaagagattaaaggagagataaatgtgctttgttaactttctgctggaatgaactattacctaattttcagaaaaaaaaatcaagtaacaactttcattgcctttaataagaactgttcttttaactcacagaggctactggaagtgttttgttacagccatgtacagttatatcctctcatcgcctctttccattttcttcacctttcaacttgagagcctatcttccctggggcctctccttttaacagctcttgtctttaccttgaagtggggagctgcacagagtccctgtctctaatttcttgagtcgctctctacttggctctcccagggttatactacatttctgcagtgcaaaatgggcctccaatccaaatttagctgttttattacatactctgtagctaagccactttaggccagacattaccacatctctcagcaacagagtttgagtttgtcaagttgtgcacatttgttgtctcctttaaaatacagttttacgtcttttaaaacttgtttggattttgagtaatggtctcattggtcctctgatgtttacaaaatgatgtcagtgcttgaaggtaaatggtggcaacgttagatatttctccttttccttgaaggccgtatgaagggagggagaccccagtgcatgaatctccatgggtgcgaaaattgatagagttaagcacaagcagcctgtagaactacttcaaagtcagttttagaaatttctataattaactagaattcttcaggtaagttcaaatcaaaggggctagaggactttgtatgaaggactctgaaaattagattttaaattcaaaacataagaatgttttgcctaacagctttcacaaataagtttcaaaacataaacagattgttaagagatatatattaattttaaatttgatcatgtaataatttttagaactgcaatttccttactctgtaatcctcccactagtaaaagctttttgaactttttcttatgtctttgtcatttggaaaaactaagagtatttttagagtaaacagtgtataggatgcccatgaatatttctgaagctctggtattttctagttttaggaataggaatgttgaaaacaaaaatgtgggaggaatataggggaatagtgtaaagtgattttgcaatatagtgtcagagccatgcctgtggtaggcttttattaaaaatttctccatcaattgcattaaaaaagtaaagaaacttcatattctagattaataagaaaatcaccccacattctctcaaataaagtttgcataattcctatgaaattgcattcttttcatttggcatggaaattatatgtccataaaaataaatttcatttttctttaaataggtaaaaatagtaattacaaaagcaattataaatctttactatgttaaatatatatgcacacaactatgtattgaattgacagctatatgatagcaacataaagaccatgaggaaagacggaggctgagaaatactccaatatttaaaaaaactcaagtttgcacagcttaccaattaagtatcaggagtctttctttaatttatcaaatcagtttggtcacactgatcagaagtcctgatttgcagttgtatatttttgtgatttaaagtgagttaatttattatttcccagtaaatgcaatttattaagcatgaagtataaaacaatgtcaaaggcaggaaaaaatgtttcaaagtcctaagtgaagtaaaattaggcaaatactattaacgtgtgtgatgcgtttttgttgttactaatatattgggaattgaaattgacagcatctcttgagttcagttaatttttgtcactggattgtaaaagtaacttgtttgaggatcttcatttttaggaagtttgtgaatagggtaaatgcatgggtatattaactcatttaaatacagagttttgcgtttgatttttaaaatattgtcacttaacttgaaactttatcctaaaaagctatcatactatgcctgtattaaagacatgttttgctttgtattattggtttcttttagtgctacatattcttttaataaaattcaactttcagctaattttatttattaaggacttagtagaaataattattcttttgtgtttttattgttactttgtactattggtaacacaaccatgttaaaatcattttttttcaatccacatgagtagtttcatagaaatacagaacaaaattcacattgtgaaacatattttaaatttgggaaatgagaagaccatttaggccccatattcaactttttttttaactttaattcattatacaatgtttagaatatagttttttgtggtgattatttaaatactctgggatttaatttgcctttgaagacacaaattaaaaacttgatagataatggaaatgagacatttgtattacttactaatttggtaattttaacctatttctggccattttttgttattgcttagtagacttaaatttaaagtatagcttgactaaaattagtgtggaagaatatttatttacactttgtattgtaaatcttccttttagagcattttcttcaacaggttcattcttattaaacctacatgtctgtctatctacagcgctgcatgaaagattgggtgcattatagtgactcagaggtagggagaccacataatttattgcctaaattgggtcatttttgtgcaggaaagggaaagttattaataattgttcctttacaagtataaactgagattgtcctgggtaaacaagatggataatcaccctaccaggacactgcaagatcatgtaataccttcttaatcactaggggaaaagttagatcatgctcacagtggatttagaattaaatgtactatattctgtgtctttgaaaagtcgttgccctttcatgaatttgaagaaaataattgattagtcagaacagttatcttcttgcccatgtcaaataacagagtatgctttacctgtgcacctttagtctttcattaagcctattcgaatttttaaaattaaatgtgttttagaaagtaacacagttggcttcttatgacagatgatttttcaaaaagcctagaaattaagatttgttaaaccgggaacaagacaaacctagaatctattttgccagagttgatatagcccccttacctcccattcttgttagctcttattccaccactgggaattgtcactaattgactgtcacttttgagtagagtagttactctatacaacaacagaacacaaaacagagaaaaccttgacagtaactttctgtaaagtttatttgcttgacacttccacatccagtatcttggactttggcaagatatattagctgtgtatgtcttttttttttttttttttttttaagaaataggctttgcacactgctatgaaaattgaatatgggttttttaatgtactgtcttaggtgagaacttgagtatcacatttcgagttacatgtatttcacatctttttatcttgtgggatttacaaaaatcatttgattaaaaatttctagaatgaaaaacaccagcataaatcttgactgaatagaaagagtgaataatgataagtacctggagtcatgagtttcaaaacgtagttctgcaaagttataagagtatatggctggaattttgctcaaagagaattataaagcagatataatttattttagtacttgagcattcctaggtattttaggcagaagaataaacttgagggaaacaattagttctatttactcagttagaactaatgcattaggccagcaacacaggggagtgcattctcagaattgctgctcttatgtatgttaaacttccttttggcatttgagcttccaaatgtatcccatcaactctgtgtgcagtgtttctttttttgacaggagcatttggagggagggctttctctaattcaaccaggcttcggtgacccattaatttggcatcatttttaaaaaagaacaaatgagaaactgaaacccagatggggaactgacttgccttgtgttcagaaacttgacctacccagaacatatattttacagatgaggaaacagacccccatagagctcagagttcacacaggagttaatgtagaactggggctacaactcatgttccttggctcccggttccagctgctttctaccacacagcactgcatcttcagctgcccccatgcagatttatattgcatgcctctgagtcttatgcttccttggcaaaccaggcagtcgcaagctccagtgcctactgggaccaatgaggttacgtgagtaagtgggctgaatgtagtacaacagattctgctggaaagtgtggtgatctggagagcacatgtcccgtctaaaacaaaagactccaggttctcactgcaggaatatgggcccaatatggtggcagcttccagttttccaagaaaacccagatctcaatttttattttaaatgtcttatgcaggacaggccaaagaacatgcatgcaggtggatatttgccagctgcctgacagattgcagcctccacttaagtgcatgtttcttatctccctaacagcagcaataataatcgcccctgttgcataaaacatgcaaggcatcatttatgtcttatctcttttaatcctcacaataacccagagaagtgttgaagatgaggcactgaggctctaccagtttgaagtaatgtaccaaagtcaaacttagctaaatgcagggttaggattgaaacatagatctgtctgatcccacagctttcaatcttaccctaacacccttagccttcctgatgcttcatccattgctggttgaattaaagctaccaaaaatctatagagtttttcaaagtccatttcaattcaacttttccaacatgtttttaaacgtgtattgaatcatcactatgcaaaaaggattgtgtgctctgaagaggaccaagataatttctagaatttaaatcacttctctcgtgcattaaacttccaactgctcattttgttggcttctacttgggctgacatctatttcttcttatttttcttccaggaaaaaaaatcaataaattatttgtgaaccttttatagaaatggaattaaagcttttaaaatttttattaggggattgatacttttgacatttatttctaaaggtaacattgtttgaatttgatttattatgtatttggtaattggaatgctaagtgactacgtttacatgtgtttttttgtagtacatggttttaacagcaattgtaaaaattattttgttattaattatcttgttctttcaacttccaatatagcaacatcctagtcactttggtgaaactagcagaataattttttgaaaattgatttctaatatttttattattttttctctctctccctctctagtacagccatgcattctttcacaagctatacccctaatcagttgcatagacacgtttcattccaactacagtcataacttttcatctatcctagtgcccgtttctgctacgtgcagagatgatcagttatgtcaaaagaaaggtgatgggaaatctctaaggaatggacacacagtggatgctgttgctttcctgtcctatctcctttactggcccagtgcacacatcccccagctgctgtcctgttggcggctaaaggctcacagctgcccccttctcccctctccaaggaatctcctttgactgaagcaagagctgctttgcctggtaggtttcctcaaggtgagaacaattctgttgggcagttcatgctccagagggtccagaggcttggtgaggctgaagcttgcctctggtggagaccacattcttgctcagcccctcctctgccctatcctgaccatctcactctccccctttcctgtgggtgtccctaggtgagtcacattcacagactccctctgtggagctcttcttttagggaatccaggcaaagataagacaaggtacccatcagtgttgatgaaacacactgtaattttctagaaaatgtgcctgcaactgtggggcactttcgtttcttgtgctttgctctggtccctggcattgcagaagaccagaaaccacagatcttggagtgtttgaatagaacaattacgagaacatgtgacatagaatacaggatagtctccccagcagttccaagcacagataaaaactcactattaggagaaaaagaaagaagaggttaagattaaaatattgtaatgatttcaaaaattattctggggactataaagccctttgtattgaaggttaatggtgataagagaatttactgtgattttagaggttgactctcaactctgaacttttaaagactaattaaaaagtcaggatactttcttttcaccattgatttttttaagcttttttttgtgtgtaggttgcttttcatgttaacttcttcataaagatgaaattgttaaaattttaatataacctctcattctgtaatttctctccctctcttcctcccaaacctcttctctctctccctcatgtctctctctcatgcacacctgtgtatgcttttacttttatatcttcattcagaatagctttcatccagcctaatctatttttactgaaagaaatattagcattgcactttaaaatcgattgtttaaagctcctgcccatttggagggtaccaatgtatgaacaattgaggattttatattttaaattattttataggaagggtattttccaaacttttaaaatatagagtattagagtattacttaatatatagaaataaataatataaactatacctttatacaatgtttaaataatgtcttttgtcacatgcatctgttcagccagggacttatttgtagatgatcttggaaaattgaatacgatttactatatacaattatattaaactagaaataaattagtggaagaaatatggtcatatttttttcagaaaaaagaaatgcacatttctgacatttattttcagtttgatattcattaagttgaattacacaatttgtaactgccagttttctcattcaccaagccaagaccaaattgaatgataaaattaaatagaaaattatgtttactttttcataattgcaccatttagtgttatcccttgcattctgtgatatataaaaatggataggaactttaaaaaatatacagtcatttctttttagagtccacatttttggcaagtattttggaaggtttatgaatatctacgtagctttctcacatttttccaatggatgtttgctatggactgaatgtttgtgtctctccacaatgtgtatgttgaaatcctaagtccccaatgtgttggtatttggatgtggggtctttgagaggtaattaggactaggtgaggtcataaggatggacccctgatgatgggaatcaatgcccttataaaaagaagaagaggccaggcgtggaggctcatgcctgtaatcccagcactttgggaggccgagccaggtggatcacctgaggtcaggagttcaagaccagcctggccaacatggtgaaaccccgtctctactaaaaatacaaaattagccaggcatggtggcacatgcctgtaatcccagctactcggaaggctaaggcaggagaattgcttgaacccaggaggcagaggttgcagtgagctgagattcacgccattgcactccagcctgggcaacaagagcgaaactccacctcaaaaaaaaaagaaaaaagaaaaaagaaaaaaaaaagaagaagaagagacactagatctctctttctgtatgtaccaaggaaaagcaatgtgaggatataaccagaaagagccctcaccaagaatctaatcatgcaggcatcctggtctcggtctccagaaccataaaaaataaatgttgttttaagctgccttgattatgctcatttgttatagcagcctgaacccatttaagacaatgtttcttggaggggtactaagatagagaggggcatcattattttcccaggctacataggaacaacaggtacccaggttacaataaagaggatatactaggccgggcgcggtggctcacgcttgtaatcccagcactttgggggccgaggcgggtggatcacgaggtcaggagaccgagaccatcttggctaatgcagtgaaaccccgtctctactaaaaaaatacaaaaaattagctgggcgtggtggccggcacctgtagttccagctactcgggaggctgaggcaggagaatggcgtgaacctgggaggcagagcttgcagtgagccgagagggcaccactgcagtccagcctgggcgacagagggagactccgtctcaaaaaaaaaaaaaaaaaaaatactagatagtttttctgaaaaatggtttttaaatgtggctttcttgatggctcaagaaattgcagcttctttgttccatttcagtcatttatccaaagagataatgaatatctccttaggcgaaagtatttatatcagagttcagatacaaacttccatcatattttcaccattatgcattttggagcttgtcacaccaactaatataacctgacaagtacaatgagtcaatcggtgttaaaaaatgaaaaatgtttaagtgttgaattttactcttgacttatatttgaatcttacggtagataatccttatcttttaaaattaattgtattatcttgaaagaatgacacgacaaaatatcaatatacttacaaatatattttatattctatttttagaggtgatatgatctgtagaaagatctagagatctcttcctaggttgagtatttagagacttgataagctctgtgaccttgggaaagtcattttacctttttggagcttcaatttcttcattgatctcaaagtgtttggagtgttgcgagagattcctacctacttcctcttagcggaaagcataagaatccatcttgctttgctcattgaatggttttgtataattcccagtggttcaggcactgaatgtctgggttaatgactcttttgggagtacagcttcttcattatgaagtcagcatgttccaaaatgtctttataaatcatctctattaaagatgcaggcatttgcagttatgcaagacaaaaataccttcagctatgtttgcagtttaggtttgaaggaaagtagggcagacagtgggagaaatgggaaatccataaaaagtcttccctttctgttcccttatgcacactgggcaattaaaacacatttaattgattactcttccaattaattccatcactagtattgacaaaagaaactgtttgctgtgaggcagttaagcaggtaagttgaatttactttagtccaatgagttccagtcaaaatgttgcccaatcagcagctgaagtaggaaaagtttgttttttttttttaaatgtgctaatgtgtgcttatgttagcttttctgttgaagttttttgagttaacaatgcagtgttttgggccgttggtcataaataatggtgttggcagtgatgatgaaataaacttgggtccattctatgggtctcttaagggggaacatcatttaatcattctggaatgatcagagtggtgtgatggcctctaaagaggtctctggtttcccctccagatggattcttattcctctggggtcttcaaggtcatgctgaccttattgtaatagctagataccaggtcctattgctgaatgggcctcagatgtcaattactactcccctagaattttttttcttaacccatgcttgcagtttagcagactactcaagcatcataataaaattctctttaactctctatactctatgtcttgaagcaacatttcccaaatgttgatttaaccatgaagcaagtttcccaaagtatggtccatggaacactagtcctgaagggtgtaatacctaataatccatagaaaatagagactttctctagtcaagtccctcccaaccccaactctgagcttcaaaatgaaattcaaataagacactttgggaagtaatactttaactttattccaatctctctagttctgtagtaccaaggtatccaagtcaacgtatttctcactagatcctcctttaaaaaatattgtataagcttacttataaggacttaaatctttggagagcaacctcttcatcaaagagatgttaatgttttatttaattatactttgaaatcaagtaaacctcacacaaagtagatcttgtttgattgcttctttacaaatgaaatgaaaacatgtatcttaaagataaatgcctgaaaagcatttttaaagtgaaatgattgttattctgcatattgaaaattatgtataagtctcttccaaggtgaactactggagtcacagttaatttcctaggcctttctccgtatttatctatgtaacattgggacttcagatagttttctgtataaatatgcatatttaaagtcaatttaaaaaatattttgactatattttgcagcataattatgaaatcagatttttccatttatattatagttttacagagtttacatcttctcattgtatatggagtcttgtctttagtgacctcttctttaggttacaaaattaacagataaatgaggtgttgctagaagaaagggaacaaggatcatctttttgttcaatgtaaatattgggtgctagatagtccatgatttatttggagtgagaaaatgggccttgttttttcagacactatccccagtgacacataggccaaacataaaggagattgcctacccttagttctggaattctgatggagcaaggccttctctctggtgctttattagttcttggacaaggactgaagggttatgttgaataacacgttcactatctcagtcttttctcctcattaaggaaaaaagaaatctgccataatgtgatccatgattagagttaatgcagtctctaacgtctcccagatgttttaacgtcactcacgtcacttgcagagtttataaatgtgatttgtctactggtttattcctttttgtagcaaacattatctttctgcttgagaaaaaaaaatctaaatcagagactcaatgagttacttaacataatttacagcgtgtttagaaacagtgctaaaatgcagagtatgtaatcaatggcacattctcataaagaatgtatttgcactttgtaacagaaacgtgatcatgccaaaatgaccagatgtctcttcttattggtatcccgttttttggtactgtgcctccattccaacttttcatggccataaaatattttcctttatttcagtacagggttgggaaggctgtaatcccaacctggaagagtatatctttgcagtattgggttacaagtttaattttcaaaattgttatctttatcctgattttttaggagcatttcaataagattatccttttttgtttaagtttctgcatgcattggttcagtttttagttttgtgtatatgtgtttatgatacagatgggactccctctttttcctttcattgtgtgtgctaggcaccctacctcaggtagtccgatatttatgcatagtcagcctgaatccagtataaggtcactgggagttagaaatcccctaattcatggattaaaacataattgaacaacagatgaagaagatgcaaatttcaagaagtaagaattgtatttggaggaagcagggattttctgagttggatttgaggaataagataacagtatcttgcatttaaataacagtttaatatttttatcattattatcattaatcgttgtttgtatctcgctttacaatttttaaagcacggttcatatgctatgacatttggccttcacagttagtttttgagaaaaagaaacaaaattgatgttatccctagtttacagaaaggaaactgatcagtgagtgactgagccatgaacacatccttcccagtctgtgctgttgcatgacatcatgctccccggaagcctctatcctggggacttcagttcccttttcgtagtgctctccatgtgtatgtacaacaggaaacacggtaacttggcactcgctgtaggtcctttagggcacacaggaagtgtcattccaagaagagattttaaaatgcctggtcgaaatgaggccttctgttgcttggctctccaagatgataaacaccagatgcagacattgatgtaacaatgattatccaggctgatgagcatgttactttgattacaagagccatggacttagaagcaggacttgggaaagcttcgggagcagcaggagattttgcaaatccattactccctccactctaaaggctccagcgtccactatgaagagggcggccgactgccactggcatttacacacactccgcccccagctttcaccatacaccaatcaaatgtctccgaaaacagggaatttggtctttgtaatctgaaaagtcagcccagcttcgagcagtttcacaaaaattggagatcatgtgtgctttcactcttcattggacactcagtgctcagcatattttggttgaagaaatggaggatattccaaaccaaagaaccttctgtcccagtcaatactgttttcatttgcttgatatttagaacctccagtccacaaggttcacattgaagaattgtctgtgaggagccatatactgggacaaatgaagatatcatattttagttaaatatgtgctaatttaaatcacattttatttttattcaagcagtataattaactataactgaattatttttaaggattcaatctgaaaacataggtaaacattactaccatattactgagaaaaaatgacaataaatatttgtttcctacacagatgatccagtccaaaagcatgtacagttacagttaattttttacttgatttgtcctatttcagttcacttcaacgtttttatatgaaatttaatatattcatacatacatgcacatagagcattaatatatgcatacatacaaaataccacatcattagggattgtttggttaatgtttacacaaatttcatgacatctatatacactgtttagactgccaagtttttctttggatgaagccagcatacagccctaaaataggaaaatatgatgtcaaaaagtaagaattgccaaaattgttgtttgtgtgccaaaattgaccttcgttttaggatgcattattgcaaataaagtcctgtgttaggttagatgtggtaggtgttttttccccttagatctgttggatctatgttgaacatctgttgactattggctatgcatagtggatgattacagctatttagctgcattatccatgcttaacattcactctctaacataagggaaaattttacatgctttcaattatccattttcctcagctaacaaaaactgaggctcactaaggaaaacctaatacgttaagcagaaataccttaaagttcaagctattaaaatactaattaagaattctgccattgggatttcattcagactatagggctgtgcagattcaattctttcagtattacctactaagtgtttaaatttgggcaaacccttaacattctgagcctcagtttgtccatctgtgaaacagaggcagtaacaccttacccaaagactctagcaattatttgagaagatacatgtgaaagcagcatgtactataattaagaaataaattacaattattaaattaattacatatatactactagaagcatatattgtataagaagtgagatattcttgatgctatttctaatcattgttagctttccatgttacatatataaagtatgtgtaaaacagttgattaatttcctgtcatttaagtgttataaataatatagtcctttgcaaattagatatatttaagatctttcattatggagatggagaaatatcaaggaatatatcaccatttaaatatctcctcatttagggccaggcatggtggctcatggctgtaatcccagcactttgggaggctgaggcaggtggatcacaaggtcaggagttcaagaccagtctggccaacatggtgaaaccccgtctctaccaaaaatacaaaaaattagccaggcatggtggcacccacctataatcccagctacttgggaggctgaggcaggagaatggcttgaacccaggaggcagaggttgcagtgagccaagatctcgccattgcacaccagcctggatgacagagcaagactccatctcaaggaaaaatatatatatatgtgtatatatgtatatatatatataaaataaataaataaatatatttatattgctgctcttatagaacacacaggctaatgtaagagataaacactaaagagatatatagaaaggaatttaattgtaattgtgataagtaccttgaaggaaagatacagtaaattatagaagtatataataactggtggagattgccaaagaaggcgtctcagagatgatttaacctctaagagagttcaaagaattaaggccaatagaactataaaattttgtaaattggtcaaagcataccaagttcacccacatctctgaaatatctgaacttactttatatttatacctaattaaggagcctagattatttctggtcttcccttaatttatatgcacaaactgaatatagacatttaaatataaatacaaattttgttactattccttaaccagtcaagcttatctataacagatttgatactgggttgttatttactattgacaatttttgaacaattatcttgtatgaacatgttctgtggaatgagacgatggaaaaatgaggaaaatgttactgtggaaatgacaacactggttattctcagaaagcttctttgagaaacagggagtttatttatggctaatttagcgaatttgatattgattctgaagtataccatctgcccagatcatggggtagcacatattttatataaccccaaattattcaagtgatgggctttaaagtttaaaagaaagttaggttaagcaatttatgagctctaaaattaaaatctatgtattcgcaaaacaaatgaatttcccaaataagttagacatacatttaagagacttgtcatgatggttgacaatacatgagcgtccaagaaaaatatatcgaagtttgaatatttcaaactcccagaatattcaaaaggcttttgccagcctgctctaaagctgttgcgttaatgcctgcccctccttcacctgtttctctcttaaatttgatgtgatctatctatgtatgtctatatattcagcaatacaaataaaataattgaaatttacattttaatgtgttgtcttcatgtgtcttgataatatatattaagcttgaattttgtgaggaaattaatatgatttactaagaaaatttcagcaaaatttgtctattaatgaggggaaaggaaaagtagaggtcatacttaataatgctgacagatctttatgtttctaaaagatttcagtctacatcagtggaagcaatgtatattagaatgtatttgtttatccaaccattaccttcttatcacattaggaatgaaggcaccacttagcacactgggctggtgtgcgcctggcattctgaaccttaatctgactaatgctcccattgcaagatgtaaatagattacaaagaaaaattcaatattttctcccttctcccaccagagcagcccacattagttgtttcctgccatataattgcattacatgccgggatgtaatccatggttaatggcagtcacagtcaactgtcactttgcttttagcctcggtcattcagtatgatttacatatttagcaaccatgacgagacctagatttgtcaaaccacttgtggaggttgtgatgctaactgctaccaagaaaatttttgttgttgttgttgaaggacatctttgcaggcggtaatgcacgtagatgcagagcatctgtaatgtaaattaattaatttatcaagtatttttgtgtccttaaaaatatttactacattactggattaatacttctgattaataattttcattacctggaaattaatttttgttttagtttcttatcaattaaacaaacttttaaaaataaaaaaattacttttgcttagtagtaacaaacatataaacttgtctccataaacctggcataaaaatgttgaaaatctaatttatcacagctattaacaaaacatataattgcatataataaatctttgaaccccattgaaatgtcagagatggtaaattttaggagattttgttatgtaaaattgatatcaatttaaatgcacttaagtcatttagttattcatatgaaactctcctccctggggtaacttgaatgcccaaagattggcagaatgaaaggtgaaggcctctcattgctttattttatacatgaactctcttttcagaaccatgcctggtttcccataacacatcgttctgggagaagagggttaaacaattattagctgtgagtgaggaattcttattgtttggttgaaaatagtccatccagtttctttgtaaaaatcccgatgatctgtaagcctaagaataattgccttactccaatccacttctcataccttcatcagagtggtgtgcctgtgtgtatgaatatgtatgtaaaatacaaaagtaatgattttttactttatttttgcacaattttcgtgtgttccctcatcaagttccagcttgaacctttaaatgtttcctatcgccaacttaaaggaaatcacagttccctgtaggaatggggcatgccaggtcctccaccttctcgctcctgcctcctgcctccttctccagacccattttcatttccatattccacttacagtgccatgttctcccagcacttggtgcccagtgtctgatatgctacttccttcgcatctaacaagtagtcacatacccttcaagtttctgccaaaacaagatgatctgaacaaagcaaccttcttcccttgaatcttcttccagacaatacccagaatgtagccccttccccaacttcctcagaagaaaacttccacctcttcatttccacagtaattggtacatatttaaatttgtattgatttttttttccattgcattggtctgaatgtcgacatctttctcccacatgtacgagaaaacccttcaagggaagggagtgttgatcagctttatctcctatgcatctagcaggggacctagctaaaatgaaagctgcgttgagagcagatctggttactgttgtatccatgaaacctaaatagaggttatgcaagtatctgctgaaggaatgaatcagtgtacctactaagtgaagagatgtggattgtgttctggtggttcaacatttctctatcaatttctgtatcttggtgttcattgttttcctccatgtaatttaattatgttggacatttaacacttttaatactaatggcatgtggaggagaggcagcttccatttttcctaataattcagcagagcatttctattatgtctagcctgccataaaaatgttgacgtcagaaaacactttgatcctgatattaacactttgatcctgatattaacccgatattaacaaaagcaatcttttgttaaagaaccccccgacaaatacaattaaaaatatgcaagtgttgctaaactctcctttgtggtgcttaggtttgtcttctgccctgatattattagcttctgctaatttgacaaggtcagcagtggcactatctgccttgccattatcaaaggttgtaaggcatttctcttggatgaatcacaaaatcattaacttctctatcactgaaagagcttcccagctattctttctgtctttctgaatcaatatccccagggtatcagtgtccttttatattcaacagaaattatgaaatcattccacccgtttctcagggcactagctaatggggacctgaagaagactttaattgtctctgacaacaactcaaccacttttttcttcatatgtggatcctgttctgcccagtaaaagaagggacaaaccaagttaggaaaatgccgaggcaaatttcggacagtgttgaagaatattccacaggcttttattaaactcccattctatggagattatataacattcattaatgtactttataccaaaagatgttccttgattttcagtgtcagagatgtccaagttactgtatgacaacttgcctgggaaagtctggttatttgatttttctacagcacactacccttaaggtaaaaatttaaagataataaattctgaaggactaaataacattaaaggaatgtattaaaaccattttcaaatctatatgcctatgtgtatatgaagagagaactagtacagagatatatgtatatgacttgctttaattctgtattctcagtggctggtacacagtgggcactgaaaaaatagttttgaataaaaaattaaggaaaaaaagaatgattattagctatagctagtgtttttaaggcagctatagtcattcacgtatttataactgagagcagagtgtggcttgccctctagtggtctgttttagcgaactttaatcctggcctttgaaagataaatatttacttgataatagtaaagtatttatagtaaaatatttacaaatggatggtaaaataattttcatttttaataaacatatgtctaataaagctttcttttgtccattttaaaattttatggtgaaacatcaaagagaatttggaaaactagaaataaaaggactttaccttttagaaaaatgaaaatatttaatatatgacattgatattttaagccatatattattgttttttagttatacttccaatttctgtgccttacgtaaaatacggagaggactttaaattgtttttcctgtcttctattacatgtcaagtgtttcacagatggaaaacagaatctatctaacaatattgtaattatcgacgtgaaacgcaaacgcactcttcttttggaatgttctaattatggctacttaggaaactactgacaatttatatactagtgtggctgattaatacttaccttttcatgttatttatattgtttatatttgattactattatgcaaataattatttgaattaaaatggcctgctactctaacatcaaatataataatatactgagaatacaattaaatgaacatacataaacacatttcacgaaatgtatttttctctcaagaattcactaattatctagtaattgtgttcagtctaggtagttgcagttatttttaaatgaattaataacagggtacacacattttaaataatattttaagcaacaggcatttaatcagttatgtaaaagaatggatgtcaagcttcagattttttattaaatttcttcatcttatttgttgattttagcatctttctttattttagtttatgatttatataatagaaataaaggtggaatttttctagctacaattcagggcctagaaattaggagttgagggctgaaatatgtgcaaaggagcatagaattatagactaagattctgtgaggaatcaaaactttagtctgtattgcactatactctgacttactatcatcagatataacattaatagttatattgaaaagtataggtacagactgcaaaaaaatgtatggttactagaaaaaaactacaaaaaaattttctctgggcttcaaagtttttaattgtgataataatcgagaataaacttaatcagatgttattaaatattttttatttttggtattccacttatatatgtcaaaattcctacttgttagaaaattaagcttttcactcaattctcccagatttacttaaactcatttttgaaattcagcattatgtaggaatgctacatatcatttccataggaaattgtgactgtaacaccagtttcaaaattaaaatgattttcagttctcttcctgaatctagaatattcatgtctagatttctaatagtttctggaagaaagaagatgtttactcctccaataaatttgggatactatattaaaaatattctttactgtaggacatctcaaggcccattaaaattaatgtgtaatattaatctccaagatgggttataacatacagctcattctcaagttatttgaggattcctttttctagaaactttgaccaataccaaatgctgatctggttttttcctttttgggaacaaactagacttgagtaagtcactgaaaaatgagtaacagtaaaaatggagagaaacgaaaacacatcaaagaaagagggacataatgagtcacagcatgaataaaaacataatttcaaagggcattttttttagttcagcctgtctggagcagagaattcatattgacaaatactgtttattgaatttgagccaataacaagatcagattgtacagagtctaattgccaggttaagggatttaggctttatcatataatgtacaagaagccattacaagtttttaataaaatagatgataatgtccatcatttattaagcacttgtcttagaagcttttctaagtgctttccctgtattaactcatttatttctctcaacagtcctttggtgtaggtagagaataacggaacaaaatgtcaattaactttcccagggtctatagcctagtggatgttggagctggcatgtgtagatccctaagcagtgtaattccagaattgttgcctttaaaccctattctatggtataaagagtatcctgtatagggagattaatctggaaccatatgaaggatggatccaagaagcagaagactggaagaaaaattggttggtcaggaggcttttccaataaaccaagtgtgagatcctaaagtgtttaatgggatgccaagaggaatggaaagaaaagggtgaggtttagagattcaaagaaggtaacattgatactaaacatttgacttaattcatggcttcacattgatccagggaagtggagttccctgtatgcgttttagctgatggtagcattaacaacaagatgacagagaaattatgataccactgacaaaactgaggaactcatacagaagaaacagtcataggggaagacgatgagtctgagttttgaagatctttagttggaaatgatgtcagcatactagaattatgtgactctatatcgagaggaataaatggctatacatagagacttggagtcttcagcaccaacatgatggttgtgatcaggggaggctacgaattttttcaggacaaggatgagacaggaagagctgaggctagagaatgggtcttgggatccgctaagtgctacaagtgtgtagaggaagaaaaatcagagaggaaactaatattttaaaaaggaaattgtaatgttgcagagccatgtagacaaatatccttaaaatgatgacatgcaacactgtaaaaaaggacaaaaaagagaaccaggaagaggggtggcagttaaaccatctcattggtttggactgtttagatgttgttaaaaagaattcagtgagtcattccagagttagcagctgtcgtttatctatcctaattatctaatggtgcctcattagctcattttttctggtcagtttaaatagataaacactttcctttgtatctgctgattaatttacttggtatgatattatattaaagaagaattgaaaatgattattctcccatcatttaaaaaagtatgtttgatagtttcaaattcatgagagtaaaaacttggaaaactgaagaatgcaacacatttatcaaattcctggacgtttgttgacttcctactctgcttctaaaattgtaatgattttcaggtgatttaagtgcaatttctagtcatttagtgtatatgtgtgtttctgtgtatatgcacatactatttattatttgttatttgtattataccttgcatgtataatatttattaatatcttacttacatttattaatataaataacccttaaaatcaaatgtaccctcaacatcaaaaagtgaaggcattagaagagagtaatagtgaaagaaaatcagatgtatcctggatattatcattggcatataatatatatattattatcaccatattgtgtgtatatatatgaaagtatttattagttttcttaatgcagtacagctatttaacaaccccagattgctaaggttgttactgattaatttttcccagatttaccatctgtctgggctgactacatagccattttgctagggttttcttccccgcctctgtaaaaattagccttactcaacatgacgacttttttaaaaatgtaaagtaacacgtcatatattattacatcaaagaccattcaaaatagcaacttttaaatatgtgagtgacaggataaattactaccgagtattatgcttaacatcactatcacctagagccaaaaaccatcatgcagtgttggtggtttggtgacatattttgactggaatgtgctgtgctattgggcatcagtcaaatgtggtaatttatgataattactcatctgaggcagataagaaagcaacatcctaaatacaaatactgtcatagcactattgccctgaactggttgccgcagagttgaatattctgcaacaactttgtgattttacttccaatttacttttgattattcttatatgatatatagaatcttgtctacttttatctacatttcctgagaaagtaataaaaataaatggccccacctgttaagattaagatgaaaattgagatttcataatgaaaataaaaatcagatggatgatgtaaattttaaaaaacatgttttctcatccttttcttttttccagatactaagagaaaaggcacatgtcagcatattttctagtcttctggtagcactttcaataaaaaaaaccctttagagttactctttacccttgaaatgagttcagtcttgtattctttgtatctactcttggtcttcctcaaagacaagataaatcagagttgtgaccttactcctactctttctagaagacagattctcatttctttcagaaactatggtgtttgccttttcaacatctcctgtatttaaaaattgacagtcccagcagttttacagttagatataaggctatattgacacatattttcccccagtagtgaagcaagtgataaattcttatggagagcatgaaagtttctagaacaaaaatgcaatgtgcttcataatctaaatctgacaagtgttgaggaagaacttttcaaaataatgatcagaccaattcgctttagttgcttaaaatattatgtcacccaatgacagaaccaaaaaaagtgtttataaggcatactgcataattaggaagtaaattcctaagatatatggctaatacagcagggtttgaatagctccatttctaaagctgaatcatggtctttgatgagagtgggttataacaatgcaggctttgagagccttgcaaaatctcaattaagttgctgaaatgtttccacagtttatttttctaggatcttttccatgactgctcgctcataaagacctggctgtggaaggaaattggacaggaactcttgaattggcctcttgtttgcctagttctattgacctgtaccagggtggttacactttggaggccgtaagttgttcatttgctactgttcttaatcaataaattgttccttgccaatgaataattagaatcaaattctgataacggaccagttaaagcagggagcaaaattctgaaattaagaagtgaatatttgttgatttttctctttgagcccctgtcatatatagcgttgtcatttttatttagtaagagattattggaatacttgggtaaataagcgtaagtctcttattttagatgggttgcatttgaacaccttaaaaatatagaagttttttaatgaaagcaattgtataaaaaataaaaattaatatcataagatcataaaaactataaaacagaccacccccaaatttaaactgcaatgaatgacatcatagggcaaagacattagttgatgattcatattaatgagggtatgcacacatatatgcatatgtaatatctttgcaaaagctttttaaagagctgttaatttgattttggcacaaaggttaatttttcgtgccttgttataatgtgtcagcatttttttgaaaccacagctcaattttgttactatatttgtagacctgaagtgacgtgtgtttttctccaatttaaaagaattttctccttgcctttaaataatagacaaaatccgtaatgaaataccccctgaattattcagtaccttgatcatgattataatttatgctagctttttcaagagtgctattgagaagtttagtttacaaagatgtgattcatataacacatatatatgttctttacatgtatctgccacagacttgggtcaagaggaaatgatagttgccccaaatggacaactaggaatttgaagacagaaagttaaagaaatgctaaaagtgctgtttgcttttttgctgtatttagaactgagcggtgggtaagcttgttcagaggggagtgctgtttgcagtaagtaagaggcagaagccctaagtgttcaaagacaaagaaaaatgaaatacatttgccaaaaactggaggaccaggaagtgccatcttatattaccatccactgaatgttcattatttcatagaaaatgtcggtgggacttcaagaataggagtcatgttttactgctaacatatgtggagttaagataaaatcatgcattacaaaactgtaggaaataagtgtttaggattcttagtgatattacatagtggtgattgattaatgacataaatttgaaattcctcttggactgatgtgaactgataattagggactgtggtgaaagagaagaaaatgccatagaattctgaaactagaatttgttttgttatatcaaggatacaagtgaaaaattttcactgaatataagtgaaatggtgggggagcagatggaagcggtcttaactgacagccaacaatgaggaatttggaggagtgatgaggggccatgctattttatgcttttcttaaagagttggctaaatggttttgaatattcttcaagtaaaaggacagaaatataataaaaagtacataaagcatgttgattattctattattttagcatcttttaataaagttgctaaagggtttattttatttgacatctattctttcagaaggtttgtgtcctgatggcagccagatgatattagaaaaaaggaactgaatttgttgcattagaaaattatgtcaaatgactctctaatagacaataaattacaattacaaatcaaaataaaagccaacttattaatgttacaaaagaagagatgtattgtccaataattacaaacttgaagaaaatgggtgacatattgtcttagttcattttgtgttgctataacagaataccacagactggccaatttaaaaagaaaaaaagttcacagttctgaagggtgggaagttcaatattaaggtaccggcaactttctagggccttcttgctgtgttattccatggtgaaaggggagagggtgagaaaggacatgagagagaaaccaagaaggggcctctcttttgtaacaaacccactctagagtaacaacaataattcattgatgaaggctgagcctacatgatctaatcacctcttaaaagaccacctgtcaatactgttatataggggatcaagtttccaacacatgaattttgggagacacattcaagccatagcacatatgaaccaaactttttcactgaataggaagttaagatatggaatacacttagtgaatataaataaaagttaaaagagtaaattttgtaatggacaaagagcaaatgtaaggttagtcagagtccaggataacatcatttgaataatcttggatgtgatatctgtgcgattctttgcgggagagaaattttaaagattatggtaatagttaataccactataatattcaatataacctgaacttaaatctgtgcttttccctaagaggaagttacagggaacaattttattaagattttcatacaataaaactgtctattttcatttttagtaataatgaaaatggtaactgacatgtactgagtgctttccacgtgtgtgtcaagcctgtgctgagcattatatgcattgtcgtgtaactgctcagattaaatgtaagtctagcacaaaatgtttgtccatataagtcaaaaaatgttggccgagcacacccctataatctcaacactttgggaggctgaggctggaggccggcttgaagccaggagtttaaagaccagtctgggcaacaaagcaagaccacatctctaccaaaagaattttaaaaataagctgggcatggtggtgtgcaactgttgtcccagctgcttgggaggccgaaaggggaggatcgattgaacccaggagttcaaggcggcagagagctatgattgcactactgcaggcagcctgggcaacagagcaagaccctgcctctttaaaaaaaagtttatatgataattattttctgttacatttctaataaagtttctaatccagtttttacaaggtgattgggggccagtcataatccattgttgcaaccaatcacactggaagtaacatgttcgtcattaaaagaccaactgtaaatgctcctttacttttgtcaaaactagtaatgaagtaagaacacagcaccatgatacgaattttaaacattcctcaactaatgggccatacttttagaagaaataaaacagtggtcacttcttcagaggctgatttgtcaacataacactaagggaaaagaaaagtcctctcttcttctgctgtggctgaatcaccacaggcttccaatcaaaaaataaatatttccaacataagaggaaggaagctttggtaaatatatgtatatatttttcaaaaactgttttacatgaaagaggtcattcatcactgtaagaatattttcaaaggtagcatcagacgtgaaattcaaaactccctcaaaactgaatcctgaaaaaagaactataacagacaaaagaatccttgggtttatatgtgttcctggattctctgatttgcctttataatactttcacaagctatagtttattatttttaaaaccactttacttcaaaattattgtatttcagcatctaatccatacacatgtaataagaggagccaaataatttattaatttaacaatagtgatggagatttctgcactcattagcatgtaacaatattcatatttgttaggttgaaaatgacctttgccctatgaaaagttttgttaagctaattagtaacaaaaaatatgttgcaaatggacattgttagcctccttaaaaagcaaacttcttttaacttctcttaattaaatagcaaaattatgtgtaaatactgtatttgtggaatgattgatacttgttgctgaccaaaaaagccctaaattatagtctagttttcagaattctgagccaataaaaaaaatgcctctagctagttcttttaaagaacacaagcccacactgaacagagggctagctgcttatatgtcattaaaaagcaaaacctaattgtactatcatgtatttattgcgtctataaagcaccttccaagaacttaagtaagaacattaatttgtacctgtattttaatgcagaagtagaattccatctctttcagtgcttatgagtttggtgttttaattccaccccaaattacctaaattctacaaatatttattaacacacagggagtagtattattctaagagtttttcgactaatgatcatgcagtagtatctaaaatagctattgatgttagaaagttgtaacatttcttttccatgtaatagcacatgatatgcccaagggaaaaaatatacggtatttgtacataaacccaatcaaggtgatatcagtgggactgaatttttcttccttaaataaccagtaaatgaaaattgctctctagcatctcaaaggagaaaatgctaaaaactattagctaacagagctttctgcctggctgcattaattttctattcattttagtaaaaggaaagttttgataggccttataaattacaacatgttcctagtagactaatagcttgaggaagaacatataatagctctccttaatcaaaataagagcaagttgttgtttatgcagctgaggaaccttggatcaagggtgctgattttattatttcgatgccaaaacaaaagtaatccatataaacatgaccaatgtttagaaaggttaggaaaaaacttattaatgtggctctagcaggcagagttttttgggaactcatccattttttataactagcttgttttttttagaacttaatatggccagacattgttgtataagcacaagggccatcatattgagcaaaacacttctatagtccctgttctcatggaatttattgtctggcaagaaaccaaatgggtagaataaggtttgtaggactttaaactccttcaaaactggagaccatctaactatttattcgttgtggcatgataaggtgctaagaatgaaaccaaaatggaaataatatttatgttctattaatattaaaaagaaaatcctgcagcacttctgtgaactgggtgttataggactggctgatcccaaaacaaaactcctacgtttttatcatttatattaagtttccatgtcaattggttttactggtcaaactacctttagttcatctactattgagtcagacactaaaggtgtattaagtcttccaaggatggagggattatcctcatgtgcctactgtttcctgaaatttaaatctgcactgaatggcctaggatgtatagacagttaacctccctgaaacacagcctatccttttttgttaatttccacagtgaatgacagttctttaatatctatcttttcctccccagtgctcccatcttatatatgtgcacatacatacctccaacttctaaccggacatcaatgtaaacttaccttaatagctttggcagatacctgtgatcaaggggagggagcttactggagtgtgtttggtctccctggaagactgaaggggtttaggtttcctgtaattgactcctgtgctcctccctttttctccccacaacttcacttctctcgccagatcagtgtcagtaggtaagtaaatccattatttgaaagctgtctgttgaccttttcttcatgattgattgcatgaaaagtgcatgggagtgagatttccagagaagagaatggtcatgctacctgcccttgccacttctcccagaatatcactggggtttcccacagaggcaaaggctgcttggatagaagcaatacctgagaatgctctcaagtaaccatggtgaagctgaaagccacatccagcattgctccacagccggtgagaattatttataaagacagggcaggggctgagtggtttattggccttcaaaacattcctgatgggacagtgaccaggtctgcagttgcctaagggtgttaagccaacttttaaacctccacctattatatccagagtattccttctaacttggacttgaagaataaccagattccaaccttttctcaagttggaagttacataatgaatgatagctgtcctagaataagaagtatattttaaaactttataccttaaaatatttttcttacttgagtctgcatttcatcaggtctcctgtaaagctttagttttcttccatgtccatgaggaaaaagaggtttcattatcaagactcttctaatagtgaatattttaaacttgctctggaaaaaattaagcacaagtacgtttggagaagtacatttttattttaataagacagtagatttgttgcagcaaaagatagcaaagtatcagtagttgaaatagcgattatatgtgtcttgaccaaacttagaatccttatgaagttttacatgtcatttcatacaaatcaactccaaaataaaattttaaaggcaaaatttgaattcagttatagtgatatatgatcctaaggaaaaaaaaaaaacactgtatgttccaatctgaaaacatttttggaaggaataaaacgataaaacagaaggggtttttcactgtttttaaaattttataaatatgtagagattggcttaaagtttgggatacaacaaatcagtgaagaaaaaatcgtaccattatatgttagcatcagctaacatttgtatacactttttactttttagagtactttggtaaggagtatctcattcagtgtttttagaaaagatggaatgttttccttttttatgtaacacttttcaactagtcaaaggaaaatgtttaattttaagtacagctactcttgctttcctttgcttatggcttactgaatgatctttccttttgctaaaataattaatactatataattctgatttgaggctagaaaataagaaactcaaagatcattacaactggtaagcaaagttgtgcatggggctgaataaaacaactcaaaaagaatgattattcaaaatattgttacctaattctgcaacattaagggaattataagcagtagttgctatttccttgttctctactgactttcggggtccatgatagatgtttggtaaataatagtctctgatgcttgaaaagccttaaagctacttattattatccccattttacagataagaaaacagaatgtgaagtggtagagcaattacctaactctaaacccaagtctctgagatttggaagctgtgcagcttgtgcattatgccatgactatgatatatctgctcactaagttgaatatcatgtagctatttaaaagcttattaaagaattatgtaggattatatgaaaatacttgggaggaataaatgacaattttggtctcaataaaatgcgtattttttaaaagactgggaaaaacacaagataaaaatggttttcttattatgcttttcacctttgctacagtttcttaactttctctaataccattataattatattgctcaaaaacatctatttttaaataataaatggatcaaatggtcaagtagtaaatgagtatgtggaaaatactattattttatctgtgtgcattttgtagtgtattaaattcattacattaagtcttgttatttgtttacaccactgagagaccattagtgatttccacatgagtatagcccatgtcttatctacacagcgtgaagaccagcacagtgattgccctatagtgtctgctaaataaatcccaggtgaatgatcattgaataaacagggatctttcttaaaacttattaataataaagagtttgtgaagtaagtgtagaatagaattaataagtttaactgctcttaaatggcttatatagcatatatcaatatggatttatattttaaagtaagtgcaagctgtggttaaaagcagacacttttacactgctggtgggaatgtaaactagtacaaccactatggaaaacactatggagatgccttaaagaacttaaagtagaactaccattcaatccagcaatcccactattgggtatctacccaaagaaaaataagtcattatatagacacatgcacacgcatgtttatagcagcacaattcgcaattgcaaagatatggaaccaacctaagtgctcatcaaccaacgagtggataaagaaaacgtggtatgtatataccatggaatactactcagccataaaaaggaatgaaataatgtcttttgcagcaacttggatggagctggaggttgttattctaaatgaagtaactcaggaatggaaagccaaatgttgtattttctcacttctaagtgggagctaagctatgaggatgcaaaggcatggacttcagggatttggtgggtgggaggggaagattgggagagggtgagggataaaaactacatattgggtatggtgtacatttcttgggtggtaggtgcaccaaaatctcagaaatcatcattaaagaacttatccatgtaaccaagaaccacctgtacctcaaaaactattgaaataaaaataaaaattaaaaaagtacaaatatctatttcttgttatatttgtcctcaatgctactgtcatttagtacccaatatttatgttacttgatcaaattagggttctcttggatacaaagaatgtctgttttaaaacctaggatgaactaaaagtgattcttttgttagtggcacatactaaaatattttaaggttaaagcttacaaatgactgaggatgggaagttcataatttcctagttaaaatgacaatctataattgttttcccttctatatatttaaaatacattatacaccacaaatttagggatagtgtaatttgaaatacatactcagtacttttaattttccatcagatactaatatagtcttcttgaccaatctaggtcattcacttgtttaaaagaaaaaagttattagacatttttggttaaatcctaatttctgaggctcagtaaatgtttcttttgaaagtcagaaaagagctaaaatatgtaaatactatatacactgtcagaacaggatgccactcttcttgttgctaagttaatgagtaaggatttatgcaataatactgtttttcttcagagtagtgtaatcttctagtcctcagatgtttcagttagttgtagacattttgacattaacaaaacatatgtttctatgtgccatgtagataggataacgtatgtaaaacaccttaaaattgcaaagtgctatacatatgaaaagtgttgctattaatttatgtctctgaataatttctatttctccatatgaattgaatattgcttaaaatctgggtactttgttactcatttgaactttagtaaatctttgaattttcttctcctttttggcccttcagattgttgttgcttctgtagtcgacagagttttccactaatttcataattttaaaatgaggatgatagagttggcctctaaaagaagatgagctctggagtcaaaacatgggattttaaatcctagatctgccatttaatagccatttgaacttggacagttatttaacttgctgaagccttggctccttatccataaaatatggattttaacccatgtcctaatttattcactgagattgttgtgaagattcagagaaatcatctatgtggagttaatgtgatctttatgatgttaagtacatatcaattattatctttttattataatatgtgcaactcaattccaaataacatctgctatcctcaggggtttcatcagtgccacagaaagatactgtgcttaattttgttttgaaactgacaatctctttccctctggtgttagaggcaatggttttatcaatttcaggggcagcttttatagaccaatagatcctgacctctatactgggtacaatttgtcttaaaactgacagagttacaagtgataaaaggaatatagtgctgttgagaacattcccaagagaagggagtggggagtgtgttagaatcttgttttcagttagttttagaaaataagtgattacttagaaagaaaaaaatagagaacaataatttgccctttgaaatgagaaaaattaatgtagatatgaggcactagggaaacatataaaaattctttccaacttaaatactagctgacttcattaaaataattagaaatgcctatattgattcacatgcacaactgtatataactgtatcactttggttacatttggagaaataaatcctacttccaaatattctctatatatggtggccatatatattcatataaaatattaaatgttattaaaatttatcatgaaatcagtttttccccaattaatgttttcaattaaaggcaatagtgagttacttctggctacttacaatagtgaaaatttcatagtaagttgcaactttaaaaatttgtatcagttctgctctttaaaggcatgtaaatatgttacatgaacatcatttaaattgtatatttaaatgttttaattttagctaagatttagtttaataagttttaagcttagcattgcctcttagaaacagaagacctctgtcctccattgaccagatttgctttttcttatgtgaactttacttctccaattttaagaattgtgtttaatatgggaaggccttttaaacaaagatatgtccttgagaggcatttgtgcactttctttctataaaagcattgaattctgttggctatacttaaggggtggggaggacaacaagatctgaaaaatatctccagtgcaaattatggggcctcttggtctaattttccaacagctgaaaaatttcatcagcactaacttttttaaaggttctgaaatcttttgaatgaataacaagttgccattactaataagccagttgaatatctttacatatccaacacactggacattgttattgtattttaaatggcttgctttcctataaaatgtaaactgatttaaatatcatttgattcacacttcacatttgccaaatagcaccactcttcaagcctttccactgagttaagcagtatcagctgaacatctttccttttttactcattgatcatttgaatgatttttctttcttgtccttttcaacctggggaacatttttaagaaccctggagtgagccgaaataactgattcctgcagttttaatatctccttattgaattttgatatcatagtttaaatttaatcatgaaatgtatcatatagttggcatctttggcagatacaatttttaaaagcgaaaaaatggcgttgtaattgatagagaatattaactgtacatagtagtggagatttcctatctatcatttgccttcagattgtttattaatatagcagaattggcctttaggttggaatattgttgatcagtccgctgtcttttgacttaatgatttgcaaaacctgctgaaacaagcaggaatatacagccagcttttgtcagtatttcttaaattcctagcccagttactggatgccattaaaaacctagacaacttttgccccacagtacacagttagaaatgagtacttaagcacacttaaatttgaaggaaagaaaatttgaaagaaattttttttaaaacttagtgtgtgttttgtagtaccattttttcccagattaaaaaaaattgttaaagtttaataaagctcaccatctagtgtttccatccactgactaaaaagtgtattgttggataaaaatattcagaaaattctctttaaaaatagagtgtacacaataaaacttcggttcgcaattcagtgtttaaaagtctgttcctgaccatatttcctgccatctttccaaccatgaattccgcattgtaattggattgttgtgctcccagttttccaaagaggtctcttgacttcctaattcaaagctatatccttatttctggcctggaattccttataactcctttccattccattatgacttcagattctagctcccggaacatctcatccctaatagctgcagcccatggtcatttcacatttacctgaatttattattgcattcataatctttattttaatttggaattaagcttacattatttataataatgttggttaccgttaaagctgcctctaaatatgtcatatgttgagtgctctacaacatgaatcccgacatataatcggtgtttaataaatattttttagcttttctgtagtttaaaagggtagtctgaatcagtcaaaatcagaattgtctataaattttaaagaaatgttatttactactcaatatatgcctagctatccaaatattaacaaataggaatctttggataactcctctgattaatacctaggtgaaaatgacatcaaataaagcaaaaaatcacaattatttcaaaagttttttctgtttagttaaacactgcatttgaaagaatttgctcttctgatctcattagataatggatttctctcagagtaagagtaaagttcatcacagcaggcctctccattagtaacttaatctccattaaaggtgaagtcaagatttttgtgtgtgtgataacgtgaatttttgtgtggaattattacattttccttttggaccttgaataaaatatacttttaaatcttaaacacagctaaaagcattaatgcataaggtaacataaagataaacctttaagctatctagtatatattttatgcgtggttatcataaaaacaaaggacagataataattcagtcttctaaggctgcaagagagcagcttagtaactggatgctttctgctaagattattccatgttaattttaacaggaagcagaaacatattcaaaaattgatacgacaaaacgctaagcacattctaatttttaaagaaattaacaataaatggcggaagtagcatgatagaagcaaacacatataaagagttatgagctatcataatcttggctactcggggcaagaaaacaataaattaattaagatagtgtagctattcataaaataaacctataattccttccccaaactatacattgctatttaaatagcataggaaatatagcctattttatattagagatttatttttatcatccatctccctatttcttttcctcacaactacacacacaccctcacacacacagacaaagcaagctttcttgtaacattttgcacaataaatagtaattagataactaacacaccacacttcaagaatttcagtatatttcccatgttttacacatacattttgatataagccaaaatggtctggctgtccttgatgctcccaaacaatgtcagtgacagcgacattatagagtttggacacatattgatatttaaatggaattttctgtttgagaatagaacaaatcagtaaatgactcaagaatgccttagtaaaaaataaataaacacaatgcagaaataaaatcatcattttatttggaacacaacatattttactattgctttataattgatagttataattttactattgcttcataattttcaaatacattgtctcatctgatttctggaactatctgatgtggtaattactagcatttgtaaccctaagtgggttcactagcgggtgaaggaatcaggatttggatatctgttccttgtgactgtccagtggattcctctccaagtaacaactaactgcacagtaagcagaatgaattatccaagaaaactgaatggctattttactgacttgtctatatatagatgggcagtttttccatatgtaagtctttaaaatgttcattaaaataacttttgtttagtctctttgcctaacaccaaatgtttcttatcctaaattctacatttctttctatcaataagtgaatatgatcacttttacaaaatattgtttcttttctatctttaaaatagcaatacagcactatattgaggcgattttccatttgtgcctgtaattattttgtcagcctctagttaaacaatttactatgttcacattttcttacttgtgtcatgcaaagttctcatatatacccacttttttggcccgtcattgaaaaagttttgtttgcaaatattttattttagaagggggcaattttgtgatccccctcatcttacttttctgctaccaccttcccattgatttgttcattcaacagacatgtattaagcgcctactctgttccatgtgcaaggcattacactagataaaaacattccctaccagaagttctctctgtctagcagaaaacaggaactatatagaattaaagaaatcaattatattctaaacttgacctagtacaatgaaacgagacctgcctggctatataataacttgataaattatttgataaattgttcaatttttaaatcatttgttacagcatattataccttttaaagtactttactgtttgtcctttagcacaagtgaaaaacttcagagttaacggcctatctttagatgttcccttaatcaatgtgactaaagagttaaatgtattcagaaacaaaattttattcttagcaggaggattattgagagagaactactgaatgataatttttttccatttatatttgtggttatgctgatcttttagtaatattttactgaagcaataaggtaactcactaaaatgcagatgaatctattatgtgtgttacttatgccttatttcatagatatatacatgcagaatctgagacatagtcaagatgttaattattttatagtgattagaataaattaacataggggttttttatatattaattaaaagttcacaatgggagcagctaagcaataaaatgtgactgaatgcttattttactatgaactttaggtttattggcagaactgtcttgaaaagttcaaactttttagagttgtcactttttaatgcctttttttctttcagtgatttctctaaggacttgtgataacttgctatatttgattttggccaatgtgaccccttccatcttctggaagtgcatctcttgattgccatgaaatcgtgttccgcttcccttttgcctctcttcctctcagatctgtccgtctctttctcctttcctggctcttcctcttctccacaactgttaagtgtccaggcctcaggactccatctggggtccccttctcttctctgtgtacacatgtattttccccagttgtgtgccatggttctgattatccttcttaggtaatctcattaagttccatggactgaaatttgacttatatgctaatgactcctaaattcacagttccagccctaactttccacttgaaatccagaatcatacactcatctgcatagttaatgtctccacttgaaacaggctcctcacatacaacctatccataaaacaaaagttgtttctcccccttcttccgttaccccaaaattcctcctctgcatcccattccattcgtcagcttctcactgtgtactccagttatcaacatgtcctgagactgatttcacggcatatgtagaatccatctactaacagtctcccacacatacatctctccatctctctgctcccttccagggcaggactctcacatctataatatggcagtaatctaactgtttcttgcttcaactcttgcccatccaaaacacattctgccccagacagtgaggatgggcttttaacatctatagtaggtcagtgactttctaccatgtgatcttctaatacctcatctctatcctcagaataaaattaaaaaattactcttcatcgtggcctgcaatgccttgtatcatcccacttctctctgcctcccaggtcacatcttctgccgcaatcactatcactgagttccactggccttaattctgttccttaaaaatccccatgtgctttccaacttagggcctttggttcctgtttgcagtgtcccaacctcagaaattgaacatgtcctttcttacaggcatttgttttgtgtcaccctatcgtcatgtctgaaatcttataacatatattcttatttttccttccttccttccttccttctttcttccttccctcctccctccctcctcctctccccctccccctttcctgcctccctctctccctgcctcccctcttcccttcctttagtcctgtcttcttttggaatatactcatttttattaagtcatgataccctcatccccttggtgcataacacaatttaacatagcagagaataaatacatgccaaattggatggtttagtcaaattcttattttttgaactgatcttatgttttctgaggatacagcccaaagctagagagcacgcatagttgtgtgagagtgagctgctactttatctaacattatttttatctaaagttatctaaatatttgaaatattctatgctaacaatttttgcctcctcctgaggctgcgaatagaactattctcagatggtcccaaagtttcagcacattacggcagttaacataaagcttttggaaatgttatattaaccactaaggggcatgtgctaccattaatctgtattacgagttcctgttgttaatggtagaatttgcctgagtgtgcatttttctccttaaatcatgtataatagagtattggttcttaagaaattacagataccaaagaactgatattaaaatacttaaaacatgttgagtgtgcctgttaaagaaccagttctcagaagctatggaagtactgctttgttttatcttaaggaaattttagttgaaaatctgctttaaaaagctacggagagctggactattgctgtcaaggaggatataaagtgtaattcgtttttcttttttcttttgcatttatatcaagtaaattcatgcaaatccttcttagaaaatatttctgtttaattgttgttatgaataatattgtcagtatattgtgtacatagcactttcagattttatgtatctacttatattcaaagaatttacataaaataaataaccttaatatcagtattcctgctattgactcaatggttattttcagaatatttccaggatagagactgtttaaaatgtcatttgggcttaccgtagtttgactgaatgggactaaattgctttgttgattggaccagtgtgttaaccaaaggaaggtgaaaggttatcactatcgttagtcctatacaaaacatccgaaaagttttgaagacaatgggatgggatttactaaaattctcttcaaccttcttgtaaacagtctacttaaattaaaaagacgagcctaaaattttgatactatagcccaggaggaaggagttaatcgataaggaatgcaaggtcataaagtatactttctatttccttataagaaactaaggctatagtttgacttgctgcttgccaacttacctatatggttaccagagtaacttcctgttctaaattatgctgtatgaaacttacgtgtattttcttaatttagaccccaaatttagattctatttataataactaggatgtggtaggagagagttctctaataacttcacatttgtagtttcttgctcaaaatgaaaaactttttggtggcacataagtatttatagtagtgtaagtcaatacacagcacatttaaccagatcataaatcaaaacagtctaaataaaatgaattaggcaaaaagcagttttattttgattgatgattttatagtatgagtattaaaaagtataccatagagttaatgtttatttcccttctgtatctcttgtggcaaaataggtgctagaaatttatgagcatattttcaactgggcataaatatttatagagccttagagaatatgctacctccatcctttaataaaacctcacattcaggtattagagataactatttatgcactcctttgtttattcaacaagcatgtactgttcattgtgagctacaaagcaatgtgctagacaccaaggatcccaaatcaaatgttctatttatcctcaaggagactagagggaaagatggtgttttagtctctgctgctataacagaataccacagaatgggtaatttatagtgaacatgaatttattgcctcatggttctggaggttgggaagtctaagatccaggggccagcatctgatgagggccttcttgctgcatcattccatgggaaaaggccaaagagtgagcgagaaagagcaagatatgaatgtgtggtctcaagcccttttataattggccttgatccattcatgagaatggagccctgatgacctaaatacctcccattaggcttcacctcccaaccattgcattggagattaagtttccagcaaatggttttttggtgggacacattcaaaccatagcatgtagcagtatatcaattttcatagtacattgtgataagttctataaaagagaaatgctctgggtgccagggtcttggtggagaagcatcaaaatcaaatgatgggattcaggatgtttttctggaagaagaaatacatttaaaacattttcatcagagggtaactcaagccatcagatttgcattttggaataataactctggtagcagtttggaggctgttgggaataaggccagactggagatatggacacccattcttgggagatcagcgtgttaagtgtaggataatggatagtataaatatggacaccatatacttgggaaaccagtgtgtcaagtgtaggataatgagaacctgaactatgtcagtgacagtagaaatgtcaagaagagatgccagagtatcaacacagcaatgatttggagtcaaagaattttagaaagtgaagggattgtggatggtgaaggcctatatttatacattaggaaacaatagcccagaaagtgatgcatacatataatctaagtcttagtcaaaggggatattatgacttcaatattctcagtgatgaacatgcagtaacttcagaaatgttttgtgccttaagattaatataataataatttctgtaatggtcataaattctaaaaatatatgttttattttatgtatatttgacttttaaccttgaacaaatcagaaactaaaaagataagcctggttttttaatcaaagctgattaaatcatataaattatttgagccaaaggttgcctcttaagtaacctaatatttttcagaaaaatatttttatggttcatttccaacataaatttataaaatcattttatgtcatgcaactttttttgatgatcgcagggttcttaattcttaatggaaaagatattggaaagttgtataattaaatgcgtggttggacctgtggatactgtgttactattaatactcataaaagtgacgatctgagtagagcataaatgtagtttatagaaccctacctgataggcttgaccattttaaaactatagctggatctaatgacaaataaattataggaaaaaatgacaaactttgatcaaaacaacttatctttctcttttcacctttaagaatgataactaatatcaagatataatttatatctgactgtagtaattcagggacatatcatcatcattcagttttcaagtgcttatattgttaaatgcacagagcaaatataaggtgttcgactaatttgtggtgttaatgttagtttcctttggtgccacatgaaggttcttacatatcatgctcttaaaaacactataaagtggtttacataaagatttgaccttagaaagatgaagaatttcttcctttgatgatgattcaagtgcctacaacaagttcttacagatcattttctctttactacacgtttcctaaataaatagcttgtggtatttcaatttaggcacatctttaacatttgggacaacttgaagcacaactcatttagtatcattaaaatagtacagactgtcatattctgtcttagcataagatatctggtaattcccaaggcagtttagttcagtgagtttaaaaaattacatgtcttcttattagaaattgttgccagaacacataatgaatatgataccaatttccactatatggaaatttatattttttcaaaagatattacattactaaagaaagaaaggcagaatataaatggcagatattcatcactgaatttgtttttgagaccacttatagtaattatgttacataagcccaaagagtttatatatgcttggatagattatatttgtcattttaagcattgttttaaccaaggatacaaatttatgaagtgtttacaggttcaaaaataatttcctataaaaataacatgaataggtcaaatgatttgactttaccttcaaaacttatccagaatctcaccttcactactttaaccttggtccaagccactgtcatctcagaactgagttactgtactagcttcccatttagttgatttcttcggaacaggctaggctttagcagcagttaactctgaactctccaaacctcagtggcttaacaccaaaatattatgcatcttcttcacaaatgtctactttatgtttgcatgggtaaggatactagaggagcttcttattgtcactcagggatccagtctgacagaggctgaaccatgtataaggtcaccagttgaagcagcagggaagaaagagaccggagaatcttgtagcctcagtatagaagagacacatgtcactaatgcccacaggttgtcacccaacaccagtcatgttgcctcaaccccatctacacagtggttgggaagcatacctgctcgtgagcccaggcagaaatgggaacaggatactactgggcattcataatatctctcacactggtttggaaaatccaaattccttccttgctacaagaaagtctcaatggggcagccaaaaatggtcattttaatgtgttaggtcatatcactcctttgctcaaaatctttgaatggatgcatttttcactcagaggaaaaaccagtgtccttattatgaagcacaaagtcaaatatacacccacccatgtggctcattccctgacttcctgtaggtctgcttaatagagaagcccttcctcattacccattttatttctctccatagcactcaccactctgatattctaaccaatatggtttttttaatatttttgttgattgtttgtctcttcctactggaatgtgacctcaaaagtgcaaggactcttaaattcaccatttaaaccctaatgcctagaatggtgcctgacatattagaatatgaatgaatgaatgaaatgccctaaaaactgtattgtgaatcccatttcctctgtgtagttaacttgtttgtcctatcgtattcctcaagaactggaggaacttactttcttttttcccttgtttcttgaggccatcacaaaaattagtcgtagagggacttgtcctgcttaatgggatccaggttgaaaacagtaaaaataagagattacagccaaacctggggaacagctactctattaagagatgttatcaaggagagggaacccttcaggtcagcagaggcctgatttggggtgattgtaaggatggcttctgagtcaaattgaattaatgagaatacaatatagaaccataaaagggtctgtttctcagccttactaaattcattcttaggatgggattgtatttgatttttgaagtgagaaaagcttatcagaatgccattttatatacaaaaattgtagtacatttaagatttctagtgggcagactcattattaacatgaaaagcagatgaaaatatatacacgttattatatatgtacacatttctattagtaaaggggtgaatatttacaaaataaagagaaagagttaaagataacataaaaagtgctgatctgactttaatagtcgcaaaaggaagaatattaatacccttttaagttcacttgacaggaggtgaactgtcaaagaaggaaagacagaagggagtctgggtgaattatttgctggtgtgagactgaggatttttatgcctgaatggaacttgagttccttgccagtgggcagtctaatataccagagccaaaacccaggcatatacgattagcagaaggtcttgaaaacaaggtagtcatgggctggtactttttttttttattactgcatgtgtttttattattattattattattattattattattattattatactttaagttttagggtacatgtgcacaatgtgcaggttagttacatatgtatacatgtgccatgctggtgtgctgcacccattaactcgtcatttagcattaggtatatctcctaatgctatccctcccccctccgcccaccccacaacagtcccccgagtgtgatgttccccttcctgtgtccatgtgttctcattgttcaattcccatctatgagtgagaacacgcggtgtttggttttttgtccttgcgatagtttactgagaatgatgatttccaatttcatccatgtccctacaaaggacatgaactcatcattttttatggctgcatagtattccatggtgtatatgtgccacattttcttaatccagtctatcattgttggacatttgggttggttccaagtctttgctattgtgaatagtgcagcaataaacatacgtgtgcatgtgtctttatagcagcatgatttatagtcctttgggtatatacccagtaatgggatggctgggtcaaatggtatttctagttctagatccctgaggaatcgccacactgacttccacaatggttgaactagtttacagtcccaccaacagtataaaagtgttcctatttctccatatcctctccagcacctgttgtttcctgactttttaatgactgccattctaactggtgtgagatggtatctcattgtggttttgatttgcatttctctgatggccagtgatggtgagcattttttcatgtgtcttttggctgcataaatgtcttcttttgagaagtgtctgttcatgtccttcgcccactttttgatgggtttgtttgtttttttcttgtaaatttgtttgagttcattgtagattctggatattagccctttgtcagatgagtaggttgcaaaaattttcttccattttgtaggttgcctgttcactctgatggtagtttctttgctgtgcagaagctctttagtttaattagatcccatttgtcaattttggcttttgttgccattgcttttggtgttttatacatgaagtccttgcccatgcctatgtcctgaatggtaatgcctaggttttcttctagggtttttatggttttaggtttaacattgaagtctttaatccatcttgaattaatttttgtataagatgtaaggaagggatccactttcagctttctacatatggctagccagttttcccagcactatttattaaatagggaatcctttccccattgcttgtttttctcaggttcgtcaaagatcagatagctgtagatatgcggcgttatttctgagggctctgttctgttccattggtctatatctctgttttggtaccagtaccatgctgttttggttactgtagccttgtagatagtttgaagtcaggtagagtgatgcctccagttttgttcttttggcttaggattgacttggcgatgtgggctcttttttggttccatatgaactttaaagtagttttttccaattctgtgaagaaagtcattggtagcttgatggggatggcattgaatctatagattaccttgggcagtatggccattttcacgatattgattcttcctacccatgagcatggaatgttgttccatttgtttgtatcctcttttatttcgttgagcagtggtttgtagttctccttgaagaggtccttcacatcccttttaagttggattcctaagtattttattctctttgaagcaattgtgaatgggagctcactcatgatttggctctctgtttgtctgttattggtgtataagaatgcttgtgatttttgtacattgattttgtatcctgagactttgctgaagtttcttatcagcttaaggagattttgggctgagacaatggggttttctagatatacaatcatgtcatctgcaaacagggacaatttgacttcctcttttcctaattgaataccctttatttccttctcctgcctaattgccctggccagaacttccaacactatgttgaataggagtggtgagagagggcatccctgtcttgtgccagttttcaaagggaatgcttccagtttttgcccattcagtgtgatattggctgtgggtttgtcatagatagctcttattattttgagatacgtcccatcaatacctaatttattgagagtttttagcatgaatggttgttgaattttgtcaaaggccttttctgcatctattgagataatcatgtggtttttttcttttgttttgtttatatgctggattacatttattgatttgcgtacattgaaccaggcttgcatcccagggatgaagcccacttgatcatggtggataagctttttgatgtgctgctggattcttatcaagggctaacttgtgagagctgcttctgttgcagcgaattccattgtgatcatcttaatatgctccttttttgtttttatctgaggtgtaataagtaggctgtgtataatggtagaaaatgacatagggtggtctttgagaaaattcttcacaagattctattatgtatacatgaaaatggtagcatttattgctcatttctgaggacatgacaactagtatttttagacaactctttcctaaactattaagtattgcagaagtcataaactaaagccctattagtcatctttctccagagaaccagagccaataggctatctatatatacacacacaaacacatatatgtatatgattataaatatatatgcattatatacattatgaatgtatatatacatgtatacttgtgtatacatatatatgtacatacatacacacatttatttatttattataaggaattggctcagacagttatagagactgagaagtcccaaaatttccagtaagcaagttgaagacctggaagtgctgatggcatagttccagtctaggttccaagacacaggcccgaggtgtaatttccagtctaagtccatgtcagaatccagtggcagaactaatgtcccagctcaaagacattccaggaaagagacagaattttctgttactcagcctttttgttctattcagtccttcaacagattagatgaggcccgttctctatggaaaagacaatatagtttactcggtccattgattcccatgtcaatctcatccagaacacccttacagatatgtcagtaataacatttaatgaaatatctgggcactccatggtccagtcaagttgacacataaaattaactattgtattcatgaaaaataaattcctttttttatggggattggttttctggttaaaaaatatatgttcactatcttgggtatcttataaactaagctattccttatgattatgaggattttctttctgcgaaagatggttcattcgccatttttggatcttccactgggtactatagttgtcagtttcagaacctttgtatgtttcagatattcatttagttaactgagaggaataaactgtctactcaaataataacccaatttctacccactgttgtggtttatactacaagatctcaatcctgggtgcatagcagtatcatctaaggaaacatatctcttgcttctggcatgatttttaatcacatgcccagggatctatccaatggtctaaaattccatatcacctaagcccacatagaaacggtgatcacagtttttaatcaaaaatagagacacacagtgaggaagaatgtacatataaagttaatggaatataatatttgaaatcaagacaaatctggacaatgaaaattcatataactctttatacaagtcaacataagaatagagcaggtaggcatgcaatttctaaaggtagatgcttgtgttagtctgctttgtttttccataaaggagtacctgaggctgggtaatttataagaaaagagatttatttggctcatggttctggagatcgtacatcttctcagcttctggtgaggcttcaggaagcttttactagtagcggaaggcgaggagagccagtgtgtcacatgatgagagggggaataggagagaaagcaggaaggtgccaggttccttttaacaatcagttctcacacgaactaatggagcgagaacttgctgattaccatgataaaggcatcaagccattgatgagagatccactcccatgacccatatacccgccactagggcccacctccaacactggggatcaaattttcatatgagatttgaaagggatagatattcaaactatatcagtgttcaaataaactataacctggattttggacattagagtcaattgtatctactattgacagagttaaaaaacaaaataataaaatgcagattgattaaagaagagtcactctaggctaactgaattgcttgtggggatacatacacatcagtgtcatttacaacaagggtgtggaatagaaataaccactcagatattgaaaggggcatcaacatcatactactgttcctaaagataacaagagagatatatggtgaatttgaagcagccctgaaccatcgaaatcggtggaagaacgtttagaatctcattagctgatatgcaaagcaaatgtcaggtagagattgagagattgttgagtagtcttggagaaagtggcagctgaaaacaagaaaaatgaaaaaccccaatccttgtccttattcttgtcctgtcaatcatggagcttagagacaaccgaggcacacagaaggttcagcctttactggcaaggattactagagtaaaaaaactgatgctatccataatggatagggtggtggtaggagcttgagaagcaaaaataaaaatgaagaggagattgtcaattaagagtgggtgtaaggactaataaagacttgttcaaatttggtattgggttttgggagtggtaggagtgagctaaaaaacctagtaataatattgataataacaatattcataacattttgttgagtacttattatgcaccatgcactgttcgaagcactttacatatatgaacttatttaatttgcatgtcaacctgtaaagtaggtactattaattggtcccagagacaggctacctcatttggttagggtgacactagagatgaaattccaacccaagtgagccaactccaaagcctgtcctcttaagtataggtatgtgcttattatacttaagtttgtgctctgaagtatgacaacaactaaaggcatctgtgtctagatggctcttcatgaaaatcctgctttttacacgcacatcattattgtggatgtaggaaagtttaaatgtaacaggagtttgctgaacaaaggctaatatgttgtctactaggcaacccttttataaggctgctgggtgaatgaacatggacagggatgagcacatcagagtaatttaggttccagagctgctgagctctaacaactttgtctctccatctcatgtaggaaaaattctgtctgggaggcaatggtgcccctcccctttagacagtgcttagaatggctccaccaacttcagtttcacagagctggccctttctccagtccacattaatttcccattaggctgacattttttcttagatatgttattattacttgagcctttggcctggaaatcagaaatctcttcagtgttgcaatttctttcctctgatccattttgtgatcatttcatatagtttaaccctcaccgtgtaatcttatttccaaaaatgtggcctgcctatatatatatatgatacaaaaggaataagaaaatcacttggctaaacaggacctcaagagggaacctaatatatgtcatagccagtaggcaaaatcttctccttcccaatatatataagcagtctaatttaatcatcctaatggttatctttagacatttttatttacattaaaatgaacattccatttctcttgctgtctctgtcgcatatttgtgtcttttgtgtgtaaacgtgcacactcatgcacatagtcacaaacaatcataattcagattctggatatgtccaaatgaatgaatttggtgtgagattctttctccccatacaaggttgtggaaaagagcacagaccctggaggcattcagacctgagctaaaaatcatgagtgactgaagaattacttaatctctgctagccttggttttcttatctgtaaactgggagtaagaatagtatacacctaatagagttaagaagtttaaacaagcaaaaaaaatggacaaattcttactgcaataatatgtattatttaatactaaacaactataaattttattatttgaagtagttgcatgcctttcttcaaagcagcattgttttttcagaaatatttgaaattctgtgtcagaacagaacgaacaatattttggaaactatcacaaaatatgaattcgtgtttttaaatttagcaaaggtaatagggacaaaggaagtcttctccgaaaaaaactaaaggacaccccagttctaaaaagttatattttatttggttatgtaatttgtgcaatatttcatctataatctactgtcaccttctggggagaaaaaaatagctcagtctgtcatccccaaactgtgacattccttttatgactgcaaagtaccctgtggagatggtagatgccaggctttttaagactttacaaagactggaggccaactgctttcaaacagaaatatttaccgagaagctaatccatgtatcagagatctgaagagagagagcatgactaaccactgaaaatagggctcattaatggagcaatctgcaatgagcccagagggaagttctctcattctagaaaggatgtgtttaaaaggaaaggccaagaaatggagttagatcaaatgatatatttgaagtaaggagttgaacaaactgacttgagtgaatattaatcatagtgaacaaaatgggcccgttaagttattacagttcatcatatggtcttcattccaaaatatttacttatctaactgggaatgttgaccagtacttgatattttataataatgcaggtaagcataatgtgtgcctgacataattatgtgagcttttgaaaacactttattgtcataagatgtagcgaggacctgctgattatcattagacagcttgtgtatttaggtaatgaatgatttggtaatagtttttattcaggcttatgccagaaacagatttatttttaaattattttgctaaaagataggaaaagctgacatgtgatgtttagcagtaagttttcccaggtgggtagctgtttgttttagtatgggagaacttatttttaaaacccttttttgtgagtttaaaggggcaatggacttaattgttctggtcatgcaaaatatcttttattctggatgtcttctgactttatattttgaatatatatctatttcaaatatctatctatctatccatctgtctgtctatctgtctgtctttctctcctgactgtcacaggacagaagcaaagagagaggatccatcaactgaagagtcattagcactggttgtttttaatatacgccatcattgaattctctcagcaaccctttaaaaattgggtgttattattaccctccctttgtaaattgggaaattgaagcaacttcaatttcccaatttcccaagtaatgaattaagtaagacccaaaatgggtcttggattcagattccgtgttctcacatgttcccttcaataatgtggatctttcatggggtccccagtggttttcatcatcttagtcaagaggagagagtataaagacaccccttaatttaagactagattatcccttcatcattgggaaagttgaggcatttgacctaagctaaaagtgaatgaagcaggaggtagaaccctaggaccactcatagatggagctgcttgttagactacatagcaggctctggcaagtgggctctctgggatgaagtggtgcaagcaaggggagaagatcaatataaacgtgcttgatggtatagggtaattgatatttatttcataccaaggcactgtaaagtgaacataaaaagtcttaaaactgtggaaagagtcatctgtggtgttagaagtcagaagagtggttatgcatagggtggtgagtagtgactggaagacagcacaagacaggcttctggaattctggtaaaatctctttcttgatctatgtgctggatgaataatggttacaatttgtaaaattcaaagagctctacattataatgcatgcatgtctaagtttttattattctccgttatgtttattttattctttgtttgcatataattgtatttctgtttccacattatctggtcccaaaggtattagtttttaacaagttagtcagtgtcttttaaaattatatgtaccataggcgaggcacagtggctcacacctgtaatcctagcactttgggaggccgaggcgtagatcacctgaggtcaggagttcgagaccagcctggacaatatggtgaaaccccatctctactaaaaatacaaaattagacaggggtgctggcaggcgcctgtaatcctagctacttgggaggctgaggcaggagaatcgcttgaacccaggaggtggaggttgcagtgagcagagattgcaccactgtactccagcctgtgtgacagagtgagacttcatctcaaaaaataagaaaaattacatgtatgacaatgtataataaaactcacacacgtgtgtgtgtatgtctcaagcctggtttgattccatctcaactttgtggcagtgggacagtcacagaaggcaaattggctctgagaaatgcaatcacatttttgtgcaatatagacaaaatgggaaaaaataatactaatgctttctgaatgaaaggaaaatatcaagtatagaatcattgaaggaagaatttatcattgaaagtttaggtgatataagcaaggaatttgattatatgaaatatcactgtctccacacagagaaaattgaaggctgaagaaaaacatgttttgtgattatagcttaccaatgttagaaggccctgtgatctatctcagggatttggaccttgaaatcaggtggaaactattatcctaacaaacacttctcttccaaaattccatccttctgaaactgtgctggtctctcataattaagtcatttatagctaccatctcccctctgtagaagtttttagtgcaagtggtgttagacttggaacatggcacagaggagtggagatcttaatgtttcttgactaaattccacataggtcactgactgaaaatctgcctgtgtgtgaccatctctaataaaacttcatcttatgataggctttttgcaaataagatacttaagaataacacacttcaatttaccatggattatacctgtatcaggacaacatgaaagaaaatttaaccattgtaaaggacagatcaattttaagtggaatttgctcttatcacaaagtctaaagataaatgcaggcaaatttctcagcaaaaaagagaaaaggatacaacacattgttcataaaatacaaagaagcagcaagctctcaagagacaaaaagagaacagattgcttaactacaaagtgggaacttaagctttccattcacagatgtaaaaataaaacaggaccccaggttaccatggatgaagatatggcagaaatcttaagctattgtatctttggttttgtaatcaaaatctaagcaattgattaaaatcaggttgcagatattttcagtataattgtccctaatcacacattccaagaggaagttgtaatgaaacttttgagtagaaagtcaaaacacaaaagaagagttggcatgaattacccttgggtgagtgtatcatgaggttagattttgaggaacacattaggagttaaattccaaatgccctgtactgttgggagcaaggtataagatatttgagtaacagtttcattattaactaatttgtgatctttttatttcagtggagcataagggatatgataaaaatttgctacaaataaacgacagctttgttgaacaggaacacatttttttttttttagattttacaacaatagaacgggccaaatatccttgtaaattacattaatgagacagattgctacttttaatggaggctctgtgctctacattgtgccttatgcaaatttgccagttaataagcctgaacagtgtttctgtttgaggaaaatgaatctgaaacgattgtcagattatctgtttggcatgcctggctggtgtctggaatggcactttgctaatgtgctattactcagtgtcattaacccacacaaatgattgaaaggtgaatttatatgtgtaccatggggctcagcacagggaacaggcttcagtgaaatgaggctgcaaaggataaaatgaaccattcattttttacctcggttttcatgtgctcactttaaagacagatgatatttaaatacatgaaaaagaatgagacaaaactattacttaaaaaacacaactttgcattgcattaatgaattaaaagttatgtagttgaaagatgagtattcctctccccctcatgatcctcatacctgggagatagtggcaaaaagggcatatcaattaaatacctttgaatctatctcatataagaatattttggacactttaatttaaaactcatgatggaaatgtgaaatgaaaggcttctccttcatgagaagaatttaatttacacttctgcaaattaattaaaatactttaaaatggaaaacttattttttaaaataatacagattaatacagcaaagccatcaaatggaagttatgaaatattttctagtttgtctctttaatatcttgtttgatatttcttcactgggtattttaacacacatctatccttttgaatttcaagggcattggaaattttgaataagcctgtaaataaaagttcacgcccttattcttacaaaataaacagaaaacatcctcttaatgtgattctttctgcacagctagacttattttcagacttaacagagacacttgaggcctaaaatacctctaacctagctggtcttactctatgttttaaggctatttggaatttaaaaagagaaaagaaatcagacttaaaaaaaaaaagacaaaatgcatacaggcgtaaagttttttgacagtgcgtttatggaactcatccttacatcacgtgctgttaagattcataaagaaattaacaggggcatcccctcaaaactgttaaagttatgtatgtgcctatatgcctatgcatgaaaggaaatttgacgtaaaaatatagaaaagcaaactgtgttaagaaaaaaattactcttccaataagatgtcatgatatcaatgaatttgagggccatgttgacaggcagtgagtcttgggtcagggtgtggtaaactgcatgtcaggggggtccaagtactcatgtaaactgcaggttcccaggaatgctttcttgtttatctctgaaatgctgtgttcagtggctaattttctctgctgtgatattcttttacccaggaaatccctttatttaaacactgcgtaatttctaatgacctttttgagtggtgtcatctttctattcctagtacattcaaaggtcttgtaaattacatgttggtacacttacatgaagtatataatccatgaaaacttatccacacattgttatgcttttagcgtaatatatttaggttatttttattcatccaatttcaaacaaaaatcaccatttccaaggaaaatcattttttctacttttaattccagccttctcagtaacggcttaccacccccaccccgccctcatagaaataaggaattttaagttccagccagtcttcctatatttaaatttaagaagttgcatgaaggatatttccaaatttcctaatttaggctcattttacttggatagtgatttccatccttggatttttttttctttcataaggataaaaaacttcaaaagtatatcctgacactcatgatggctagaactttttcagtaccattaatcttgttgaaaaattaaatatttcatacttcttttttgtttttatcaaggaaacccttacaaattaaaatgaataattagtaatttctgcttagctaagcaaatagaccacgagagtaattcaggctcgtgagaaatggcttttctttatcgtttaaaaatatttatcaaatcaaaatgttgcttcttttcctcctctagttataaatgcttgttaagtataaactttgatgtgcatctgacttatttcaaaagcattttgcaatagccttttgagtgtgcactttgttcacgcttaagtttattgccatcacatactgctatttttttctgactcttcactctgccctttattgtccactacctgcccctctcccccaacactagagctactcaaggtgggctgccccttccaaggctatatctcattcacaggcacagtccctatctccttcccagatgttgtatactcatggtgccgtccattctctgtcgaccaggtaacccaaggtaaactgatcaacagaaccatgttaatttgttcatttattcttctttttaaaatacatttgacccttgaacaacatgcgtttgaactaagtgggttaacttatacttggatttttaaaaaataaatatatggaaaaacatttttggagattgtagcaatttggaaaacattgcaggtgaactcgagtagcctagaaatgtagaaaaaattaagataaagttaggtatgtaatgaatgtaaaaagtatacatacatactagtctattttatcatttactatcataaaatatacacaaacccattcgaaaaacataaaatatatcaaaacttatgtgcacaaatacagtctgtgcatagtactatttgcaatccaaagaaatgtaaacgaacataaagatgcagtattaaataatagctgcataaaattcaccttagtacatactgtaataatggtgtagccacctcctgttgctattgcagtgagctccagtgttaaaagatccactaaaaacactctttgatgctatttatatctgcatgagcaatttgtctctccagtaaattgtgtaccacggtaaaagtgatgtctctgggttcccacatgtttattttcttgtttagtgcaatacagtaaactttgattaacaccatgggacctacatgaagtgccactagtaatgctgaaagtgctcccaagaagcagaaaaaaagtcatgacattacaaggaatagttgacttgcatgatatataccatagcttgaggcctgcagctgcaatttcccatcatttcaagataaatgaatacagtttaaggacgattgtaaaaaaaaagaaaggaaatatgtgaaaccgtcactgcagttatgctagcaggcatgaaaaccttgtactttttgcaaaatacatttttatcttgtactgaaaatgcagcctttatgtgggtgcagggttattataagaaaggcatacttttgactcacatatgatttgagaaaaaaatgaagacattgtatgacaacctaaaccaaaaggaaggtgaaagatctgaagctgaagaatttaataccagcaaaggatggttcgataattttagaaagattttaaatgtcaagataacaggagaagcagcttcagttgaccaggtggcaacagtgtccagactccattaagaaaatcattgagaagaaacaatatctgcctgaacaagtttttaatgcaggcaaaagtgacctagtctgggaacgaagaaatgccgcaaaagaaatttactggtaaggaagagaagtgagctccagcaattaagggagggaggaataggctaactccagtttttcacgcaaatgcagtcagggttatgactggaactgcccttatctataaagcagttaacccctgatccttgaaggaaaaagaaaaacatcagctgacagtcttttgtttgtaaacaataatgcctgagcaaagagaaccccttttgtgaattggtttcactgatgctttgtccctaaagtcaggaagtaccttgccaaaaagggactgccttttaaagttctttttttattgaacaatgttgctggccacccagaaccccataagttcaacaccgaaggtgtcaaagtggtcaacttgcccccaaacacaacatctgtaattcagtctctagatcaggtgtcattaagacctttaaggctcattaaacatagtcctctatggtaaagattgtcaatgatatggaagagaacctccatagagagaacattataaaggtttggaagaattacaccattgaatatgccatcattgttatagaaaaaatcctgagagccatcaagcctcaaacagtaaattcctgctggagaaaactgtgcccagatgttgtacatgacttcacggaatttatgacagagctaatcaaggaaatgatgaaagatattatggatatagcaaaaaagatggagggtaaagcatttcaagatatagatcttggagaaattcaatagctaatagccaccatgccagagaaactaacagaagaggacttgatggagatgagcacttccaaaccagtgccagataataaaaaaagacagagaagaagcagtaccagaaaataagttgatattagacaatctagcagaagggttctgattattcaaggctgcttttcacttcttttacaacatggatctttatgtgatatgaaactaaagcaaatggtggaaggaagattggtactttatacaaaagttttaaagaaatgaaaaaacaaaaaaaaaaaaaacccaaaaaacagatattatgatgtatttcagtaaagtccgccaagtatgccttcctctcctgcctccctttcacttcctccacctctgccaccacccttgagagactacaagaccaacccctcctcatcctcctgctcctcagccacatgaagaaaatgagaatgaagacctttatgatgatccactacctattaatgagtagtaaagatattttctcttccttatgatgctcttaataatattttcttttctctagctttccttattgtaaaaatacagtataaagtatatataacatacaatatatgtgttaattgactgtttatgttattggtaaggcttccagtcaccagtaggctattagtagttaagatttggagaatgaaaatttattctcagatttttggctatgtgaagggttggtgccccctaagcccagcattgttcaagggctaactgtattgacccttcctaagagactttcctggaatcaatacttttatgcagtgactatgcagacacagggcatcatttacctttcaaataatttcacgctcttatttcttatctttggaatccatgtagtaattttcattaactacagaaaatgttgccacataatgatgattgtaacttccagtgataatgtgaaaagaaaatatatgcatgctgcaagggttgtgcctgcttctcccagccccattctctctctctgtttttatctgtgggttgatctttatatgtttctctctctccctctgcacacacacactgattgcatttcctgttgttctattccttctctatcttccaaaaaaagtgattgcattcattatctattgctgcgtaacaaattaccccaacatttagcagcttaaaacaaaaacattggtcatttcaacactggttctgagggtggggaatctaggagtagcttagatagttggctctagctcagaatctctcattagagagcagttaacctgtcagcaggggccagagccatctgaaagcttgaccagggctggaggatctgctcccaagttgtgtcagtcctgtggctgttggcaggaggcctcagtttctcatcatggctcgagtgtcatcattacatgacagctggcttccatggagcaaatgatctaacacagagcaaggtgcaagcaggaagccacagtaccctttattacccactctctaaagctgcacaccattagtagtgagtcactagatccaggccacacccaatgggaatgaagttagactccacctcttgaatggctaaatgacgtcgtatcaaagaaatatggacacaccttaaaatcaccatctttcttaagaaagaaaatatctctggtcacttcaataacactataatgtgatttatgaatggcttttaaaagtaaaacaatgagtatctcctttgaggcctgggattttttttttctcgtattcaccctatgtccatagctcaactcaagcatagaacctggcagatagtagctggtactgaacaactatagcattaattaattaattaatgtcttcaaatgctgggatatgttttctaaacacttggagttttactaccaacatttgctcctcttgctctgcttctaataatgttaaacaggggaaaatggaattgagggtatttattcctttaattaaagattgatttaaaaagttacaagcatcataatttatctcttaattactgtccaaatgtatgtgaagtttatatgtagtttcatatatgttgattatctgcttttagaagtcttgtttattgtctgttaccttcactagattttaagctccgcaacggccaggatttttgcctattttgggtaaggcagtatccccaaactatgacattgtgtgactctatgagtaggtactctatgaatgtttattaaatgaattaattaaaattttcactaagctaaggatgtcagaaccttgtcatttgcagggattttgcttagacaattatacattgtcatacttacttggagatcttcaaaatccctctcctttttctctgggctgaagacttcagcattaaaaacatatgattgaaacacatacttattgctgttgccagtatacaggctcatcagaatgaccaggtttacttgactagcttgtcgctatataccttggaaagcatagggtaagataatgggcagaaaatctctacagtcaaagtatggcaaagaaaagctctgaatattggtgaagatagaaaacatgttccaaggcccgggcaggagtgcagaaaggagaaaggtcactggggaaattgcttgtttgtaataccagtcctgaaattagaaatgaaatagcatgtgcaaatccaaacttttttttaacctgactgctttggatccatctgtgtattttgtcatcattagcttttctaatttctaggatacaaattgctgtagatcctaaaataagctactgaatattctctattcatttttacgcaccccatatgttacccaaaatgatgggcaaatctaccttaaagaaccaccaaatctgttcagaaaggatggcactgggagaaagactatttggctttcttcctacatggaagaaaagaaacacctccagaggagctaggacattttgtgaaccctacacgatattgtagcataacacaatgattcaaatacttgtcaagttcaaagtgactttagagactacatattctaacctccccttacaacattagataatttggataattttccacttcaagtatgtcaacacgatggttttgatgattgcacttcttttgttcctactttagagatgggagggactggctgcaatataccttgagaggctatcccctggcagggattagtcatgttaggagtctcttcaaaataactcatctgcttcccttcctcagcattcctctgtctttgtggctgtttgttttaaattttttattgtttacttaacatagcctgcaagtgacccatacggtattcatttggaacgatgcgccttagtgaggctttttatgacaccctgcagatgttaggcagcagtcccacggttctcaccatcactggggacacacgttcagcctggatcatctctctgtgaaaagctccacaagaatatctttttcattatttaacacccacttgtcgtattttatttgaacatttgatcttcaggttcacttatttagcccaaagtgaaaatgtagcacctaataccgttctaaaaactagtaaatgttctaagttctgaaaatgggaaagaattatgatttttcataaagtttcaaaacttacatgaggtataggtgggaatacaccctcaggttgaaacaaaagcctattagaaacttttttcatgctcatgataagaaaataagacagtgatttgtttacaaaaatcatacaaataattctcaaaagccattttggttacaaatagatatgaaattatttataattaagcaatctatgatgttcggaaattatcatcggtaaaatgttatcctctatttaattatgcattcttgttgataatgcataaatccctgtgattatgttcttaagttaaggaatttaaaatagctctattttagatgctcctacttttctgacttaaaaaaagcctttcgtataccaaccaggataccatccaataacaattcctaaagcttggaaacttctctaatcagactcttcttaatgacgctgttctcaatacttgtcatttttaattgtagatggcaaaaacagcagtagcaatttcatttctgtaggaaccaattcattattatgcagcctgccaatgatgctcttgttccaactcctcccagcatgccaacttagccttcaccaaatatttttcctttaaaagtaaaacaatacagagcttttgagtgagtcttgtggtgtggttcagtatcaatagtttccaaatcgattttattggatcaagaaaatgagatgtttccctccatctacatatccagcacctttctgttacgtaatagaaatggtaccttgtgaataatattgttccttatgtcattctttcagcttacgcaaaagtatttataccgttgtatttcattttgcacttcctgagaagactggtttacagtaaagatacgcagttattttattaaaatgcttcattatttaaggtgaatactggtgacttaataatagttggagagtttaaaaatactaaggacagaaacctctttgtgttcacatatcttttgccctctctagactgttcctagggggcaagacctgtttcttattcatctttgtatatggagtacccaatacagtaggttgaaaataaggagtcaacagttctattgaataaatgaattgatggttaaatggatataaatgttgctaaaagtcatatgctgagatttgcagtgttctgagatttacatttacaataatctgaaaattaaaataccctactattttgataccttctcttttcttcttttttctcttttgtctcacaagtcatgttaactaaagcaggttactcatagatttttactaggaagatgtttcagacctgaaacccccacgtttcctcctctggccatctgctctgtgctctgctttccattaggatgggttcattttctgcctcatggtttggactctgagcctcagtctctgcttgtgcttcgttcagtgttcaccattcatggcatggttgggcttcttaccctttaaatcaggagagcctggcatcttcctaagctgagactgctcttaccacgacttcttcctgaacgcccttcctcttagcggcagagccttcttgttctccctgttagggatgtgtccacatattcagcggctctgcagtccccgcagccacccgtctgcgggtgtaggtcacagttaggcactgcagcctggctgacactccaatcactggccatattcatcagccctttctttagtgctctatgtggctagaagcctggtttttctccaacatgaaagcccggtgtttagttagtggagagagcacagcatgtttgagggcggcagctggaagactaccttccccaccagaaacagatcaaatggtcatttgagatatttccaggtttccttgtttaaaaggcagacagatcaaagacactgtcaccctcaaagatttgaagactagcagagcagcctcaaggccatcaccccctcatgacccctaactgttcactgtttgtggtgactttgcactatgtgatctgcctgtctaccttaatcaaaggatctagagaatcaaatactagtacacttagtattctgtcttgaatatcaacaagaatagggccatttgttagttatttgaatacactggaagaaagtaatctgcatatgttgtttttaaatttgctacataaacccaggacacatgctagtgatggttgtagtttctatattttatttttaggaaatgtctaaaacattacagcagttaagtcttatttcattcagaaagctttatctgactttcccttaaaaccgaattacctcctgtatgttgccatattacaagaagttaccctagaactaggcatttctcctgaaattttcatttttatagtcagggttaacttgactatattctgcactagagtgattttaggctgataaggtcctttatgagcagaggatggatcttatttataatttttacccgtaatatctaatatagcacctgaaacaagtttaccactcagtaagtatttcttgaatttgttagtataaattcctaatgtacattgtgctcttgtcctgtgactagtttgaatgtcccatttttttgttgtctacatttataactatttactgtatatctactttggtataatatgtgtacacatacatatgtcaaacagaagatatttagaaagagaaagggggggaaagtgagcattgaggaaatgttttgcccatgcggtaatggttaaaaaacagcaatggattttcttgaacgcggttatattttatggtatttcagcatatagccttttctctattcactcacctaaaaaaaaacccaaggctctatcaacttgattgaggaaaggattgtgggaatcactaaaaagataaaaagtcaataaatagttccaactgccaatcatataaccacaagataaaaaaagaaaatcaaaacaggcaaatacatgtttcattttatttgggtaaatttccacatatgaaagaatatcttgggttagcagggaaagcaatctgactttaccagcagctttgcaagcatggtcactatcatcgccacgcatcacctctgattgacttcctgcttgctaccaggttcggttggtgctggattagaaaacacagagtttgagcagtgcaacagcatgctgccggtgggcttgccaaattaaagccccaagcccagggttgtcattgttgttattttcatagaaaaagactaaggataatgtaacagaaacaattcaaatggccagaaaatataggaaaatgtgtctttgttaacagttaattctattaatcagcttgagatatttgtaaggtaaaattgaaatggtatttagattagtgtaaatacttgattctcttgtttggattgtaattgtattttagacaagccaacaataatttataattttactttgggaatatttttctaattatatttgattacaatatgttcacaatacagtattttagtaacagagcataacatcttctttttttgatttctctcctttgtcatctattcaacttgctcttgccttgtgcttcatgttggaaaaggactgtatcacatcttaacttcatgggaagaatcaatcaaacattaagtgaattattatacattgcatgccttgcactatccttggaggaaaaagatactttgcattaagaagtcttcccttcaagtctttctgaaaaagtaaatgatctatttatatcttcagagtacttaactaagcagaataactatcattgtcaataatttaaaattatgatttatgaacatgttctacaataataaaatgtttgtagaatttaatatgccaaaatatcagaaaatattttaaaccatccattgtgcctacatagaaagtatgctatttataatttttgtgaataataagcatctttcatatacctatgtggcagttagaactctaggatggaccacatgatggcttcctcctgatatacaaactctgtgtaatcctatcccagtaatagtgggtggacccaggaatgtgatgaagtatcactcccatggttatgttacattgtttgtcaaaagggattttgtagacataattaaggttcataaacagttgacactgtgtgtattagtctgttttcacattgctgataaagacatacctgagactgggtaatttatgaagaaaaagacgtttaatggacttacagttccacatggctagggacgcctcacaatcgtggcagaagacaaaaggcatgacttacatggtggcaggcaagagagaatgagagccaagtgaaaggggtttcccctgataaaaccgtcagatctcgtgggacttattcactaccatgagaacagtatgggggaaaccgcccccagtattcagttatctcccagcaggtccatcccacagcatgtaagaattatgggagctacaattcaagatgacttttcggtgtggacacagccaaaccacatcactgtgttggacaaaaggaagataagcatgttgctaactatttaagttattgcttagagaaaagttattattagaatggctatttaaaatttagtattatgaattcatacatatacatggatagacttcttgaaaattcaagttataaagaaatacgaaaaacaccaaaaaaaaaaaaaacaccacatggacagttccatccaccaacaagagcataaaatgcagttacccacagacaatcccagtggaggtacttgctggtaacttgtgactcctactcctttttaaaagtgctgttttcttctatttgattcaaagaaaaatttatttccacaagaaataactggaatctgaattaagtacctgtcagtatattttgattctcgctattatcaataataatctgttgccatttaaaataatgcataagtgcttaatgttataggaattatatttcatgcacattcttaatccatgagtgagtgacaaatatgctatatatttataaaattatgaagaatacttgtttcaaacttatggtaatgatattatcataataaatgagtgctattctataatgagagccttttagggaaattcttttaggccattctgggatcatgtggtgaaccacctttagaatgacattcaagtctccctgttttgaagaagttggaacctatactaactgctcttcctctaactatgttgtccttgataaaacagtcttttgccccattgttcaaatatttataacttacaaaaaagtttatcaaatccactgcattgaattggcttgtaattatagtctattgtatacattgattgcattttttccatctacaatgtgacttatgagtctgatatagtctcagtcaattacatgtgtataatcattattgaaccaaaatagacaatggcaggtctggagccagtctagtctgataccttaatgggcctttagagacttttaatacactgactactggaataatagtcagtctactgaatgactttgtatattttgatttttttaaactcttgaggtacaaaagaaagttcttagaggaaggaacattaagagtaacaatcacaatgccatatgaaaatacttgaattccagatgtacttgactatgctccacataggaagcgatgagcaatttgaaaagaaatttaagagttgcttatatttggaaccactgtagtacttttgcctctaatcaaagaaaatatacagtgggattcagagttccttgtaactttatgttctttctaaaaatagatgtagtggacaaataacccaggaaaattcctaaaaggataacaggggtgtaaatcaaaagatactagtaatatccacatatacctagttcagaatttcaagataagagtaactagaaatctttttagagcaatcaccaataaattataattctatacttcatttatttatatgttaagggataaggcttggggtaagttaaagtgatatatataaattcccatcataccatttaaaatatgggattactatgaagttcaatattctattaaataatagtaataacagcacttactcattggatcattatggggattaaaagagtaggcatatgcaaagctataggaagtactcaattacaatataattattatcattcatttattcctttacaccaaaatttcataagtacctattacctgtgtgacagagaaaatatattttaataatcaaactaccctgaaaatgagttttaatcttgaaagaccttagaagaggtctcactgaagtcttttccattcttcaattagctctggtaaggaaggctatcaatttttgtggttcaaaggaaagaaatgaaaaacaaattttaaaatttttgaaagaaaaaagagatggaaaagacaaactgaaactatatatttgtcagctccatgaaaaaagaaagagatatctaacgggaaaagcagaaaattctactgtatgtatttttcaacaatttttttacttgacagaacaatcatattcagcaaaattctattaatagatatgatacagacctcttccaaaccctgtttttatctcagttacccctattttctagtcaaaacagaagtaaaaatatcatactacaatgggacagactcactctttccaatgctgagctccattttggttcatttgaaacttctaaacgcctaaaaatattctggccctatattaataatgagcagcttggagcctcatttccttgtaaacttgcattgaaattatgtaataaaaaatttaagtgacggaggaaatgtacacacacactacacaaactgatcttagattggaaattgtggactcttttctaaggatagattctcctaggttagcaccacacaaaaagctgttcacatttctcagagttctatagaacagaatgggttagcagagttctctgtccaatctcctcaggctaaaattaagttgttagctggggctgccatctcatccgacgttcagatccttgtccacatgctttcgttgtggttgtagacagaattcagtttcttgtgttgtaaagcagaattcgctgttttcttgctgtaagtccttaaaaagaccatcagtctttctatttctttttctatttctgtgtctacctttatctcaatctctgtcacttctccctctctctctctttctctctctccaagatctgtgactgaggattcagaattaaatagttaaaaacttcagtttgaccctggtactccagctgctgaaatattaacagcattaaatgcgggcaaatgggaaacgtgagtgtagaccagaagccgttcagccgtgtgctcttgttttgttggttcctgagagtagaatctcttgtgcttttcccagacagatgaaaagtgacaaaggtggtagaaatatttgatattgttaccacaattctttgaaagcaaaatttggcagatggatagagaagatagggaaggggttaatgttcatgtttgttttctttttttcaagaaacatgcttttaatatggtgtaaaacaccctagacaaatctgtaccctatatgaaaaatggttcccttcttcattttttaaagtatatttgtttgcaatcagtacatataacaggtttgaaaaaaggaaaataacaggaaatagggatattgctaatgtttctcaattcaaattgaaatgaattcagaaaacaacattgaataacatattatattgacataaaatattaatgtgtgtaaacatataggtaaaggtattgtgggaaatttctgattagcttttaacttggtcattgaaacattatgtcagttgattcacttaagagtatctaataagttctgcaaatgcacagaattttctgggaacattgaacttagaaatgaacatagtattaacatcttattgcccatgttacttaaaatattaaaagtcagtcatttcttcagtgaaaataattatagtcatagaaaatgttctaatttgcttttaattttctaaacaaataaatctcaacctcatatttgcatagggaactgaatcttttaatagtatttgtataagtctcatcaatgaatgtgttctatgcatgaagtatggaatatctaattatatttttaaaaagaaaaactttcatttttacacattggtacataacttcaccttcttcaacttcccagacatttccaatgtccaaattttggttacgtccttgaatttttgttatttccttaatatgtctggcttcaggaattttcttcttttaaattaaacaatatctgttatctgaaaatcaagtgtaaaggcagccattcacttcattttcaggatttatattgaacactagaaccaaattaatctcttgcactccagaattaagaaggttctaatgacacagtcagtgaaaatgtacagaattattacagttgagtttaccaaagcaagttagtctatttccatcaccactatgattaagttcctttaactcaatgaattccccattcccacaactgactttcctgcagtcttaatagccaacttgtatactttccttatacctagaggatttaaatatgaaatcaacttatactgtaattttattttacttgaacacattttctcttttcatttttttattttactttcttagtcggtggtgtgttcctccatattaaggctttcattgccttataattattaccattatacacacgaaagatacaattgaggggagtacctttacatgcagccactcagcaatataatgagctgtgtgtttttcacatggaacaaagtccctagatgtcactcacaggcctcaccgggtagcagtcatttctttggcatatcaactaccatctatccagctggctttcaaacttgtggtttcagacactggtaaatttaatctcatttcataggaatactgatgtatcaaaccaaaattgcaatttaaaatgaaaaacatacttgttacctgagtggaatactcctatggacatggtggatgtagtctaaatacatgagaagtcaaattatgtagaacgtcaagttattaataacttgaactaatatctcaaggacaagaatatcaaggtctgtatgatgaaagcattttctctctgtatgcagatgcacatggaaaaataagtaataaaggttgctcagaatcagaataaggataattagataagccactttatttatatatttatttatttatttgagacagagtcttgccctgtctcccaggctggagttcagtggtgcaattataactcactgcagccacctcaaactcctggactcaagcaatcctccagcctaacctctcaagtggtttaattttttgtagagatggagtcttgctactttgcccaggctggtctcaaactcatgcaagcaatgctcctgcctcaacctcccaaagtgttgggattctatgtgtgttccaccacacttggcctaaattgcatgcttaatggttttgggccattacagatggacaccaaatgcaatcgaggttttgttaatggggagggaacaacataaccccttacctctatctccagcttagacatcactttgccaatgggaaagaattcctgaagtttattgcccaaacctcatacttttctacaatgtttgaaagatactttgaatattgacctctgtgatgactctttcaatatgatctcatggatgattaatactcttctgccttcccagggattgggacactatttttaatacatgtactctatacatttttcacatttctctcttgttccattctgtttcagtcttataatgtaacattaagagagcagtataatttcttattattttcaagtttttgagaaataactcattctgggctgtaaatattgataaatatatacctcttaatgtctttcccatgcacttaatttttataatctaacttaatttttaaatttaaatttaaattagaaatgttcagcgatctttggatactgatatgatcaaatcattagaaaatgagttttataggtgtcaacagtttatgctattaaccacaatgacaaccagaaaatcattgagtcataaagtctcattctaccttctagaacacttagtgaagaacctggtaggttaaagagtgaatcaagtatacctgtagctaattttatagtactcctaatctacctcttcctcagtgtatcatttcccctcctccacaaatcccacttgcttgttttcttgcaaagctgccaagaaactgtgaacaaatttactgtctgaatgactgattgctctctcagtgaccttgaaaaattgcttgcatcattaaaaattcatagaaaataacgttttggagaatactcatatgtaatcacagtacctcctgctatgctactatactattacaatcttctgaactttaaaaactatctcaaagacattaaacttgctctaggtatctagttaaatcaaaagtttcttgctgatttttctttctcaaatattctgcatattctccatgcagaaaattcttccacctttttctgcatatggagaataagaaacagaaaatcagagtgaagagtctgattgactctaaatttttgcgacatgtcagaatgcctatttcaaactgccacaaagtatcaaatgaagagtgtcagttgttcttttaattgaggtgaaattcgcgtaacacataataaccattttaaagggtgaaattgagtggtttttttgtgcactcacaatattgtgcaactaccaccccatctagttttgaaactttttaaccccgcagaacatcctctaccctttaagtagtaactccatacttctccctcttcccttcttctggcaaccaccaatgtgctttctgtctctatggatttgcctattctggatttcaatcgttttaattttaaatatgtacaaattacaaattctgcttatgcattgattgtatgcctcatttttcttgaggaatgagacatggaggactaggatgtgaaatcctagtaataattcctggaaactctgacaagatggtaaagtctcaccataagcagccttctgatctctctcccagaacaagtatcaccctctactgtaatgatctgcttatttgtctgtattctcttcaagacagtaatcactggtgggctttttttcaaactgtaatgcttagcacaatgcctttatatgcttcagtccttggtgtttgctgaaggaaatgaaggggaacaggaagagaagaggtggagctcattagtgatgttttgaccctagatgaataaatgaagaaatgattttactgggttctgtttcttttttgttttttctttcttttttttcttccttttctcttttttctttttcttcttcttttcctcccgatgtctgattttcctgaaattagtttgaagactatggaattggctccagaatatacttattgtattaaaattgaccttaccttgtcttatccaacatttggctttattagcatataagcaatgattatgtgtcatgtattattatctaattggtaaagagctatgtttaattatctgggtaatgcaatctgattttgatctgtctgttttctttcactaggctttctttcctcttgcacaacacttgtctctcaacccacccccagcaccttgcccaaagcattggtgcttagtctggtaggttcagtcaatgaacactcacccagtgttagagtgagataactagttagatgacggcctatggaaaagggagaaaaactagtttcaaatcccttccttcctgtatattttccgtaaaatctgattattttgcatggaatagtaggaaatatgatcatatgaaaacccagtgtcaaccacattcaatttcctataagacagcttccttttaatgggcagattgcccacaacaaagagtagtgagtatcatttcagcaatggataagataagcactttcttttaccttaccctctttctttcacttcatgtttgaagataatgaatgctggtagatctgtgttgtatgtctgaaaaaagcaaatggtaaacaaaagcctcccctataattctttaaacctcaatgctcatgtgccttcattctctgttggcttgaacaaacaattccttcatagacgaggcattaggaatgtattttaatcttgtttccaaagttctgtgaagatagtgctacctatttgatttgtggagaagaatgggtccttgttgattttacagaatttctaaggaaattgttttctgctcatttcatctttcctctggataacacgtcacattatcttgtatggtagtgtctgctgttcgcttctcagtgccattaacatacatctgggccaccctttgtgtggaactgtcccctggtgaaaccctccgtggtctggggtggagaaagactgcaatttacagagtccattatcacctctggacgtgtagaatgataatggaagtgacagaggtgcagctgaaaattggctcttaatattttatgtgttcaagcaaaggattggaaatctcatgctgctctttagggaaaatgaagtatgtgggattttttttttatcagaaagttatatgcaaagagttgactgcaggatttcaaataaattgttacaccatattcatttcttgttaacgagtacttttcactagggaaaaatacttttgtgtgaaaaattaatatatggaagcaaaatgtatcagcattgaagcaaatttaaaataatgtaccatatacattaccactttgttttaaccaatatgctatgtctatagagtcataaatatttgctttaaaaggttatctttaaattgtttggttgctttttgttactttccacctaacatattcttttctgacttacagacacgaccatgtttcaagagctatcacggtcatgttgattttggaaacggaaattttgggtcagatattttagtgtttaagacatatagtataagatagaaaacaaatacagtttctgaaatagttacattgataatttaacatttatctcatttgttataatgtttattatttcactaaagagaggtgtttatcaaaagaattctttcttgaaaaatatagttgctttctgttttgactaagacgtgaaacaatacagtgtctgtagaagaattttattacttttcatcaatctgatctcagacaaaacaaaagtagtaagacaatattctttcttactaataaaagattaaacaacttgaaatttagcaaatgttaggatatgtttttatttccttaatgtatatttatgatgagaatttccaatttctctactttaccaaatagtaactattagggttattactatatcactattgacttatggttaagatatcgagattttacattttgaagcatttggagatgaagggataaacttggtgaggtttttcagtaacatttcagaaatgacagactactttttcttatatgtttctgtcgaagtttcctttctggaaatgaatatcactttactaagctgtaagcaggaaaagtttcaagctgctgtggtgggcttcaaacctaatttaaatcagcattgcctgccattttgagtaaggtccctgtagatcagtttatttagatgtgtaatgtgattcagatgccactgacaagatcagattaacaagacttccacgttgagatttaaagtgacttctaaatgctacaaacactctactagtgatgctcaactaattgctacgtaagtcatagatttttcatatttttatgaaacaaatgtagtttttacattgtatggaatcagtatgaatacctttactttaatcactaacatttattgaagatttatgtgctaacaaaattataggcacttttacatatgttctttatgctacattagtcttttggggcatgcttatgagggaaaaggtgattgtcctggtcttcattcgccccagacctagtttaattcctggaaattgataggacctcaataaatatttcttgaatgatttaagacattacttaagccatgatgacaaggatatctatgtaaacattttaatttacctttttcaaataagcaacttggaaaatatgtattaaatggatgacttttttagtttactccatgccatgcactgcagtttgtggaaacacgtcactcttatttaagcagcattactaataatagataatgaagaaataaatttctcagagaaataagacggagaaaggaagctgaaagaatgataccactcaaatagtttttcacagtgcagttcaaaaccattagatctttgatgtaagaagtaccaccaaggccaggtgcagtggcttatgcctgtaatgctgacactttgggaagccacaccagaaggattgcttgagacaaggagtttcatagtgacacacactctctacagaaaaaaaatttttaattagcctggtgtgctggcatgcacctttagtcccagctactcaggaggctgatatgtgaggatcacttgagcccaggagcttgaggcctcagtgagctatgaacctatgattgtgctactgcactctagcctaggtgacagagcaagatcccatcttcaagggggttgggggaagaagcaccaccttacaatttacatcctgctaattacctataatgcctagatgcagtgatgacatggtggaaagggcagatctgttatctgttctctcaaagggaaatgatgtatagatagaaacagagagattcttataaaatagaattctccttggtgagttgctgactaaaattaaattgacataagtaaataaatcttgaatagttcagggattgttcgtccctgctgacagtaacaagaaacttgggtacgggccagattttccactgcagtctgaagaactttgatttcttgaaatgcatgtcaccaaaatttgacaaatgctccaatatttaaacactactagaacctagaactttcccatacaaacaataaaatgtaagactaaaacttaaatgactttattgtttcaataaatataagactaaagttcttaataaagtcactaacagatatcttagttggcagatttactagaagagttctgtacagggtttatatgtagatttgttcagttacaagtttgaaacgttgcagaatttcacattccactctttatacaagcttctattttctgactaagaactgccaccactttcttagatgtctttatgttttcctcattcctgtcaatggcttgaagaattggcattcttctggggaaacatttttcatgagagaaaaagatttttgttattttatgagcatgagaaaattagctatgtgagatgtggatgctgcataccaccatacaccttacaggaagtcaatattcattataacaaatttagaattatttttcattgatgaatctcatattaaaaattaagtgttcaatccataagtgtccgtgattatttttaaaggggctggtttcatgaaaggcctggaattttggtggtcatgacaggcaatggccctctcattgcttttgcgtaccaagcatgtacataaatagaattccagagataaaaacttcatcaagttgagggcttaactggtttgctgttttgagaagggccaggtaacagtggtctttctttttgttaccaggtatggatgttccctctgggtcctgccaggtctagaacaaagtagcaatatttcaagtgtcttttttgttgatataatttgttttttttttcccagtaggagcaagtttgcataatcagtatgtggggatgtgtggggagtaaggggaaggcaatggatatggggtcttacctggcgtagccttggatcaaatggccccatgacattagaagagtctacttagagtccccaaagaaaaggggcacctagaacagattaataactacttctgttttcaagttaaactggccagaaaacacatgaaaacaattttagcatccaaatacaatgaatcattaagtgatataaaatgtttatctcgaaagagagtgtatccattacttagagcttttctgtgtaaaaatgtatttcccaggtgtaatgacattagcatatactttcatgtcaaaattctgcaggcttggtagttgtaattcaatttattaaaggaacatacgtggaaaatgttattgctctgttctttctcacaccaccatatgttacacttgccaccattttctctcaactccaccctgagttaaagctgcttttcccaggatttggagacattttgcttatctttccttaactcgatccattatgtgccatcactagaatttaaaattgatttcatatccatttaaattaatttgatcctcacaataatcccaagaggtagacagagtggattgtattgttagtgaacttctttctcatatgaggaaagtaaggcccagaggggtcgtatgggttgcctctggtgatgaggttttcgcttttcaaatgttgcatgtgtggctacaaccatgcttcattgttcttcccacagaagacagtgtccacaaatcaggctttctctctctctctctctctctctctctctctctctcacacacacacacacacacacacacacagagacacacacattagcaaaacttgaatacttgtgacatgctaacatcaccaccattttctctcagccccgccctgacatatcagggtgagactatcagagtggagctgagagaaaatggtggcgatgcatgttagcacgttacaagtgttgcttttctcaactggacattagctggaaagtgtcagcaggaaagagattgtttgctctactgatgaaagccctttcctattaatctgtcaaaattctgtctatcctatggtgccagcccaagccgcttcttcctgaaagaatatcccctttcctacaggtttcctctgttattatattctttacagtctgccttacggtagactatttatttcctatcattgcgtcttaatgaatctaaaattaggcacaggctgggcgcagtgggtcatgcccataatcccagcactttggaagccgtggcaggcagatcgcctgagatcacgagtttgagaccagcctggccaacatggtgaaaccccgtctctactaaaaatacaaaagttagctgggcgtggtgacaggcacctgtaatcccagctactcgggaggctgaggcaggggaattgcttgaacctgggagaaagaggttgcagtaagccgagattgcgccactgcactccagcctgggtgacagagtgagacttcgtctcaaataaataaaaaaataaataaataataaaattaggcaggcctgacttttattttcagaactgtcactttaactagctatgtgacactgggctagttgttacattttgtaatataactttccttgtctataaatcagggcccttgtctcagtgaagttttgaagcttaaaacatgtaaatagttaagcaaaatgtgtgatacatataaagtgctcaataaatgggacctgctattatttttggatttcgtatctctctggagtttaattcagatattcattttcctatgaatctagaatagtaattgaatatagaattttataacaatacatatatatgtatttctaatctctagctcttcaattttttactagacaaaatagattcagatctaagaagatgtatctagataaaatacaacattatgatcatgctacagaggaacacatcttgattctataactccaagtattatgaatatgaataatttttgtatgcagtcaattcctgattaggtcaaacagagaaagaaacttaagaatagataatggtaagattctgccagtctactaagctgtgcatagggaatgatagagaaatgctgtggagaccaccttgtgcatggatagccaagataaaacagtggtatactggtcatgcacaatcaacagacgtatttaatgctccattattgaaaaaccagataatcgcagaaaatgaacggatttttttaaagaaatttatattgagtaaaattcacccattttagtgtacagttttatgagttttgaaacgcagtgtgtaaccactatagttgtgtagccaacacaatcaagatgtaggatatttactgttgtgtgccagtgaacctgaaatcaggcaggtttaaatttaaatctgcgatctgccactttcattagatgcttgtcattgaacattttcctcacctccaaaatataccctcatgtctactttccgtcaatccctacccttgctcccattgtctggtcacacttacttgtttcctcgccctgaagtttctttctttcccagaatgtcatataaatgtaatctaaataatcatcattatgagcttactgagtattgcacaattactgtatgtaagaatttgtattgtaatattaagtagtccctcagagtctatcaccatatggaatgctcattttccgtggatcgagtcagataactatttttgaattcttgtcttccattttgtagattttttttttcctacagcctttccctctgtctttacagcttgccttcagtttgctctctggctacatcttgctatgctctcctcttcttatttgctacttatttgtatcatagtaaatcagattaaataacttgttgaatcgttggttacttaagaacagatgagttctgaatgaggccggtctctttaggcactctcttgagacaaagtgtgtccttcctttattctaggtactttataaaatctacctttataaaaaccactccacccccccacgttgttttttttgtttgtttgttttgttttgttttttttgcaggctctttgttatcttccagaaacgtgatattcttagtaagtaacttccggtggtgctatcttaataataacagggagtcacatcgcaagctttccctctcctccgctccagcactgaacacctgtgtttcactgagcagctgaagacttacttcttccacctcttcaaaaatgtgtcttgatgactccactcgatctacatttctctcacattgctcagaaaattcatttattgcttttttgcatactcatttgtttcgcagtaacttgaggcttctcggcaacaaaattgtcaagaacttacttgtactttctcctctaaatgctttccttcatactagacatattattgccaaaccaataaatatttaccgatttgttgcttgattcgctggtataaagcaacataaacaagagtatccttatcttactgaatttgtttactttatgttactgattctatcacagggtgtactatttttaaaaagccaattctacaggactgttgttatcaagagcggaattggaaaacatgccagctgaatccgaacggaacagaaacctaaactgcattcagctgcattccctccccttttcactgcaatttatctaaaagaaaaaaaaaagattcatttctctaattaattcatctaggaaaaaaagggttggagggcagatgaaattcaggagaaaaaaactaagaatggaaatgatgtatagttgcaagtagggaaggacaaaataaaccttagtaatttaatttacaaatcatcccctgaaaattgatatatatttgttatatgaattgtctctatgccctctccattacaaaaatagaaaagcaaaaggcaactaataatgaaaataagttgggtgaggtgacagctttgtcatttttttaattggattcgcgctctccttcccttctgaaatgacgcactcaagactctgcctccacagctgtcagtttagttccctcagacattattaaaccctgcaatgaagcttccattggaataaatctaccaaaagtggctcttcatatgtttctctgtacatttctaaatataattgaaaactgtttcagtatggtatttcagttaattttttttaatggaagcaaaatcgcggagttgcagactggtgataatcccctgcagatataggactttcagagctagcccaagagctctgaatacagggagtcaatggaggaaagttattgatttgctcctccagttctgaggactgttttactgtgttgtacctacggtactttgtccccttggccaatcatacaggttcctaaagtgctttaaaaggcaatgcaggcccggcgcggtgcctcacgcctgtaatcccagcactttgggaggttgaggcgggcggatcacgaggtcaggagatcgagaccatcctggctaacacggtgaaaccccgtctctactaaaaatacaaaaaattagccaggcaaggtggcaggcccctgtagtcccagctactcgggaggctgaggcaggagaatggcgtgaagccaggggggcggatcctgcagtgagcggagatcgcaccactgcactccagcctgggcgacagagcgagactccgtctcaaaaaaaaaaaaaaaaggcaatgcactccagctgcctatttacttgctgtcagacaagcaagtatccccactttataagtgggattgctgaggcccacagtgaacttccaagaccccatggtgaataaaggagaaagaggtcaatgagcaggtctttatctgccagtgcagttttcactgtagaaccccacattagcagagatgagctcaagtctgttgtccatctgtccattcccagtataatctatggagttagtttcatgctctcaaaggatattcaggagaccattagcatatatggagatgcgctatattaatagccatctccatggtacaagactaaggaattcactctgtcagtattcaaaaatggtgatggagtcttaatggattaatatatgtttatgtatataaaataaaacattcatggtttaattaaagtgtttgtaaattatcttgattttatcttagtgaaaaaatagggtgtttgtattattcaagagagagtagatcaaatcctaccagtactttgattgaaaattctgtaatctcacagaaattcaataaagaataataataaaaagaaacaataaatatatagttcaaataaacttttctataccccttaatattgatagaattctgtataggaacatcattttcatgttgtatctataaaaaaagcacaaactgaaaataaaagatggttaaataataaaaggaaaacatttttaaatgtcaaattttcagtgagttccaaataaaagaattatttattacattctcaaaggtcctagattcctctgcatccttgcagcaaatgattggcaaattgctttgattgttcatataatatcagtgtgcatttagagtaacagagaccctcagtcatttgaagaaatcttttgaaagttaagaaatgttaaagaaatagtatttaacatactaatacatactgtgagtagcaaaaataggtaccctgttactctctggtagtttctaattatacttgaaaaataacaacacaaaaatacacaaagacctctgaggccctccctgatctctaagatgtcccttgcctggctgtgtcctttctgatctgatcacgtagtattcttttccctgtgtgacactgactttcttgctgtctaattgtttagactatccaacctgcttgccatatccagcctcctacattagctgtttcctctccttgggatgttcttatagcagattttgtattatttccttattaatatcaactagtcctcccttaatcagtctggctaaaatatccccagcttctcactctttctttttttggaattagcttatctcctcatgctccccaactggaatgcgagctctttgaaggcaaggactgtcttcttcattatcatgtcctccaaacctaggaaacatctgccagcgttaccattatgataaataatacaagaagaagctatacatacatacatagcatatatttgcatgaatatgtttgtgtgtgtatgtgtgtgtgtgtgtgtgtattggcgcacacactcatgcatggacttttaggaaagaaattaaggacacgtctgcatacattactaattatttggcgcattattatattaggctacatttgtgattgattctatataagacagctattattttacctcaccaaaattcttccagctgtgaataatagaagcagaagagaatatatattgttaaaaatgataagtgtgcctgtagtctcagctacttgggggctggggtgagaggactgcttgagcccaggagttggaggccagcctgggcaacatagcacgactccatctctaaaaaacaggcgggcttgatgggtcacacatgtaatcccagcactttgggaggccaaggagggaagatcgcttgagaccaggaacttaagaccagcctgggcaacatagtgataccctgtctctacaaaaaaaaaaaaaaaaaaattagctgggcatggttgcacatgcctgtagtcccagctacacagggggctaatgtgagaggatcacttgagcccaggaattcaaggctacagtgatctatgatcacaccactgcactccagcctgggcaacagaccaaaccctgtttcaaaacaaacaaacaaataaacaaacaatcaaaaaacagtagggtccttcaagactttgaaagtcttgaagtcttcaaagataattcaatctctttctctctacccctgcgctactactgttaagagagttaaaactcaaaaagttgacatggttcacagcgtcacatgtctagtagactatacaagcaattcaccaaactgggctcctgaatggaagtcataaattctttacactaaccaggttgcctttctttgctctgtgctgggtgatccaccaactgacctgcttagcgtgttaatcttactagtttactatactatttagcttcatgagagcaacttattctgaacagtgctcaagagtccagcctcctgaaacagactgtttgggtttgaattctgactgtaccattcactagatatattgccttagttaggtaagtcacatcactgtgcctcacttaattcatctgtaaaacagtgataatgatacaggtcttttgctgtgataattaaataaaataatttatgtaattagttacattacatatattatgtgtctatgtatatatatgtattacatattcatatacagaacagtgtaattatacctagtttttgcaagatctccaaaacattgatttgcagagttacttagaataaagaaaaattgagtgctaacttaaacaaataacattaggccaaagtaatttagcaatttctttattagtcaaatattgattgaaaaataaaacaacctgggcatatttttcactgataatcacagagtcctccttcgttattcattaaataattttaatattatcttttgaaacatacaattttgaaagtgaaatttacgcaaagagcataatgcattcatttgaagttcatttggaaggatttctgtattagcagttccactgcttccttttgttgagctaggaaatgaggacatagccatatttgttcaggaatgaatagaaacatgacacaaaagcagaagtctggtggcctgacattgaaattgtccttgtatattaattttttaagcagtttttaagacaccgttgaatttaagcagcctccataaaggaatgcttttatgtggtcaaaaccaaatttagaaatcagaaattcttaattccaatagtatatagactctatttccaatgacctgtccagtttcgtttttatttctcttttttaaaattgaatgtggcttatatttaatatttgtgaagtcctttcagattcttcaaatgagcgactctatataaatgcagaaatagcattgttaattcccaagagtattataaaaattacttaatgtttgtaaagtacattgaagatgaaaattgtgatgtaagcagtaagtgttaagtattatttattaaagaaaagcatgttagagctatggttgctgataagtactttttaaatttcaccgagtttctttcaagttcactgaggcatggccaaatgttattcaagcactccaggaatcttccctccttttgggacttactgctttttttttcggtgtcaggtcttcggaatcttaattttctcttactaattatcaccattactgctatctaaaaacctagaatgccttaaaattatatacaagtgaaattagctatatatgcagtatttttgagtggaaagaagtaagtagagtcttctactcatactttaattaaaagtcataccaatatttgaaataatcatgaaagtactgaataactggagagagcctaacatcctctctgaatggtatatgatactaaattgctgttaatgaaggttgaaaaaattggtctgttttgtttgaatttcttacatttggagagcaaaatattttttaagatgtgactaaattcatctgggttgtctcttttccacatttattcccttctctaatactagcacatagggaaacaaacagaacaaaggcagcaaacacaggtaagccacctcctactgaaaacaatctactgtctccctttctccattacgtgtacttctggctttcctatccgtgcagaacaatagcctctctgtgattttataatctctgcaggaaaaccaacaaaggtatctgagggtcgctgcattgccagagaacagcagaggcagaaccaccaatggaaagcagaagcagcaacaggtggccgattttgcacaaaatgcaggagagaaatgtctcctagtgcataagggaaaataaacagcatgattgagtaggtcagctcttagcttgtcctctcttcctgtattctctctttttttcctctccttttctaacatttcaacctctaggaaggagttggtgacagagtggtgccatgaaattagaagaaaaagactgacattcaatttcttagtgcctgtggggtcaatacacgccctgacatatgggtttacgtttcccacccaattagccagtctaaatgggaatattcattgttctaagcaaatccaaattgacatcagcatctcccaaatttatttgacctcagaacaccttttttcccaaaacaccattaacatcctgcttctagaatgcactttgggaaatgatgctttttatacaatcaaaaaagtttcaattacatattcaacttatcacattaacacggaagtatgtgacatgtttttggaaggtttccttcaaataaaatattttgtttccagaagtatttctctttcatctatcaaaagcatatctgtgactctaaccatatccaataacaaaggggatgcttgtgctttgtgttaaataaactttcccttaaaacataagaaggagaagaggaaacaaaaaaaaaaaaaccaaaacctcatgtaacacttctttttgctaaatgattcagatttttcctcttgagtttatggttcaaacagcctttgaacccttctttacatcatccacgccagccgtgcttataaatcttttccattctagaagcttgagatgttttattatttatctgtatttgttggggccagccttgataaagcagattgtttataatggaactgcttactgcaagggcctgtaaaagaaaaataagctcaatgtggcctgtgaacttggatatgcaccagggtataatttttcctgctacatgacagggtagaaagagactgaaatcactgatagagttttgggagatttaaagattgaaaacaaagctaccttgtaccatcttcacttggggagaaggaaagacccttagcatttagggaagacctcgtcctatcctccgtttattgatgggtttcctcaatgattatggataactggaaaaggagaagataggtatctagaggctcatttctggaaaactaaatatctacagaaagcagcaatgctctctgcaaagtttacaaataaatcaatcaataaaatcagctgtttaggaatgcacacacaatattttatattctggtacatttcatagaatgtgtgcttagattcatcagatgcagaatggaaataatcatatagcagtccttccttatctgcaggaactatgttccaagaacccctgtagttgcctgaaatgatggatagtaccaaaccctatgtacactgtatgcctagctcttaaggatttttgagtgataactatattattgctatctctatgtatcagcaaaaagctaaaaacattttttgcaaaccaaatttttctgttttgagacatatacttttgcattatgctatacttttcatgtatttttgtgttcattttatttatatgatattttcaaaaagagacgttcctatagttgaattattaaataagaggatatctgttcccagaaagttatcttggctccagagccaccagaattcattcttctaatctgcactgataaatattgatatgtggtaatttgggagctttgttttaatgggagaagaaggtttttaattttcactggtagtactttgacatggtcatggaacctctgagttcaggtccagggtcctcaccatctttctgagaaatatcttattaaaactagagtggtccctggcaaaagcaataacaacagcaacagcaaacaacaaatttttagttatgttgattgacttacctaaaatcctgatctggtagaatggtgccaatatatatctgtaaatggagatcctgtgaggcaaagtttcttttaccatgagttttgttatagtgatggaaaagaaaattcacacatagtattaatgaatttagaagcatgaatgtgcaaagtttacctgcagctctgcctttatctttaccatccaaataaaccacagctaattaatcacacggaagtcctgggctctgataaagatcctaccactctattttatttctttggatgctgcaaaacaatttagcaaagttttcttagtagggctattgcttttcttacacaatcatgtgccattgcatgagaccttaccactgatgctctatcagcgtcaatggcagaccttcatttcaataatagggcccaggtaattcaacttacttgcaaatttgcagagttgcaagaaagctaattacagttgtagtaggtacctacaaaatatgggtgatgtctgatagtcaaaaattttctgtagtttattttatagtttcttattttatcatgtatatgcatgaaagaagggctatctcctttatttcctaaaggttattcagcatctcttataaaattctgtattttttcccaagtgctacaagttccttttacaatatgccacagaaataaagaaaagctttttttctcatttatacgatactatgatttgtagatattcagtaaatggaattattggtcttaataatttaaaatcttgtgtactttttgaatccttgagaattttagattgtagaaaaagaactatgatagtatagaaatgcaaattcaatattcaggactatctaaatatgaattttttgtaatattttaaataaaatacatttaatatataagaattgacatgatacactaatgtaaatctcacaattagaattgcataattgattcacatcaataatagacctatatttgatgttcagctatgcttttactgactttcaaatggtttctgttttgcttaattggtttggatttgctctgtcaggttttttccctttatttcctcagtgagaaagttgcagacctgctgttttatatgtctctgtttttttttttttttcaagaaagaaaaaggcaagcaaaaatctatgttcgattaaaggcagtttattctgagtttatgagcacttcaaaaaaatgtctcctgccttcattgaagcattatgaaaatcccatagtacatctgtcatagaaattagatgctagaaaattccattaaagatcattatttctaagattataatattggctgtgttctagaaaaatagagcataatgtcatgagggcatctttcccacacccttcctcaattgttttattagcttattctgtatttctattggttatagattgactagcattattcttatatatattagcaaaatattctgatatttcagcagcttgaacgtgttcatttttccctgagttactcctagacttaattaagagaaacaacctggggccttttgttgagtgaccagtctttacatttttagcaagaagactgcctcaaaaaaagtgcccaaacaaggattagaccatccatccatagcagtttctgtaattagttatatatctgcacagctcacagtgtaatatttggacaatcactctggttacaatttgtctttaatttagtaattatgagttttgtttttactctttttcctatggaggaatcttttctagcttcaaaaatatttcagagtccacctccaagaaaataattcttgcagttttttgaaaatattatatattatttaatagaggggtacttcctccatttcagaaaaatatactatgggttattactttttatctagctgttaatgattgatcctatgaattttctctttggattttttttttcatcagataaattataatttctcatctctccagttattaccaactctgaaaatgggtaatctgtggatattattggaataaaaattattttaatataaatttgcatctctattataggacacttttaaattgtggagaaaagcttcataaaaatcacataaataacaacaggaaattgtccaatcagttctgctatacatgacataaatgttccttaaatttatctcactatgcaaaattggaaataaaaatcacaagagtttgtgggggaaataggattggagcataacatgcaaaatttgaattaaatacacacaaatatagaagcctaataaaactgatggaatatttctacacatgcaaatggttaagaaatataaacgctacaataaatatggacttcaccttgaaagagacctaagtttgcttatggaagaggatgttggaagagttgcagcttgggagttactgtgaagaggtggaaggagggttatctgaaatcagacagaaaattgtaacaccagatgtggatgggtatggtccctaacacacatggcaaactgagatacctgttagatgtttgaagggttatgtgtatgtattttgtatattgctatgtagcttggttcattggatgcagttttctatagtcacacattgttcctcacaagtaaagtaatgcataattagatgggaaatttgtgtcatgctcaaatttttccctgttagtaattcatgtttttaaaataagagttatgacagaagactaaacatctgagagacaggcactctaactttctaattgaagacggtgaacctagctgtggtaaaaaagaggtggctatttaataatgtcactaacataaacataattaaatgacaacattttgatttttctgtgtaccattatgaaaaactgaacatcaacctccctgtccaacttgattcattcattcacactgggttttgcactgagaagtgacaccttacttgaaagggatatcagaattgggagggccacttagtaatcatgcaacatttcaaaaccttttgtttgtctgcttccttgtactctatctctggaatttgtgattcccaaccagtcagtacaagcaaccatggcactgtattcatttaatgaatgaatatatttaagggagcaaatgaaagtgtgggacatgcaaaatgtattcaactatccatttcctgttgtacgtttttctgcaagagcaaaactcttctgtgatgtgttgctgtactctgagagaagttaacaaatattggtagggaatgggctttgacaaactgcagtgcctctgtggcccttgcactgctgtgctttcatattctggagctagactccagtgtacagagtagaaaaataataagttctttgagctgaaacttcatagtcactgtgggatattcaagaaggagaccaatgcggagaaagataatatagtcatggctttgaacttttcctagattttacttgccagaaaccaagcgagagtcactctgacaccttattattactagctctctttctccatgtagggaaaagtgctccacagtccatgtcaataaaagtgaaagggagttcacacatgagagagaaggtggtctgaatttagtgtgtaaaggaagtatataaagctaagatctattccaagcctcagcttggaggccaccttcaatggcaagtccgtcttttcctttccctccgattcaagtaaggtgccccttcttgcgtttccagaacacttttcagactgtattatatgtatctgtttcattgtcgggtacagagtaggtgcttagtaaacatgtatgaatgaatgaataagcattggatctcagaccttactgtgaagaggaagagataaaagataaatttataaattgattatgagataatgtgatgcattattgtagaatgaacaagtaatgtccaagaaagaagagatcaaagagggctataattcattcagtcaactgctatctgcatcctgtttccctgtgttagatgaactagtggattagaaatatatagtccctacaatcatggaacatgtaaactaacaaagcacacagacattaaacaaagaaaacataaacatgtataattcacattttgataataattatagagcataactgggaagacataatctatatgggcaggcagggaaggcatttttaaggaagtgatatttaaaagtgatgatcgaagatgaggagggacaaaaggaaggattaacttgtgcacaggctgtgaaggcatcaagagctcagctgtgtgagaaaaagagagaaggctgaagatgagtgagctgggtaggcatgctgggctggcatcgtgagtagagaaacaggctggagccagatcatacttggtagaaggtttggattttaactgagatgagtttggatgcatttgtcaaaactcagtgaatgtaaacttaatatttgtgaattctattttgtgtaaatattgcatgaaaaaaatctaaacaaatattgaactctggttaatgatatacatgtttaaatatttactgggacggttcttgggtttgtaatttacattgaaatgcatcaaaaagataaaattgatagaggagtggataaatatatagaagtatgatgaaactagtaaagtaagttactaataaattgaagtggtagatatacagatattcactgcaaaatttcttcaactttgctgtatgtttgaaaatattcataacagttttggaaaaaataaatgctccaaaatgaaaataaggagatatataataatcatacaaaatcccaaaacccaaaaagaaggattattctaggatattaccatttgattcttgctctgtgattttttatttttatggaattgatacctgcattttaaaataataagcatatctcatcactttaaagaaatcattttaaattatttgcatcattttacattacttaaactatcaaatctttgatgaggtatttctttgactaagtataaacacaaatctcttagactagaatgcatcaatcctcaactgtccacccagtacctgtcagtgtggcagaaaggaggtgaacacactggagtctattagtgtaatcagttctcagcagaagattctacttttaaagttttttaagatttgtggttgacgtaactgacataaaagaaagaacaattgtttctttgaaagtagctaagggtacccaagagtctcagtgtattcagtagtttagattctaacttgtttctgtgaaaatgtaagtagcatagtgtgaaggctgtggagcagattgctcttttccttgatgagttgctacccactatgagcattttgctgataaattagtgcatcacacaatgttagaagccttgtgcttgatctccccatgttttcaatgaaaacatttcccttttattgatgtttgttcttattgaccctttgaggtcagaagacagagtttctttattaaatcagtaaatcaggggtatttaattggctctagaaacttctgagtggttttggcctattccagccccaaacagggttctgaccaaccactgtgaattctgcttttccaggaaggtagggggtgagggattataacaggctctgtgtaaattgtcacttgctcattgccttcaaagcactggttttcttggtgtaggcaaaacgccaaaatcaatgtttttgactcacataaagaaatagtttagcatttggaaaactgtatgattatccctctttttctgacaggccatcagacatttaaaaaataaaatatgtcttaggtttttacagaggaacttatttttattcttcatgttacatcaaaaataatgacatgagtgttggccttagcaactgtgttaagatcaatgatactgcaggaacgatgaaagtagacttttataatgagagcaaatggcccggagtctgtgagaaattgctgaggatccttttaccgtagcaccattgctaattaaaatctaagaatcaacaccaagattgttcaggaaacacaaatactgattggagaaccaaacttgagggtcattccaatttctaaactatcttcattggaatttaactttttaaaaaatgtctccaaagcgtcataacctcacttctattcatttccttttacatctcttacatttgtttccctaggctttctgttcttgtgcttgagatcattattacttgatacggggcagtgacaaatgagggaagcaatttgttcagaaatcatgcctgtggcaagtatttctagactggagaatgtagcctcatttatcatcatcattatcactgaaaagctataggtcaggaatgtcttaagtcccctgtgtttcagcattgtctattaaattggggttaattaaaatgtctcttctaaaggtacttctcttgaatacacacacacactttaactctggtcttttttagcagagccattactctatttcctgtagggaggaatggaatgacatgtgtaggacatgatttcattttttagactagaaaaggaaaaccacctagagagttgtgaccttcagacatgtcgacggttctactcccatgtaaagtctatagtccacttttaaaacatttttttttagtctttaccccttattttattgatattttaagaaaggaaaagtagcctcaatctgtgtttttatccttcctaagaatatatttcccactctagtgtttctgaagttagaatacataggtattagctgggaaaattatttaaagtacacatctctcagccccattaccagagatttcaattcagtaagaccaagatggaacctagaaatctgagttttaacaggctttcgagatgattctgatacctgtggtacttggacacatttttgaactctgctttctaccatcactatagagtggtatgggggtgagcataaggggtgctaggaaactgcacaggaagggaacctaaattaaaagatggtagcactgagattcgagctgagagctgaaggtcgcatgggagttacctaaaggcagttggaagtgcatggggtatgagagggtgaagacattttaaactcaggtttacttgagtaaaaagacataggggctagagagaaaatggtacttttagggtccacaagtgtataaatctggatgaagaatgatgtgtgagtggctaaggaggtgggatgtaaagatgagcttgaagaagtgagtggaggtcagactgtgaattcctcaaagccatgttcaagatttaggaaaacatcctgctaaacaccactaggacttctgtaagctgtggagctcaccaccattcatgggttctttcacgttcttaggctgcatatagtcttgggtctatcatcatgataaaaggaaagctgctttcaatgtaattttcatttccactgcaccttccaagggtgagaccctacagagaaaaacaggtcatgaagtaacatgcaagaggaatggctttgtgaatatattttatttgaagataattggtacttaataattcaaacagcttacttcattgactttgaaccataaatattaggaagagaacactagaactgtggtgagacaatgtcatgtgacaaagattaaaaggaaaacaaatggtcgaagattccaccatttgtgttttgtggtgtgtattttgaagtgcatttcttttctaataggtaattgaaggtaaaccaggcatttttatcattgattttgggtacatttaatcatgacacttaaataaataatcatcctcatcctattccacaaattaatgtttgaatacatgttaaccttccgactgaaaattattttaaagactttttgaagttcacagcaaatttgagagagaggtacagagctatcccacagatggcactccctcccacatatgcatagcctccctcattattaacatcctgtaccagagtggtacatttcttacagttgatgaacctacattgacacatcattatcgaccagagtccacagtttacattagggttcactcttactgttgtacattctgtgggttttggccaatgtataacaacatgtatccatcattatagtatcatacaaagtattttccttgccctaaatatcctctgtcttctaccagttcatctctccctccccactaacccccagcaaccactaatctttttactgtctccatagtttggccttttctagaatgacatataattggaatcatacagtatgtagccttttcagattggcttctttcacttagtggtatgcatgtaagtttcctccatgtctttacaaggcttgatagctcatttgctctgagtttttcaatgctacccctacttgttttctcttcctggttaaggatatgtgtgtatttcaatatgtgcttatgtgtcaataactgccagtcaggaatgacaagaatatatgttagaaatgtaagaaaattgctaacttgagcttaaattggatgtgttgactccactgttgtgaatgaggcttctttggccccgatctgattcgtgtcagtatacaaacacctcgaaatggaaagcttacagcctgccaggaagaataattttttttcttcttttttttctccatttaactttgaaagtgggaggatttgagtttttgattgccaaatagctgtcaacttaaaacaactagattttattttcttatagttaatttcttgatctggatcaagttctgagcaagaaaacaactaccactgtaaacagctattggggcaagaaaaagtgtacttaatatagtacagacacaatctgtggtctgtatgattggatggtaaaattccaatttgttggcttgttttttttgtttgtttttttttttttttttaagaatcactaagtattatttaaagggaagatctgaaatgctccagcaagtaaaaatcaaatccttaagatagtttttaaagacagtttcagacatgtcatctaaacgctagttttaaagtgctacctaatgaactagaagaggccttgattagcaaatttgcctgcatttggtctactgagtagtgaaagccttgtttatggtgggttctgctttctcaagttgccctccttaaacaaacagagcaagagcagaaagcttttagatgtacaacatgaagccttacaagaagctgaaagtcagcccatgaaagaaaggagctgtttagtgggtttccagttaaggatctgggtggtgctggaaacagaatggtagataatagactcctagtgacggggctgtcaggagatagaaaactgtagcagctttgtgggaaaatagaattgctgggtttgcccacttgacctttactctgaatagatgggcttaagaagatcacaaaggactttgcaaaaaagtagtctgctcagttcttttggtgcctgaaactcctttttaattctggggagttttaagtttgtttcttggtattcttaaagggattctgtgaaatccctattgtcattccataggtatgtgttttaaatgaaggcattgctcactatatggccatcacatgtcctgtgcagcagtgaaactaactgtttatgggaaaggattactgaacagggactccagcatctgtacactccacattatcactcctatcaaaggcattcattgagcccctttccatgtttctggataattgcataatcttatttaaataagaaacgcaatcaccatttgaaggcaaaatgtgtatcaaatgcatatatactgctatgtagatgaaaggcttgcagattaattggcagcattttcagaaaatagggcttgacagtagcagttcatgtgaaaaagatctgggaggttttagttaagtacaagttgaatatgtgccaagattacgatgtggtggccaacaacccaatttaatctcgtaatagttacatgtatagaattacaattttctgccctaggatgcatggacactgattgcacattttaaaaattatgtccagttatgaacatcacactcctggataaaattagcaagcttgagaatatacagaggagactgaaaactctggaaaaaaaaaaaacaaaaccctaagccctttaaaggaattgatcatagttaacatagagtagaaaatctagcgatttggatggaagagaaatggtagtcatgaatacaaatttcaaatagctgaaggcctattatatagaaaaatatcatttgtgagttttcagaaaatttatagttcttcaaaccacacataagaataaataacagatggattaaagagacagatgtgggaaaatataaagaaaccataaaaactgcagaagaaaatagaagcaaatacgaacatacctcaaagatattgtgggtttggttccagaccaccacaataaagcagatattacaatcaagtgagtcacgtgaattttttggtttcccagtgcatataaaagtaatgtttacactatcctgagtctattatgtgtgcagtagcattctatccgaaaaacaatgtacataccttaattttttaaaaaaactttattgctagaaagatgttctttagcaagttatcatatttttgcttgttgagggtcttgccttgatgttgatggctactgactaatcaggatggaggttgttgaagactgggttgactgtggcaatttcttaaaaataagagaacagtgaagtttgccgcaacaactgactcttcttttcatgggcgatatctctatagcatacaatgcagtttcatagtattttacccatagtagaacttctttcaaaattggagtcaatcctctcatactctgctgctgctttagcaactaagtttatatcatattctaaatcctttgttgtcatttcaacaatattcacagcatcttgaccaggaatagattccactggaaactactttccttgctcatccataagaagcaactcctcatccattcaagtttgaccatgagattgcagcaattcagtcacatcttcatgttccacttttaattctaattctcttgctagttccaccacatctgcaattgcttcctccactgaagtcttgaaccccctcaaagtcattcataaggatcacttctcctctctagctatgaaagtcctacatggcatcttcttccaatatatggcggttttgtctacattaaaaatctgttgtttagtgttgctaccttcatcaataatcttagctagatcttctggataacttgctacagtttctacatcagcacttgctgtttcaccttgcacttttaagttatgaagatgacttctttccgtgaacctcatgaacgaatgtctgctagtttctaagttcttagcttcctcagttctctcagcattccaacaattggagagagttagggtcttattttagattaggcttttgcttaagagaatgttatgactggtttgatcttctatccagaccactaaaacgttctgtgtatcaacaatgaggctgtttcactttcttttcattcgtgtgttcactggagtagcacttttaattggcttcatgaagttttcttttgcattcacaactcagttaactgtttggcacaagaggcctagctttcagcctctcttgaattttggcatgcctttctcacctagcttaattatttctagcttttgatttcaagtaagagatgtgcaaatcttcctttcacttgaacacttagaggtcattatagggttattaattggcttaatttcaaaattgttgtgtcttagggaataggaaggcctgaagagagagagagatgagagaatggctcattgctgaagcaatcagaaaacacataacattggttgattgattttactgtcttatatgagtgtggttcatggcacatcaaaacaattacaatagtaacctcaaagatcactgatcaaagatcaccatggcagatttaattataatgaaaactttgaaatacggcaagaattaacaaaatgtgacatagagatatgaagtgagcacatgctattggaaaaatggcacagataaacttgtccgacacagggttgccagaaaccttcaatttgtaagaaatgcaatatctgcaaatacaataaagaaaagtgcaataaaatcaagtatgcctatttctaacttcttttggaggtggtatggatgataccgaatgaaaaaatgtaaaaggaagtgctgctagttatgattaggaatatctgaattattaaaaaactctttgaagttataataaaaatttaaaacatgaagctgaagaaattattaaaattacatttaacagtacttaatggtatgaataaatgtgcacaatataatgttgactaaaagatctctagatcaaactttaatttttaaagttgaaatatatgtatttaaataactactaagaaatcatttttaatcaatttctttgggtattcaaattatacgctttatgttttcagaaaggtatataaagtaatgaatataaaaaaacaagtgagtcaattatttagactttctgagtaaataaagttaacaaggccgggcgcggtggctcacgcctgtaatcccaacactttgggcggatcacgaggtcaggagatccagaccatcctggctaacacagtgaaaccctgtctctactgaaaatacaaaaaaattagctgggcgtggtggcgagcgcctgtagtcccagttactcgcgacgctgaagcaggagaatggcgggagcccgggaggcggagcttgcagtgagccgagatcgcgccactgcactccagcctgggtgacaaagcgagactccgtctcaaaaaataaaatgacataaagttaacaaaaataagatatttctaacaattatacttttaacaatgtcttatggcctatgggctgtctccttcattagaagaatttgtgtagaaaatcactgtaaatctgagataatatagaatagatttcctatggtaggaagggatcctgtatttggtgatctcaaacgccttttcaatactgaccttctagaggggaaaggcaatttacaatttgaaacattttgcagattggagtggaaaagtgacaagtaacattgaaatgcctaatttcaactttagacatttttgaaatgaaaaaaaatgtaagtccagagacttaaaatgatcaagaatacagccgactcaaatttcctgaagcctagtccggtcctttcccttccggtagagacagaatagtttggtgggtaaaagtgtctgggtttgaatttaagttaggagcacctcctgtttctagacttccctgtgcctcagtttcctcatctataaaaaatctggggcgggtgcggtggctcactcctgtaatcccagcactttgggaggccaaggagggcggatcacgaggtcaggagatccagaccatcctggctaacacagtgaaacctggtctctactaaaaaatacaaaaaaattagctgggcgtggtggggggcacctgtagtcccagctactcgggaggctgaggcaggagaatggcatgaacccgggaggtggagcttgcagtgagccgagattgcgccactgcactccagccagggccacagagcaagaagctgtctcaaaaaaaaaaaaaaaaaaaaagaaaagaaaaaaaaaattctgaagccctgttacatagaaaaatatcatttgtaaaaacttaaccgtacttacaatgttgctgagagaattgagcacttcaatatatatgaagccgtcagccagtacccgaaatatgtgagaaatcggtatttcctactcttcatacactgtgtatatatacacagacacgtatatatggtaattttggtatttcaattttggcttccgtgtgtacacacacacatacacttggaatgaggggtgggggtagggagggatgtcaaaggttattccggtttatttttttattttcatgttatcttagtaccttcagaagtcactcatcagggtcttcaacattcaatatgatttactaaaaattccatgaatcagtgagaaaaaatagaaccctttataatttcccccatttaaaaggtgacacatttttacatgtgaattaatgctgacctttttatttagagtttaataatatttaatttagtttgtggaaactgatcaattttgttatatagttttccaccttaagaccatctagattgggccataagcatatttctattcattttagaaacaataatcactatactaaaatgtttgtttcccttttgtgtgtatccttaactttagaagattaaaaagatgttcgagaacgtttaccccagtgttactatagcctggctcttaatcacaccaatagaaatgctgacatgtacatgaacttttctgtcatgtgtgcaggaatgggcacagatagagtctgcaccttttacagaaaaagccttagatgacttatgcctctggaaatgtactcttcattttaaaagacatttcttctaagtcttctttaaatgtcttctgtgtgatttatctccccaatttccaaacattctaaatactgaaagacgaaaatctcaaaatgtatttatttggaatggtaaagaataccatgggaactttttctgtctttttgaatgtattttattgtgacagctttttcagatcttgtagtgatccatggatagaatccctcacatacaattccatgacctcgtaattccatggcgttacttacatttttaaagtataactgcattgagaaaggtgagctgagagcaggcaacttactttctcctgccatacagaaacagccagtgggctcagctgccagggaacacaggtggataatccctgtgctttctgggcagcatggccaaagcactgttgtctttaatgccacagaggtccaaaatacagttttatgtcctccaattcccagagagaaattcctgtcagtctactcacatgatttttaggctcaggaaattctctctagcaaaagatacaatcctctcatatagtaagtgttatggttgcaatggggcttgtcaagggatttgtctgcattaataaaggtattccctggggtagtgggaaaacgtctcattgttgagcagagaccatcaccactttatgtatatttaataataatgctgttcctgagctttcaaaaatcaacaaatttaaaattctgaaattgtagactgctattaatatttttgtattatatgtgctatgcctaatcccagcgaccttcctcatagtattcatgttttggtttgtttggtttttttctgcatctggaagaggaaacacatataaccacacatgtgtgtgcaaatacgcatataaatgcagcagaattatccactggcagccatatttgccaaactaattaaagagaatagcgtattaacatgcacaccgtaaagcaaactccattctctgtagagcattctctcactgagatacaaggactttatctttgcacagtgggtctgaactaattgagatgtcttaaaaaacaagtcagttaagaaggttgaggcgacggatgttgttgcagaattgtcagtttgcaagaaaacattctttggaaaaaaatacagcccccggttgcaaatctaatcagtggcgggtatgggaggtggggaagagagcatagagagaaaaaaacatgtctcaaagagaaaaaaagagcaagaccctaattgaaatgggaagcattctcattttagaaaatgttttcttaacagattgctttagccctctgccttaaggtttttgattaaattaatgatgggagtgataagctccattagtgttgctgtttccagagggaaattgtctacagcctactcttttccttccttccccaaatctcaggtatgacaatagaattgctaattgagaccataacatgccaagaagatgaacttaatattactatgcaaatgcagacaatccaggaaattaatatttcatgtgtgcctacctaaacgagtaacgtttccattatgggcttggtgtcactcagctgggaagctgttgctgcagcttgttgtcgtcagtgaggtcttgaacttctcttttttgtttcatgttgcctgctgtcttgggaccagtcagcacatctgacatgtgctctgttggcccttgctgttaccacagatcttttgctagtgcaaataaatgaagttgttatgatccataggacattatcaacttgatttcctgtcttagtagtaaagtattagagaaagaaaagcagctaagtcttcgataataaagaggaaaaaatatgtcagtaaaatgaaccataaaatccataataggagatatgatggggacttttccatgcaacataattagcagactgagtgctctcaaaaacacagtaagaagagtgttactttgagggcctgaaatagttatagtaaattattcataaacgtgtgtttgtcaaacatgattatatttcataatctgatgagaactattgtgttaacaattagcagtgtgtgtgtgtgtgtgtgtgtgtaaaagagagtgtatagtaggagtatgaagcaatcttggttttaacattctgattcttgttttgaatgaaatatcaaataatagatatctccttaagagcagaaaccaaaacaaatctttgaaaaaaaaaaaatctaccatagtacctgaaagaacaacaagcattcaaatagatgttcgataaatatgttggatataatttatttttacttttccaattttgttgaaaaatagatgtatcctagaaatgaagggtggcaatgtaggccagagaacagtgggcttattggggtctcccctgttctctcttatgctgtctgtctgcatggccaacctttatgaagaataaactacagttatactacagctattctatagtaaagaaacttttagaggaactagagtcataaaaatctgttccaaaaagatcacatggaagtgattctgatgtaaaattttgaggatccagtataatttgtttggatagaaatgactggagaggggattttaggttgaaaatacatgtctaataatggagaaggggagaagtcttggtcctatttgcccagatggagtgaaaaagctgaacaagaacattctagagattgaagataggattcttagagaacaggtcccaaattttaaattctaataggtagcagatctggaattaaatgccaggaaggccttggttttaggcttcataatcttaagtgctaatcccatgattttatagaatttgatcaaagcagcttttgtccttatttagtggaaacttttcttcattataaagttatgcctcttttaaaatgtaacctggattatttatatttcccttttctagtccttctttgagtctcatgtatcttttccatgtcacccacagtgatggtgtattcagccacagatgccccctgtgaaagataagataatgttttctacctttttattgaaaccagtttttcgttgaaattgtttactcttataggtcattgttgtaaaatctaaaaggcaattccatttaaaagaaggaaaacaaatggactaatgagtttaggccaatttagaactctaaaaaatattttatatattttagcatatgcatcaataaaacatagttgcataaggttttattgggacatatttatcaattcccttttaaaaataaaagagtgtaagggctaataactagaacaaattagatttgttaaatctctagacttatgaaaatattgattattttattatgtgtccccattgacacaaatatgtctagcattctcaatgaaattgcttacacagtagactaaaccttcctggattttatattagacatgaatgtaacaacaaaaaataacaagaattagaacctaaagttactgtcttggtacttgttcaatgagctttcatcatattttggagggaataggtggataatattttccaataaaacgtttaacctgatccatcgtttttcaaacacacagtaagtgtagaataaattaacacatactaattgcttatggatgctttgttttcgcatctgattataggtattcatacttaagacatctcaagaggaaatgttgataatgtcatttctttgtaataaaaagacagaccatcaaaattgtggaagtattgtgttataagatatttttaaacataaaaagccattgtaaaaaatatccatcctgtctatttctgtaagaacatctgagctattccgagcttacattttaggagttaagttctagaggccaatgatcctttgtttggggtattgaatattatctagtatatccagtacaggtttaagagtagttgctattttataaatgttcaacatggaccagaaaagcatcagtctataaatggattccttgggcccagagctctgacagaagaaaagtttgagtgtttgggggtagtggggtggtgactgcattactatattactgcagcatttctggtttatgtacagtagcactcaataaatatatgtttactttaattgagtaggcataaatagcattcaccagaaatcctttgctggcagccagctgcatttgactgctgagagccatagcatatcctctctgaagttggagggaacacaatctcttttcagtgttcaccttttctcaaaaagccagaagatcaattatgatttctttatgttcacaggtaaaatggtttaacagaaagtaaatttcatattatcataaagaacccatgggcaaaaaggcaaatggagtaaaatgctaggttttatgacagttattagagaattcttaagggtttttatctattttaaacattaagaattacttttttccatatatgttgacattatggggttaccttatcatcttaacttccctgatacaaaactgaggaagcttggtggtatacttagagaccaacaaaagaaccacctggggataatctttctccatctccacccatcatttaacaccaatttgatatcagtgtttcagctgttcgaatactgacttatctaaggaagtctatatttttgtttatattatttcaattctaaatatctctttatgggaaaaaataagagatgcttaaatattgaagatcatcgtgtctcatctaatgaggtggatcttccagaatcagactaaaggcagatatacagaaagtgagcaccaggaaaacattctgaagtcggggcaggaggcaggggaagggcagaacagaggaggaggaatggagttcgtcctagactttgggctgcacatgtgctgtgagaaattggtattggcccctgattgtgatgaagaacagggacttctctgtaattgtttatcatctttctaaagaaagttggatatttttttattaccactgaaagcttcacatgttctatgtaatggctagaggtatttgataacatgttttctatttttctttttctagtttttaaatagatggtcaggagtcagagaggcatggacagctggtgcttactcagtaaatgatattcatgttattatagtaaaaagtaggcctcaagttactataaatattatacttctcaaccccagaatggcatccctattcaaatatacattttagatcacagcatgattacttgtaatacattttgttttcatcatttctttcttaattttgtttcttaaaattcctaaccacatttagtctaaaaattgcttaaaagataatgtaacacttctcctggtttacaaaaattgtcaatgaatcaaagtgaaaaacctcttgtcatcgcgtttctaatgaaacttgtataattttagaattgaacattgaaagagaacaataatcacaaactgatatttcaaagaaaaatgcaattgctttgaaatgtaaattattcactatagcaagactaaggctgtgaaaatatgagtctaaagtcctggaggttaggtcctcactgctccttcacctaagtggaggaattgtccctaagatgaatttggaagaagcaacccattctaaaaacagttccccaatgactttttgctcattcgctaacctactatcacaccacatggaagaaggagtcaccataaagtttctaatcacttcttgagaccattaattgccttaatatatcagtaagtcattttctttggaacaaaatacagcaagagtctaactgatgctcagagggacaggagtaaaggtgcaggaaaggaagcacaggaaaatgaatttcaattgctttgtattatctgtgttcatatatagttgttttaattgtgtttgagaacagatcaaaggagaagaaagaattgatgtggtgatgataaacaacagcaaccacatttttagttggacttggcacgatgtcagaagcatacacgcagtcctatgtgtgcacactcacctactcacctactcattccctttgtgcctgcccccgttccttcctgccttggctctgcctcatacataatcatcttatgcataaggaaatacaactatgaaatgttatgtcaattatagagattttatgtattgctaattagcttaggaactgaagatgcttgcctccttttttccctaaattggtttttaatcaatctgaacagcatcccaaggaaacattttgaaagagaattacaaaatggtcatcaggaagatttttcctactcactaaatgtgaaaatcactatgcaacaagtgcatgatgtcaaatactagaagtttattaataatgataataacaatataggtcaaagagctctgtgcgtgtggagacatatttaaaacaaatgattaaacttaatgcacattcaggacttacggggctaatatctgtgaaaagatttattaaatctccacctggcaaaatcatttccatgtgcagttcattttccggtgtgccattgaagctctaagtcttcatactgcagagatcccgacggcactcattttgaaatgtattaaaaatatatgtaagagcaagaaaagcatatggagttcattcagcccagttttttgttcaacaaacttggatttaaatcttgcttctcacacttaccttgggcatgttccttggcccccttttctccccagtaagagaattgtcatagaatctaccttataaggctattccaagaattaaatgagactacagacttgtcactctttaaatttctggaccagaagtgagctatcataagcattcagtagctctaatatatgcattcagtaaatctttgttgagtgtttacctggtgacaggatgggcactctgctagctgtagggtcctttcaaacagctttacattgcacacgctattaaattctgactttttcaagaagtacaagctatttaattatatcaggtatttggttctgctgctctgtgatttggacatggcatgtggacattttgataatgataccatagaagttttgaaagtgaaagcatatttttgcaatgctgataaaagcatatttatgtgaactggatctaactgtcctaattgtccgaatgtctccatttaacctgaatcaaataatacctgtttttcactttcacatattatttttctttctacctcctagccagagaattcatgtcgcacttaatatgacagcagaggagtgccatcatacccgcacccttctcccctcacttttttctttgagactttatgctagtcactgtccccaagatactccctactgttccactcagttcctacaggctaatactgttcaaggatgaactgaggaatgaacctgtcttaaactaaactttctagttctttagggaagctacagtgcacatcacgatgtaagcacttcctcactctaaaaattcttatttagcctgtattctttccaaactcttagtctagtccctaaagtaatactgacagatgtttccttggtctctgctgaccagccagcccattctgtaaaataagcacttaaaggttcttcctcacatgggcttaaatctttctactttccattctccagctatttgtctgccctccgaacattcacaaataaatgtattccaaagactcccttcccttgcttattttttcaattttatcttaacatgcccatttccatcacgttttatatgatctgattagctttgaagttggggattgggggatgagaggagacataattgtctttcagttattgccagagtgaaaaaaaaaacaacaattttaaaaagtgactttcaaggcacttgaaatgtggtctcaaagtaaagatctttgtttagaatgataggatcattcttagggttgccatttaacgcctgtactttctgaatttaagcaataaacctactctagttattccatactttctaatttactcatcatggatgagtaaattatagcaatccacgaaggttgctaaccatcaagttgttttgggaatgagttctgatgcatataataaccctattttaaaaatcaaactttacaaaaatgagtcatcaaacttacgaaaaccagacagttgaccttatgaatagtgtgtaaatagtgaccagagacaagaaaagtggcacataaacaaccctcaataaatatcaactcaatcattaaatgattttcatctacttgccttttttgtttgcttctttggttggttttcttaaggacaactccaagagtttgctatgaatcatctgatccctcctctgagatttggtttcagaaagccacgttagggataggaagctgtagggttttgttttgttttttttttaacaattttaatgatatcttttgctgagctacttgaggatcactgccctcttgtatttgggaactttgaagtagaaagctgtgactaaaagaagaaagtaggagggtgccaataaatgtagactatgttgagacaaatattaatggcaaatgaaacttttgcatgcctagaattttagaaaattatttacttggttcttttacatgcatgcttctggtgatccctttaagagttaaaggagtctgtgacagctctggctaaagtatccagaagacaagaaaagaaagaaatccttggctgcgatggcccaggctcaaatggatttataatcaagggagaggcttacagttatatgaatttaatatgatgagtaaatattattgtactgaagatttggattttatcttatttcccacttgtaaaagaaaggtcacaataatctccaaaattcttttcttcatcttttcagcataattatccagatcattttctctccttcactgcactgtataacctccttgaagaaaatgtgtttaagttcaaagacattttcctgaacctgaataaattacctcaaaatagtaggttatgggtttctgcctctcattaacatcatgtggataaggttataggcattaatatcctcatatagaggagaatttactttaaatgtacgtgtatattttattagaatagaatgtggactaagggttagagaaagctgacatcacgaagtgttcacatccctgtggccacacagtaataagctctgtgttcatgttaaatacaaaaacagcttggtctaaggaccttcgttgctaggtattttctttatactctgcttttgccatcatctgccaataaattcaggtaagacctcccattgcctaacagaatttaaatcactgctgacaggcttcacaggaaagccacccgagtggcctactcagcttgtgtctggggacactggcaagccacccgggaggtgttggcagcatagagtggcctttgtaggaagtgtagacccttggacccttgcttaatttcttcgtcagtatgaccctccatcttcttttttcttatctgctcttttttggtaactttctctctctaccagacctattttttgtgggggggaggtggggaaaaggggaaggaaagggcagaaactgcaacaggaaatttaaggggattccaaatatctgataaaagaacctctccttaatttcagatttacttaccaaccatttgagctattgaataaattaacctggtgtgatatttgggggtaacacatacatctgatcaaagagaaattggtagttgcccatgtgcctccactatttaataagatactgacatatttggctctgcatttggatctgagtgcaaattatggaacagcttttctttgatggtaaagacacaaccttcccatttgcaggctgtctcttgcatagaaaaggacaaccagggagctgttctgcagctaatttgacacctgtacatttgcagggtgtgcagtagggagctgtgtagccagatgacccaggtagctgctatagaatatttatgttcttctgctttcttggctgttgcagggacttgcaaataggctacgcggaaatggtttcaactagttgagagaaacatgtttttaatgaacaagtgttattatttggaaaggaacaaaaatgaggtagaacacagtcccagaaaacactttccgcagtctgtgtagctttcaaaccttcatttccaccactgggaagatgaattcagttgattattctgaatcgtattatattcaataaagtgcaaaggtaataagaccctccatacaaatgtggcataatcagaataattagatgttagatgatgcctggatgatgagcttgatgaatggcaattctgaaagggagtttggccttctgtaggagattgctggcagccaggccccaccatgggtgggccttgagaaagcaaggctgaggaggcagcagggaaatataggtcagcactcttgtgggcatctccagagagctaggaaaatcctgcttgcgttgcatttacagtgctatgagagatcctggaagcagaggaggagaggccactgcagaaaactgaccagggtttgcctcaggattatgaaagcaaattataactccaacaaatcaaggaaagctgtaaatcaggaggttggaatgtggcaagggctttggcatatgagtttggggaactgagtgtggtaaagagggaaggtgagtttatcagagggtcacatgggattcattctttgcttaccaatatgttttgtacctgtgaaataaaaaatttccctcttgacttttgttcaattcgcagaagtgaaggaagtcgagagagaatcctgggtatgtagatggaaagtaagtactcatgccagggaaaattaggaagctgacaaagttgctttaatccttctctactgttcctgtccatgccagcctcacccttttgctacctggcctttctcttaccacctatttcttgcaacgtatgctctcccattctttctgttgacagcgggaacccaaaaactacttcagggtcagttggtgactcattgtgttaactctcacaagaatatttacatattaattgtcttacatgaataaggcaataaatcatgtatgaaataaattgtaaatggtagattttcaggcatcagtaatttttttgtgggggagacaattgacttcacactgtttctcatatcataccaaatctggtgacttctcagtgtattcttaatatattcatttatccaacaaacatctatcgagtgtccatgattctgtgtcaggcacagctctcaatacttgaaaaacaacctcaagataaaggtcagttccttcaaggagcttccagtctaggattggaggggacctaacatgagattgccatcaagtgtgagaaaagaaaagcagggtccttggaaacctcccctggcacagctgtgccacacagaaggtgttcagggggcacattcttcatggaaaatacaatattaatatgagattggaattttgtgtggagcgatattaacgtggtgaagaggattgagaagggtagtttggagaagatggagaaacaggtacgaacattaaaaggcttaaagcagcacactctggagaattacaagtcagttggcatgacttgaatgtgagtgttgaggaagagaggagtaatgaccagagatgagatgaagaagctcacgcaggacactatgccaaccaggaagtgggcatttatattgtaaagaaataggtcagatttaaagcagacactgacatgactagaattaggttttaggaaaaaaaaaaaaaaacattccacagcattatggagaagtggtgggagagagtgatgacaagaggccagggaaggccacttaggagactctggcagttgttaggcaagaaatgagaaggtccttaacgaagacagtagcagtggatacaggcaggagagggccggttggagggaacacaatgactagtctgagatccagttacccctgctgaaatccatcagaaaagtttcaagttaataattaactgtattctcctaaatatcacttagccaactagtatgattttaaatttacaaagaaaagagattgcgatccaatttatgaatttctaatctgcctaatttcctccagtgaaatgcaagtttgtactgcagtatgtgaattatttaaaatacatgcacttttcctgtagtgtgcagatttacggttggatacaaaacagcctgatgctaaacatatgtgaacattcatttttgaaaatcaggaaaccagagagttactatttcctgcaggaacttctaaaagaaaccaaaaaagtaacataatgtgccagaaagctcaagggaatggataaagtaaattgcaaggttgggaaatgtggccacccaaaagaagataactttctctttaaaattctgcactatgtacccctaatcagataggctgagtgacttacagaggatcctttgtggacatctgagggttttttttgccccctagaccaaaaacataaatcttgttcctctaataaagacgtttcaggcagaaagttatgatagtatactcaatatcttaaagttagatatgccaagacattggaagacatccatcttccctgtcctggtcattctctggtttgtcccgaggggctgtggcatgtgttttctttgaaattttcaataacagataagaaaataatttcttttggatcatcagcttcccctgctgaactcctgctaggttgacttgtagagacaattaaaccaagcatttgccagtttaggtggacattgttattgcagcatttgtccctttcctgacaaattacattattcctctgccctccaaaccattagaaggtccagagggaaccaggtggtggtgaggaggggctgatctcacatttgtcaaccctgaggcagagctaggctgagtgtccaactccctttgattctgtacactgggcgagcagggtgggggcttgattggggtaggatccacatttgaatgctgtcatttgcttctgagcagaaggccatcatctctagtgttcagagtgaatgtgatgcccccagatctgttcaataattgccctgatttctgcctgaggcttgactttcttctagctaaacgctgcatcccctaacactctcccccagtactaacaaagtggctctttcattctgctctgggcggtagcagcatcttttgcctgcacttcagctctgagtctgattcagcatcacaaacttccctttgtgagcatctctgactccaccctcttctcttcctcactgaaaaataatggggtattttagtgaacgctgaaacatctgttgaattctaaagaagaggtggagtcttaaataaatgtgcataagtaagagaaggcaggtaaccccttgggtgaaatccatttgtcttttttccttttttcttttcattaatgagactgggacctagtaggaggtatcatgcatttagagtggtacagggacattacaacccagtggattagggctggttttaggaacatgcagatataattaagaggtgcatcagtccaggacaacagtgcctaacttctctgaaaatcagcggtgtcatctgcaaagaagaaggagtaataccctccttacaggctggggtacaagtattatataatacatagtaaggtactaacatggcatgctaaacaccccaaaatcactagcagtcactattttcattgccatggttgattttctgcttacactgtgatcatctactataagagggtagagccatcagcccactgggagattgggtgtggaaacattggtttaacgttaagtcagctgagctacacaaagcccctcattgatgtcaggccagccctaggcgcacatagaggcatacaagagcagcactgcttatgccctgacagacattagcctcttgtgacaggtgaggaatggagcagagcagatcctcaaacaagtcaagaaatagatagaatgcttgtgaatgcaatgaagaggagaaaggactgagatagggaatggtgggcagagtgggtgcttgatttagtttgcctggtcaatgagggcctgtccaagagacatatcccccaactggactcatagaggatattttttttcagtaccaaaaaattgtgcccaccttcactaagtagttgtacttttaatatccattgatttgaggatacataaagataaaaggcaattgtgaatgcaatagaaagcttttacacaagtgtgtattttattcatcagagcaacattaatgcacatttgaaaaatagagttatacatatgtgtaggatatattcttgattccttctgaagataatgctggatttgaatttggagttaagaatgtggacattttaaccttatcctgagtcccttgaactgtttgatgtctgcaggttgggagtgatggatgagagtgcaaagattagacaggaaatacaagagtcctgagtcatattttcattttttttcctaaagataaacaaagagcaaagaagtcatttacctcctttgagtcttttttgtcattggaatgagaatagtaatgcttgttatttaacctcctaatgattgtgtgaggtggaactaatctgatagataggaaagttcttgcaaagcgttttgaactatgtgaggataaagcattgacagtggcttgaaataagagaatcaaataatctagaatataagtcaattgttatttaaaaaaactaacttgtcaaactgtgtacttcacctgcctctttgtaaattcggatcatgggtagctctgctagcattggctatctcagtctgttcatttctctaaatgatgtgggtgtgagtcaaatcataggctcccaagtgaaagggggtattattctcaaccctctaatcttcaggaaggttattccatgttatacttaaggttatacttacatgctgtagatcacccttatctcatatttgaagagaaatgtctttctgtctttaaaaatctctcttgtatatattttctgctctcttgtgtataatgtaaacccagaaataaatttttacacatttttatattagaaatatttcagtgccctaagcacaaatatttcagtgtattgaaaggccaaacttgattctctttcttattaaacggttcagtgttcagttagtatatatcaaataatactgactgtgctgctttttaatacttggtaacaaatgctttactattgagagaggaagatttcccttagaaatctaacatacagaagatgagcaattcaaaaagattctatagttcatcatgttttaatattttatatttagaatgattgactccaaagacaaaagcactaatgaaaacagactgaatgcatttatgtgatacagaacagaaaaggaaagttgcaggtgaaaaattttggtatcttatagacagagaattttagctagacaatcagaagtattttcatttcacagaagtctcaaaaatacttccagccatttaaagcacatagtagattagatatttcagaagcatctgaatatcctatgacaatgaaatatgcttgctgcattttgtattcaatttttataaaaatctgctttgaagtctttattgaattaacaatttattttaaaatgaatgtatttaacaatacattaacaacataatggaattactttaatttatagattaagtaaatgtgtaatatatttttaccataatagtaaaacatgacattttaaaaagccaaataattccttactaactgctgagcaacccacttacttttgactctaatcatttcttctggtttttacccaggtattcctaagtaaagtgtttattctattattcttaacatttttagccatctgtgattgactttcaactattgcaaattgcaatttcaccctgttatgagccctttttccattccatatgctcccctctcctagctgcccaatacagtaatataacgccttttggataaattagcattaagtgtttacagcctcttggttgtacaaatgttatttgaaggtgaatcatcatattaatttatttactttcttgtatgacttcttgttttaattgaagttaataacttgtctctttgtgcctctctctctctcctcatccttagatttctacatactaaaattaatgtatccctaagtgcttccataaaattccagaaaaactacacacatcatgtaatttgtctgtttctctttggatgcaatccttctggagacccctgccctttgtctcagctgagcatgattggttttagcttcaggaatgttgaacaagtgaggtgtccacctgcgatttctctgcccactgccctgcctctaccctctcacttttactgtacaccctcccgcttgaaattcctcacatcccattgtatgttttactccccacagctggtgaaacataccctttagcatcttcctcaaaatgaataagtaggtaaaattttagtgccctcgtatcccaaaaaacacctttattctcttcatatagtcaatcgatactgtgctgcatataaaattctagataagagctttataatctaaaactttagcttttaataactcatcttattttcatattcagtgtttttgacaaccttaatctgctattgtctactctcccattctctttgttctagtgtttgtagcttttctatttcttcactggaattggggatttcaggagcaaagtacaatcatttttgtataatcaataacttatacctccttcttgaagcccctaaaaatgtccatttaacattatgtctgttaagtttgccatctataaccactgaattattttgattttaaaggcaaatgtttgcatttttgagtgagcatatttttaaatcatgaaattgttgaaaatatagtttgaagtgaactagcttttgaaaaatatataaattgctttttcttaacattttgaaaccttaagatttgaatctgaatttaattctccagaagcatataatgcacttatttctcagtctttgatttgctctataaattatactcagaaatttaaacttggaaataaagaatgagtaaacgttgttaatgaagtagagtggcttaagggactgacggtgaaagaaatcaggggttttgacctagttttgttatacaacctatttttttgccatgtactgataaatttggactgtgaatcaagtctgccctagttgcatcccatataagccctgcctaaactacagttgtcaggtttcattttagagaaatgaaatcagggatggacctaatggaatcaaacaataacttttcagatgatgtcaaggtctttgaaaatcctgccacggtacctatggatcatggcaccatctccaggaagcccatgctgtataatgcagaacattaactggaggggagggcactgctcacccaacccaacattagtgcagatgaagcactgctacagatgggaagcagaacactgaaaagcagggacatgggaaacaggaccagtaatttggtttttcatgtcaggatgaagtgagaagtcatggtattgaggagtcaagaaatattgaaatcatacctttacctagcataaaagtcgatttgttcctgtttttttcagtcctcgtgacattaaagcagtgatctcaattttttgctagtgccacggaaaactcctaacatttgttaatcttcatttttaacaaacagagacgccttggacccctggcctctggcaagcaaaagaatctaagtaaatgatgaaacagagttgtatgttcatttcacattatggtaacctattgatgacagttgattctgatttccatttactgtgatgacatacagtttcctcttataataaatgtgctcagtaaaaacattaatacatttcaaagaaaatattcacaaataatagtaaaggcagtgagaaaatatatcagaaattgtgagcctggtgcacacacagctaacgtgtgggaagttcaggcacgcagcaataaaacaggagacctggacttcggttctgtccatggcaaatatatgacctgggcagttcatgtaacttttatttgcttctacttcctcatctaaaatgaggagtcagctcagatctcttaataaaccccttatatttcttaaatgttgagatttcaaggattttctttgcgcttaatataggcacaggttgttttgggttcgcagcaactagcaaggaggaaaagatcatgaagcagctgatgataaccacccaggtcatccccctgaggatcactggaatgatagaataacagactaactgtctcatagagctttagagcttatagtgaaaaggaagagctctttgattcccctcacagggccacaagacgtgtgacagaggtgtggctcacctgttcagtgctcccaccactcaaaccccttccgtgagggggagtatgcagatgggcacatgtagaggccggggcgagtactttgggctccagctctgcagtagtgtctaggggtgggtgcctgcaacccgagagttacaaagctctttcacctttgctgtcctcagatggcttgaatgttaacgggctcaatggacgctctgcctttttgcaagagcagagggccaatatgatgctttctgtaccccaagctcttgtccagcatcccggaagattcgggtcacacactcgaagaatgaatgcaaggttttattgagcagtggaggtagatttcagcaggatggatgggaagctggaaggggggcatggagtgggaaagtgatcccccacaggagtcgggcctcccactggctaaactcctcttcaactgcccccagccagactcctctcggcgttcagatcttcctccttttctccctttctctgccacgttgttccaccatccatctgctgatctgctggcttgctgctctgctccgaagtttggggttcagggtttatatgggtgcaggatagagggcatggtgggccaaatggcaactttttgggtacaaaaccagaaattcctgttctcatttagggccgcagatatacaggcttgagggtgaagcctttgccagagaaccaccctcttgtatctgtatttccctgtgtcctgtccacatcagtagcactcttagagatcattaagatgaattctccctgccaacactcatttaataaatgagaaaacaagtgtcccagagaacgtatgtggcccattattatacagttgaatagtaacaggcaaaaaactatttatatccatgggctttggcctagaaccctggctccactttggttctcttcattgcatatcattatggccttggaatatgattttcctgaccttataatgcttttaaaaagggagagcgatacctgggtgctgatttttttttaatccagtactttcagaaatgaaatgagtttcatcaataccagcagctaatcaaaataactcagggctacttttgtttctgacatactttgggtagttttgtccaaaaatattctatttccctttgatggttagatctaactgaaatgtgggatatacctggacctctccccaagaacgttgtgaaaataagcagcaattataaatggcttaagaattgtatacagttgcattattaatttatgttttttgtccattggtgatataaaataaaagcgattcttttcaaaaaaaatggaagagaagaaagtttacatgctttttggtttttccctcccaggcctttagagtctattgactgttcatcaatttaattattgtgttatgtatgtctaatgtactcaccacacaggaggctaagtagtttccttcccccaaggtagctttcaatggctggaaaacgatccatctgtgagccacactggcctcttcggaaataccctcctattgattacaagagagaattgtaaaagattattcaagagacactactgaggaaacatatcagtgttactttaattatgacctaaagcaaattcttgaaacaaggattgaacaagatccacagagcaccgaagaactgtgcagtggatgagtaagccagatagagatggacaaagaccagaggagatgcacttgggaaatggtaatccatctgtagctgctacgaatatggaaaacatctatttattttatttcaataataaaggtattatatttaaaatatttacaatggctcccaaagtggggcaaggttttgaaaagtagcagaaataaagtgaaagtattagcaggtatttattgagtactattgacttccctgaaatgaaactttcagtggcctcctgctgtctatcaaatgaaaagccttcttgtcatctccacactgagctggttcccaagtgtgactcccagctactgagcagcagcggggttccagctcacctgtcctgttcaagaacatgcccgagattgctctaccaacatgagtttgctcaggctgtttcttcaaatgttcttctcccagcagattccagtttctgcctttgggatttcaataatactcagaggcttatttcatggccttactctgaaaagcctctcctgattatctcaagtagatgcaagctttttctctttttttatttttattgcctaccacacttattccttgttctacttagtaattactggcccacgtgtctaattttctctttcttcccccaagactgtgaagttcttgacatcctatggaacatagcagtaatttatactcatcaaattgaaaagatatcttaaacaccttacaatgtatttttaaagaaatagtatctcatacatgaaaaagtgaatcactgaaaattcagatcactgttaggaccatagaagaaatgtctcaaagagacttattagtttcttaatttagaataaagggagcaatctctttagactaggggactctaaagaaattgctgccaaggaactaggatttaaaatagatttagaaaggtttagctaattgcagataataatctagagaaatggcatgggctaaagtgtagaggaggaaagtataggctgcaatcaagagacatagttgctaaatgtgtgttatagcatatttatatagtgatagagggttgctatagcttgcaaaatatttttctttatattatatgtgtcctcaaatactaccctgtaacactaaggtgccataatgttttaaggccctctgggattatctgtttattcttctctcctatttatctgtgtgatcagaaacagagggaaccattattatgcacttttattcccctcaaggctaagcactttttaaataaataaacaaatggagaatgattgtgctgattatacaaaataagtccctgagagaagtgtgcttgatcacagagcccacacttaaacataaggcttccttgtctgtccagtgcttctagcatgctaggacagcaggcctaggcagaagagagaaatctgaaaatgtacatctgatgaatatgataaatagggtagcagccatttaaaaattagaaccaatggagtaaaacagatgatatctaagatgtataatggcatcaattagaaggcattctgaaaaaaattacaagtaggtagaagtggatttaaatgaagatattgtattagtagcattacatttcacaaaatgaataaaactacaaatgatacatctttagaaacagcttttagacaaaaactagataattgatatgtgaaattgcatgaagacaggagaagcagcattttgccaatctctctagtaataaccactgtccacatcttcaagaaccacagtaagataccactttcgaaaaggcatccttgacacattccacattccattgtactgtaatatctcttgagctttcaattagaaatctgtattgtttgattgtcagctatgcatctggggattacaaaggtgaataaaatattgtccctggcctcctcccagagggaagtatatcacacaactctgctcggatccactgagtctcacctccttcgggctctgggctacttgttatgccccaagtaggggctctgactcagcttctcagggttagactgaaaatatcacgaagaggcgctgaacatatatgttgagttcttaggattattacccaatctgtattaaattactggggtgaggcacagtggctcactcctttaatgccagcacgttgggagaccaaagtgggaggattacttgcccagcagttcaagaccaacctgggcaacatattaagccctcatcactgcaaaaagctacaaaaaaaccttagcctggcacagtggtgcactcctgtagtcccagctactcaggaggctaaattgggagaatcacttgagcctacgagttcaaggctgctgcagtgagccatcatcacagcactgcactacagcctgggtgacaaagtgagactctgtctcaaaaaaataaaaaaataaaaataataaaaataggaataaatacattattagctcctatgttttgctcacagctttaatacccccctgaagttcccctaatttatgcctcctgtattgcacatggtaggcactctactaagaacaaattgaagcttccaaattaacaaaatatattgaataaaaaagaaaaatacctcaaatgttatatctcaaggacaaaaagtatttcttttagtgagaaaatcgtctcaaatataaaaataaaaagagaataccttaacatccaaaaactcagtcgttaaaataaaagaaaatgagaatatcaatgaagaaagaatccgtttgctggcaatttggctccatatgtgatttggcagctgtattagtttcctactcccctgtaatatttaccacaaaattagcagctgaaaacatccatttattatctcacagttcctgtgaattacgtgaccaggcagggcttacctgggtctcacaggctgcaatgcagctgttggtcaggggcacatcctcattcgaggctcaacccagggtggagttggggactggaaggttgatccacttctaggccacctcaggttgtttgcagaattcatctcattgtgggccgggcgcggtggctcacgcctgtaatcccagcactctgggagaccgaggcgagtggatcctgaggtcaggagattgagaccatcctggctaacacggtgaaaccccgtctctactaaaaatacaaaaattagctgggcgtggtggcgggcacctgtagtcccagctactcggcaggctgaggcaggaaaatggcatgaaactgggaggcggagcttgcagtgagccgagatcgtgccactgcactcagcctgggtgacagaacgagactccgtctcaaaaaaaaaaaaaaaaaaaaaaaaaaagaattcatctcactgtggctgtggaactacgggccacattttctcgctggctgtgatcaaggtctgctctgagctcccacaggctccttgacatttctcctctctcagaatatagcagcttacttcttcaaagccagcaaggtataatgtaacctaatgatgggaaagacattatgtcacctttgccagattctgttagttagaagcaagtcacaggctccttctgcacgcaaagagaggggatgatgtaactcattattacctgcttagaatgtgttcaccgtgacaatgttgtccactacagtctatatatatgcaaatgattggctacctttatctataacaatgtcagaaacaaagtctaatgactgggaagttgaccattatttcaagatatattcctgtgaatatatgaaggcattgtgctcaattaggggtaaacagtggagatgcagtccctatagctgtaaagcatagtctaatggggaagactaacatgaaagacaaacaaacaaaaatcctactcccatacataattagtttctaataagtactgaggaggaaaggagcagggttctaagaaaatgactaatgaggaaaatccactctggtgctataaaagagaataagaaaaagtactttgaagttggtgatcagggcatgcttccctaaagaaatgtcatttgactacctaaagaatgcctagaagttattcaagaggaagaaaacttgaggtagagtgaacacaagagcaaaggccctgaggcaggaacaattaggtctttcggagaaaatggaaaaataccagtgtaaatagagaatatgccctgtggatagataaaagtggggagataggaaggggattcaggccatcatgaggattttacatttatcctaactgcatgggaatccattgaagagttttatgcaagggactgacataatccaatttgaaaatcactaaaggagaaacaatcttttgcatttttaaaaatcctcattaacttgaaagggttcttgcctcttgtatgtagtgtgatgcttttttgtggagttgttgacagtatttcccaggtagtctctagggaagacactgccgaaattaaagtaattggtatttaatcatgtcttagttaacatttttagaatactgcttttagcatgatacttcttcctatgtcatttttttgtcctttttaaaactagtgattgcatttttattttagggacttaaaaacattgcaggtggcatacttctgttcatatttgttatcccaattttgtctaaggcattaggaagacctatgtgatataaatagcaagtttaaagtaaactgaccttatttttgatgatttcagtagagaattaaagagactagattctacagttttcctgtattattcagagaattcatggagtaaaatatttcaaatttcctctccagtaagaaacaatactttttttctgtgatttttatctaattagctctaaagcagcatttatatccaaaagctctctacagcaactccattcccatgtagaattcactgtaggcagaaaaaggacacactgttgaagttttttgctaccaattaaaaagcaaaatagcaaaaaccatcccactgagaaggcacagactaaaccttatctcattaagactaagtctacatgctttatttacttgtggttgagaatcaatgccctattgtcttctagacatacataatttgcaacagaaacaagaaacaggagatacatcttcattgctttgtctaacctagtaattaaaatgagggtttttattttcaaatggacagtattagcaagtcaacaatggcttagaatgatacaaacactacatggagaattatctgctacagtagaactttccttattaccttgtgcttagcaaatacacaattgttgaatgaatgaatgaatgaatgaatgagtgaatgaagttagattagtgcattgcatctgttatctcactagtttggtagacagtttgcagaatctgtccaccaaagttggggagcactggggtcaggatcaagggatgatggtttcttggtttcaactttggtaaaatgaaaagtagactcaattattcagcaatagaggatacctttccataatattctgggaagatataatagtttgttctactacccaagtagttttgatgaatcaggtaagtggtttggatgataagcatggaatcctgtgttttcatttgcatgtgtttaatgatataaattttcttcctgtactttgggagcaaggatgtatgttatccactgtagcattttacataagcaaaaaaaaaaaaaaaaaaagctacatttggctacttctcattgggaaattgtgtcccaagggtgcaataaatatgccaattttatgcaacagatgtaggactggacacattgaattatgaagatggggcagaatgcagacaattaataatgctactgctctaaaatatagatgagttttaaagaaatgttttgatagttgtcttgatgttgtataataagatgatttctactctttgctttgcacagttaatttaaatgttctttgttctgtaaagtctatgtcaaatagtctgaagggcaatcaaaacttagatgctattttttcagtatacggacatttgtccaaaggattgaattttaaggatggtattggccacatcatgtacgttcatgtcctatgtattgagtgacacaaatatgcaaaacatataaaaagagttatgtaagtttctatttgcaatttatcctgttcaatgtgctttttctactttggaagaatatatttaggatgtacgtaaaaaattaattattagtgtaatatttaatgggaaattaggagagctataaagacaccaggttctttgtctaggggagaattaactaaatcctttagatgcctgagtgttttcttactaacttttctttaatgttactatttaaaactccttggtagaatgggattagccaaatatcaaatgtgaattatcacatccatatttgtttagttgaaaatacaagggtggtgcagatttaaatgcaccagtttattaaccttggagtttgttagacatttttgttttgtgtaaagcacttatatttttcagaaacatttttgttttgtgtaaagcacttacatttttcagaaacatgagtggaacttctgttacgttctttaagaaattccttttaattcccacttgtcaaaaggctgcatttccctgctgtagactcttcctttggcacccagacaatacacacaagactgcccacccttccttttttccctgccccttctctggcactcagcctcctggcttcctcgaccctgaatgcatcaaacccatgactctgccatagagcctagcacatgagaggggcttcgtaaatgttgatatgcttaagctttttgggctttgattcccctacctgtaaacttggtataatgacagtacctacttcataaagcattcatgaagattaaataagctaaatgcaaactaaattagttcagttgttaacatagggtcacaatcagggataatggtttcttggttgcaactttgttaaaatgaaaagtagattcagtaattcagtaatgggagtttttatgggcttagaatggggaaatgcatgctgatgggtccacgggtgggcttggaaaagcaccattcgattgggtgaaaggcatcattcagaaggaaccagtcgagagagggtaagacagggatagaagttttcactccagtggtggactccatctggaactgccagctcggttttcaggctttaaactgtcctttggcttgaaggtcgggttcaagccatccctgtctgcctagaaatttgtctgtctcctgctgctatcatcatcatcaacatcatcatcatcattgcctttagataaaattaaatactcattacaagtagagatatttccctgagaaaagaaaatgtatatcatttctctcctcttcttatctcacagacttagtaaattttccaaggacccttgaatcatgtctctaacacctttgctttaaagtgaaaagcaggaaatccagggggttggaatatcttacccaagatgatagagctaattaatgagcaacatatcctgaattcatgtgttctgatatctatgggtcagcacatgttttctacacagcagaatctctctcttcccctgtagcttctgaagttgctaaagacaaaccctcctattaatatcctctgggtttattctaggttgaaacctttgccctcgttattggttatctgttaatgatagcctgccggatggttcctaaggctcttactgcaaaggctgatacatagaaacatagaagtttccttatgatgaagccagagaagctgtgctgctctgaaagctgcccatctgtgtactccaactctatgagacccagagacaggccaacaggccagtcttcatgggcttgtggcttgaaggctactggaccttagaagggccccatgcttggtctaatgctctgctgtggctatcttaaaattcttaatgttctttgaatgaaattccacattgtcatgtttctctctgccctacagcttttttggcctgtctgctgaagaaatagtggatctttgtgataaatccctgggcactcagggaactactgttgtatgggagaaactgctatgcttttaataacaaaagtcaggactagaaactcccccgattagtaatatagatgaaaactttattttcattagagcagcatatattttttctaacaggactttttaactttgatatgacagaggaagagaaaagacctgctctcaggcagctatacccttagtgtctgggaggaggacactaagagaactctatagatttaacctggacaaattcctctcaagcactatttaaagggactttgttctaattttttaaaaaataaagaacataatttgacatataagaataaagttaataatgctttgataaaacctgtgcaaaaggaaaatagctttattgagacattcaccagcattttgaccatacaactagactaatggctttgttgaaaagtaaggtagtaaattcaaaatcacagaagtacattcccaaaaagcaaataactttgcatccgattagcattttattctagacaactggaggagctcaaactaatactatccataatatgggcccacctttatacactggtattgagagaggcttggcaaaatgacatgcccaccatggagagctccaccatatcatttccctcctgggcagacaggagggctgaagaagcagactggtgagaaatgggcagctcactctgaatctttgccctttgagttaattctagttgacctacttgagcaatgattgaggaatttttgattcagtttgccctgatctatcccctggtgagcatgggcttgttattttttaatgaaactattttcacagcctgttgtttttggtgtcagagatagaggagagtgaagttatttttttttttattcttattccatttttttcatcaatcctagtgccgcttatgctgctgaattgcattttactggtgtcttgcagcaaagcatactttctagcaaacaatgcaagaacactaacaaaggataaaaataataccaggcaatgaccaatgagaaaagcacacacacacacacacacacacagcaaataccttttcatagcagatgccagaattgtaattatataattttgtcacctttcttgctttatgtaacaatatctgttgggaagtacttgtcacgaaattgaatatttctcacccaattcatatcttatctcttaaaatcaatgtaaaagtactcctttatattttttgttggtaaagtgaactctgtttagttactccagttttcgccctttggcagttagggtgggtaaaagtcgatccctgttctcccaagaggagttttccaattagatgcactttatttctagaataaggaggatctgactacacagttagcaccccccattcgtgagatttcatcacctcctttcaaaacttgcgttagtgggattggagggttttttttttttgtaaattactattaaagtttcagaagtggatagaaatctgttatttagaaagcagctgggtacagaagtcaagctgagctaacttttaaaataaatcaaatggagaagcaatactgcagaaaagagtagatttatttcacagtatgagctttagtacattaaaagcacaactaaaggcaatgcactaacaatagtcagtacagatttgcagataagatgtccttagctacccagccatacatcttcatttgtttttccatttcttaataaaacgatcagagaataggtttacaaaactgagtgtcattatcatgactttaatcttgtttaaattcaaaactgtcctctaggctttgtgtctaaaggagagatttatagcaatctgtttttttttaaaaaaaaaaaaacagtagattgtataagaattactatttggattctatatttctaaagaaagcaactctgtaatttttggaacagctcactgtaataaaacatcagtaggcttttaatttcaaatgaataagcgatcacgggaagaatgtatcagcacactgaatattctctaaagctggtaaaataacactcatatctgtaattcagggtcaagatggataattggaccatagaaataacatctacagtcaatacttagacacaacaaaaaattaaatatttggaaatgtcaatggtattcagtggaacttcctaatcaagtcctgagtgccaagtggaattactctaacttagaaaatacttcaggagcagcttaaaatatagaaaatgtccagtgggcttatcacacatagtatgtgtgtcataatcatctccaagtgacagccttttgcctctttacttgatattccccccttgattcctccaacagtgttccaccatcaactagtatgactgggtcacgaaagttccatcttggaaaattcaaattacttacattcactcaacactttgtgtttaatcccttgactttaaaataataactcctaatatcttagggaggaggaagtgacattacagtcaacagtcatggcttttagattccttctgaaccatctaagtcctccatctgccctactcccaccttgcattttatcatgaagtgacacatagcagaagagcagtataataaagttaagccagtgacttactactttccccaagggtagaaatcccctctgtttcttttctcttttgtttccaggttaaagggtgcatttgcagacatctaataccatgcatgctgatctgaaggaatttccctgggggaatgtgagatgtatatgtcttttttatagtcttatgggagacttttacttttagataatcacaggtaaatcaatatggttttagtccctctgaaccaataatatatgtttactgaattggattataaaacatattataaattaaaattatcttattttctttcttaagatgctttttaatactttgtagtgataagatttctgtagtggaatagtctatcgaaaaagcgtttcagccaggctccgtggctcatacctgtaatcccaccactttaggaggccgaggagggaggatcacttgaagttagcagttcgagaccagcctgagcaacaaaatgagactctctcatctctaaaaaaaaaagttttaaaaacttatctgggcctggtggtgcatgcctgtagtcccagctacttgagaggctgaggcaggagtttcgcttgagtccagaagttcaaggctgcagtgagctatgatcctgtgcattgcactctggcccaggtgacagagtgaaacctgttttttttttaaaaaaaaaaaaaatgttttgatacttcaaactcttaaaaattcctttgttaagtatataaattatgcccaaaatttgtgccattttaaaactgagtaagcattttaactagaatactttatcttagcctaaaaatgttatctgttatataattattttctattgactcacagaagatgctagaaataactatataattactcaataatgagctaagtttctagggagtgaagggagttatccttgcttaaaaattgggtaattttttaaacttacccagtttttaaggttagcttttctagggcttaaagatacatttctgtaaaaaatactcatttgtttttcaacctacattaaaagaatattatgattacctcttttttattttgagatggagtctcactctgtcacccaggctggagtgcaatggcacgaacacagctcactgcagcctcgacgtctggggctcaagtgatcctcccacctcagtcttcagagtagctgggacgacaggggtgtgccaggggtcagctagagctggggtttctctacatggcccaggctggtctcaaactcatggtctcaagtgatccacctctctcagcctcccaaagtgctgggattacaggtgtgagccacagtgctttggcctctctttaaaagtgccttttttttttttttttttttaccatgaaaggacaaagctcactttatattttgtagagcatggtatttgaacaaagttaagggattggtcatcattaaaatagttatgacactgtctactaaatcatttgtatctatatttaatacatcaatacagagttatagaagttcacatataaaatgtggtattgacagtggaagaaaaggaaagaatacaagatatattggaaagaaatgacagatatctgattttctagctcatctcttataaatgatttaatacatgaaaattattcagcataatttctgtgattgtcagaaaatgacaatcagtataatatactgaaaaatgatttagattagttgtagtcctaggctcttcactttctaaaaatgtgtcagtttatcccagcacattaggaggcagaggcagaaggatcacttgagttcaggagtcggagaccagcctgggcaacatagtgagacttggtccctacaaaaattaaaaataagttagctgggttctattagtccattttcatactgctatgaagaaatacctgagactgggtaattcataaagaagaaaaggtttaatggactcacagttccacatgactggggaggcctcacaatcatggcagaaggtgaagaaggagcaaagacacatcttgcatggcaacaggcaggagagcgtgtgcaggggaactcctatttataaaaccatcagatctcctgagacttattcactatcctaaaacagcacaggaaaaatccaccttcatgattcaattaactcccacctggtccctcccacaacatgtggggattatgggagctacaatttaagatgagatttgagtggggacacagccaaatcatctcactgggcatggtggtgtctcaagcctgtagtcctagctactctggaggctgagatgggagaatctctcgagtccaggagtttgagcttgcagtgagccatgattgttccactgtactccagcctgggaaacagagcaagaccctgtgtcaagaaaaagcctgtcaccaagttgctctgagttaaataagtggaagtggtgctatggaaaatgtaaagcattatgtaagtgtcaccttcttagaattcgtgtagaatcaccaactttagaactaaaagtttgtagagaccccaagcctctctgactccattatggaaataaggaaataggcccagggaggtggggacaattgcaggacttggacctcaattcagacctctggacacatttcatttgtttgcttgtgtgtttatttatttttgtatatttactgttggaatgtagtctaaaatagaacaccattgggatcattaagaagtgtattgttgtgtctttttttttttggaaatgtggaagccaagaatgaaaatgctgtagagatttcttcagttgcatcctcctctgtttagaacttctggggaatgtgcctgtctttgaataaatggaaacatcccttgcaaaagttgtctagctagtttcaggctaagcatcttaacaaatcctggctttaacctaccagtcctatctgaagtcatggaatgagttagacaccccatgtctcccagttttcccttttatttcaggtgatttagcacttactgagtctccttcataatgaattagtatgatactttttactgtagcaactagaatggagattatgatcgaaaaataatgtcatttcagtgagttttggggcatactattacactattttcaagacaattaatgaacttacagtcatactttctagcgtaatgctgtccaatagaaccataatgggcactacatacttaattttaagttttcttgtactcacactaaaaaagcgaaaagaagcagctaaaattatcttaataatattattttaattcaatatgtctaaaatatttcaacatgtaactaatatttttaaactattaatgatagattttgcattcctttttttaatactgtctgaaattcagtgtctattttatacttacagcacatcaaatgtggattttaaattttcatcagaaatacatgatctgtatttgatttcataaaatttatatttgaaaaaagtaaatttacatacccaagttattccaaagatacttaaaattattccaataacagaaataagcatcagtcattgatttaaattttaaatcaattattataaattaaaattaaaaattcagttaataagttatatcagccacatttcaaatgctagatagccacatatagctagtggctaccagatagaattatcgttctagatattcagtgctgtcaccaggattattgctgtagaagagagataaaaagttcatctatccatctattttattttattgactagtgctttattttgcaatgcaaacattacctacataccttctgtaattaatacttagattttcctttcaatattgaatagtaaaacatccattataagcactgatgggaagataaaccttgggaaattgccttaactgtgattgttagtactggaattgaccagattttctttccaacagctttgcatgttttgtgggtttgtataaccatgtgccctgctttataaatactttcagtttaacctgctttgtttcacttgattgctctagtatggttaaagacaagtgtttttgaataacagcaggcctatcaaattgccaactgggaaatccatggaatatgcttagggcagctttttgcagcatttcctgtacctggcaaagaatttttgaaaaaaatgttaaatagcacaatggattcttaactggcagactctaggaaacacttttatatataatatataggcttactagttgccattactttttaaaaaaattagggctttaggcccatgtagagagacagtatagcaaagaaattaaaagcatgattctggagtcagaaccatttagaaatgatatgaatttgtctgaagttactttaccattccaagccttagtttcctcattctagaatggagataagattaggacctactcaatgaagttattggagaattaaatgataatatgtccttgactttgtacctgtcacagagtaagtgctcagaatatgaactgttactctacaagactagtggaaccacaggcatcattacacttgaaactcatcaccaggagttaagaagaaggaaagcaaatactgtacgtgaccattgtgaagttaattcaaggagcataaaccctaaagagtggcataccagtggcctcatccccggtttgtttatttgttgttgtttttaattagggtgcaaaatctttacatcaagaagcaaaaggaattgttcatcagtttcactatgtgatttttgcttttctttacctgttccaagatggctagtttgattatattgtgaaacaataacttataaaaaaattctctaaaaccattctatgagtaatagatcagacttttaatcaaggtattattttatgttctgcaaattatagcaaagataaacattgtgaagtacatttgctagttttatgtagtgccagattggtaaattactgtacttttttgctgtcctattattgttggtggtggttgttttttaatttacatcatccttcatgttcctagactcctatttctcagagcccttttctgtattattattattaatgtggcatgtttaatgtttatagtatttccataaaaatagttcatctctgctaggtagttttcaatgttaaagcaaatgtgcttactcattgaatatgaaaaatatccctctggaacaaatgtagaaccatccatctcttgaacagaattcttacgggttttacttatctgcctaactgccttgaaaacagcttggaaatcattcccatacttttggggagcagtcaatcatttagacagtttccactgaacagcttaaaataatcaggttattacaagtaaaaatattttaggatgggtatctatgccagctaacatgaaaacccacactgaactgatgtttaagatgtattattacaggcaaaaagaaaaaaatcttactttgttttttgcactggcagattacaaaagttcatgggacagcagtcatagaaacacagagttttaggatgaattatgcattattttaaaaacctttagtattgagttgttagccctccatgtggatagaatttcagagcccttattacattttaaaagtgaagctagggcagaaagtgactcaaaattagaaatgtcaggatcttcaattttgaggtatggccatttattcttaaagatactgcattcaaacaaaaaggagtcagctgaggtggctcacgcctgtaatcccagcactttgggaggcctaggagagaagatagcttgagctcaggtcatcgagaccagcctgggcaacatagtgaggcccccatctctacaaaaccaattaaaactagcctggcataagggtgggtgcctatagtcccagctacttgagaggctgaggtgggaggatggcttgagccaggaaggccaaggctgcagtgagctgtgaccacaccactgtactccagcctgggtgagagagtgagaccttgtctcaaaaaaaaataaaaagagagagagagtgagatagagagacagaaagaaaaagaaatagggcaccatttcaaagaaaacataaaagcattttttaaatattacttctttatgatttagaatggatattttttcttccagaaatgaaagacaagtgtctctagaagaccagactttagaataaacattgcagcaaatgtccaagccttggcatataccccatattttgttggcatcttgtataggtttctaatcttatattataacccatatgaatgtccactgaggaccacaaaaagatcttcatggagaaaaaaaacacagcttcacacattaaattaagcataagaggagcacaagactcgggctttttttggggggaagtgagaacagctccagcattcgttcttcccagcaaaggtgaacatatggccatggtgtctcctgctatcaacatttttgcccctgagagagactagcaagtcggaactggttagagaccatcagagagaaagagagatcatctgcatctcaaaggattaaacaagcattggatagagaggaacagaaggcttcaggtagagacagtggtgtgtgatcaaagccattcatgtcttaactttacaactgtgtggagagctcagaaggaggaaatatgtgagcagatcaaaagatcagtgttgcagtaaagaaagagataagattgaaaaaatgtggagaagtgaatactcagcccataatacatgcagaaagtattatctgggctcaaaagttgttgtggggtagggggatgggggagggatagcattgggagatatacctaatgctagatgacgagttagtgggtgcagcgcaccagcatggcacatgtatacataagtaactaacctgcacaatgtgcacatgtaccctaaaacttaaagtataataataaaagaaaaaaaaaagttgtgtcaaagaactcagttagaaattggttgtaataatacagtggtgagctaggacagaaggaacaaagagatgggagaaacattagaaaaattaccgggagaaacactgactgcaggttacaatggctggtcagaagtgggtcaagacaagtttccaaatgggtaccagcagtagtagtggtaccattaacagacactttgaggagagcgaatgccaggagatactggttggggaggactgaggctttttggtgttttaacttcgtataaaacagagtaacttttaggtttcattttatgtaacaattttcatgctataacagagcttgatttttctcaggtcattactaaaatatcaccaaagagaagaattctggatatattagaattcaaaaagatattaaatagaaaaacaagactggggaatatatttcttaaacatgtgtaagatgtttgcaggttacaagcaaacctccatgtagtctgtctactggaagaatcatgatgggactggaccttcaaccactggcaagcactagagataaagtatggatagccatcagtaaacatagtaattttgttgtaagaataggttagatttacagaagtcctctcatggccgtgtataagcactttttttttatttcctctctctaacagaagaaccatctacttgatagcagtggacacttttgatgcttttaattgtagaatcttggaataatacactgtgctattaaaattgctcttctactttctatagttctatgaaatggaaaatcatttggctttagttgttacttatttagtgatgacaaaaatgaatttgaatgaaaacacaaattttttacaagaacaaaattgagcagtacagcagtacgggtttatccatctttctgcaagtagtcatctaccatttttataggttacgagcacttccgcacatcgacacaataggaacaaaatcataaacagcacagttatgttcttagaacgtgtttgaaataaaatgaagtctttatgagcatgaaaagtttttttttctttgactgcaagtctacaaagcactgtgaatggataatatgaacagggtgcccataattgttctaatggttgagaacatttcacctcagtctggaggatttctcattcccacttccaaatcagctccagacctccccctgggcacaaatacaacatgaagcactcctgtctcttctcctttttaaccctgtcctatctgtacattctccacctaatttgttagtagcaccagtcttccaaggagacacttcattcctaacttgtccctcccctctagtaaccacatacaatcagaggtctaatctcaatttagcctttaagaatcttaaattttgttccctcttctccgaagatgctattttggtagaggctctcctggtctctcaccagctttgcaatatccccctgcctactcacccgctttctgtcttctatccctccaatccctcttccgcatatcctacagcatagtcattttcaaatggaaatctggacttgtcattttccccctgaaaaattatttaatgacctcctgccaggatgtcattcaagcttcttgatttgacccattaggttcttacccactctccagcctttatctacactcatgcagtgttgactgtggtccagctttaccacactcctggacgttcttcgtacctgctctgctcagccccctcctggaacgtggtgagtgtttagagtgccctggacacacactcccacctaagtggctcatctttcaaggttccgcaaaacatgatctcatctaaacttttcccctgcatgcccatctgttccctttgcttcacacttatactattactcctgtatttgtaatcattttcaacctctctctccatgacaccgtgtgctttttaaggatagaggctatccataagcattctgtttccaagaccaggtacagaacctagcacgtaatagttattcaataaatatttctctcatgaaactaaaaaagtaggtacagatgggcttcacattgggcccttatatctgtacataatgaaatatttgggcttggaacatagcatcctagttattactttatcttagagtaaatcatttttgaacactgtactactaattaatggctctttatgagttaaattagttaatactatttacaaatgtgtttagtattgaagtaaaataacattctgagacaatctagttcccattttttaaccaaagagacaagtttgagtttcctgatgtgaagaggaaaccatttggtcttatcaaaaattaagatggaaaggttacatgtgcagttatttgctaatgtaatgagaatgtccatgtctccatttattaaaaactgggaagtttatattaaagctgattgtcatgcttcaattaagttagcaaatatggatgtcaattttatcacaaatgcaatattaaaactgatgtttggtcttgtcttgaatgcaatgattaaattcaatctagtactcaactctctcatattgaataaaaagtaaacagcctggtgttttccatatcatggaaatctccctggtttgctgttgttgggtatttatacatacatgcagttagcaaaaggtaagcagattcatcattaagttgttgtattgaatcagtaaggtgataattgaatcttaacataccaaaacagaaatctcaagaatggctattatgggactagttttataaaaggggaaaacataaaatcagtagaagagatttgcttttaacttcccagtatatcgtatgtgtttaacaataacaataaataaaacccatgcacatataattgaatgtgcttgttcattagtttggaaaagagatctgctcattagtttggaaaagaggtataacaataaataagtgtgtgtgtgtgtgtgtgtgtgtgtgtaaacacacacatatttatatttctcagataactgatgtgtcctttgctggaagaagaaaactatgagaaaatgttggtgatatactttttcttcttctgtttttgtatttgttatttttgtgcttatctttagttttgatattggattaaactttggcagctttgcttactgtttattctagggatgcttcttgtatggggcctctgttatcatatcctgctaacaatacagtaaatggaaatttggggaaagcaacagtaggaactgctgtgtatctgcggttaagttaatcagattttgataccccaaaaccaacacagcccacaagactgatagcccaatgctgcagtaaattgtttcttagcaggaaatccacagtagcagtgtaatttggacaatggagcatttgacagctaacccatcaaaagcagtgcaccctgaggaagttgctcacttctggctttacattcagccaagcattgataaagcagtggctaagtaggagaatcaatttaaaatcaaatgatagcaaggctatttatcccattgccaaaagaggacagagacagagagtagattattccacctgaggactctatactgtccttacccaaatgaggggatgggtcaattatgccttctcaattccttttgagtgccagttttctcatatattaatatttctcatatattaatataagcatgattaaaagctaagctattgtctattctcaaaagatggatttatgcaaaatgattttggattattcatcttaatgaaaacactctttttttttttttttgacagacggtctcactctgtcacccaggctggagtgcagtggtacagtctcagctcactgcagccacaagtgatcttcttccctcagcttcccgagcagcagggagtacatgcgcatgccactatgcctggctaatttttttattttttgtagagacagggtttcactatgttgcccaagctggtctcaaactcctggactcaagcaatcctccctccttggcctcccaaaatgttgggattacaggtgtgagctgcaccacctggcctgaaagtttttaagcttcaagtcccacagaacttaaatatgttcctgaagggccacagtaatgatcctggtaaaaaggacaaacacttattgaaacctgctacacttgacctgagcaaactcattagcaccaattgtggattgactgggaagcttggagacaagcttcttacttcgtctgggactcctgagcttgagagtggatgccttagtaaccctacagtttgggatttgctcttttcttctaagagactattacccaccaactgccccatacacacacctatacctgcattccagggttgtgatcaataaccaatcactattaaactggcatcataccaatatgaaagtcctccgctgtctcaatatcccaataaccacaaagatctatagttctgatttaacattttagcaggttttttttaatctaagcacttacattgccatttaatcaatgtatatgcaatacatcatgcaataatttcagatattcattgttgacagtaaagcactcaaaatttagacacaaactatcaaataattaagtggtacaatttgatgtgacattctaatatctgagtttagacatattccaaatttaatttttttgttaaatttaataccactcaagtttactgtctcacggacagtgatatatggtggtagaggaggaggactggtagttcttctttctggtaataaagctagaaaaggcatgtttgtttgaaaagataaaattaaaagacacacaaataggagttgttgccccttcactccagttttcttctagaaacttggcatccccacacatacacacgttttcctttcataccagatctgctgtgaacttcaggccattccgtacattcataaataatgtcacagaaatacacaatcaacacatccagctccatggtatagctcttcaaagtggctctcgtggatgcactatgatgttcagtgatgatgagtgttcatactcagaagcaagcatacatctcactctgtacctataagaaatttttttcttgtttgatgatagtgcaataaactttttttaagtatatgtttctaaaacaaaaagctccttaagaatgtagttatacaaagtaattatctcaggtatttgaattaagaatattaaatcctaaatacgttgttttcttctcctatgtaatgagtaaaatcatctttaatataaattacatacttaacaaatattcattgcaacaaaggttttaaattggtatggtaaaattgcacaaaatatgaactttcacactgcagttgtcacatggtccctgggagagccatcctttctgtaatgaggttaagttaattaaagtgggctcaatgctattagctgcatgcaaaactgaaggtaaatgcttaatcatagaaattagagatgattatttaatgaattctgaataaatgtaaggttttagtccagcacgtttgcaaaaggggattgtttgttacacacagaaaggtaagaaaaatgtcattatagaaaatctgggatttagttcgcagggtttttgttttgttttgttttttgtcttttctgggtaaatggtgatcttaagaagttatgttaaaaatagtttgtaggccaagcgtggtggcttatgcctgtaatctggtgatttgggaggctgaggcaggatggcttgaggccaggagttcgagaccagcctgggcaacacagtgagacctagtctctcaaaaaaaaaaaaaaaaaatgtttcttaagtattagacatgaggaaaaatagcaatttgtagtaataattgtattagtgatctcaagattctttataatgtatgatttctatctctctaaatttgaccatgttaatgagacaaaatgtaaactgatcaccttgactttttaaaataaattgaactgttctatattattttaaacattaaatccaaaatatttttagatacgtataaagtacacaaaggagctagatatgggaatatagctaaaacaaaagtaagagcatgagaaaatgggacaaaatatgattgattcccatcaacgtggacaaagaagcagcgaatcaagacaacagagagggcattaaaataaagtagggaccaaagagaattttggaagtggaaaccttaaagaagatgtttcagaaagtttctaatggagtaggagcaaagtaatcaatgaaacaaatgctgcaataataggtatcattttacgtcatgcagccacacgtctttcagccaccatttatgtcttaacacacctacaagcccaaactaacaacccttctctaagagtagctgacagaactaacgaaagcctgaggcagcgcagccatcttgtcacctccgtatcttagcgcctctgccctctcggactccttatcgcgcctaagaagtaccaagccgttcttattctgatggctgcggagagctgatctaccaccatgtgaaactaagtcatgtgaaactaaatccaaaattccacaaggaatgaggtcgatctatcagtgaaaataatagcccatttgagcgcttcttctttctctgaccggaaggcaagctctccagagtccactggggatatttcctaaaaacactttgaaagctcacacatgtgtactgtgatttttagaaagcaggatactccgcttggggaataggaaggcctctgtaacaatgaaaaatggtagaaatgggaaagattcatgaacatgtccagagaggttttcgcataatttaatgttgtttgtattttctaaagcttagataattgcttgttaaagactccagcaagtttatagatagagtgcttgctacatgatagtcattgtatggcataaacctattttagcaaattttccaatagtgcacagcatgcatctgtgactgagacaaaaatcaatgcttatggatttagcagtgtaatcctatcacttgttttgtgagatatgatttgaaatgtaaagtacgttaagacttaagtgaacttggaggcatggagtctctggggtgtttcttagtatcctatttattattgatcagactatttctttattgtctctctactcctcgccccagttatccttcctcccctgcaccaatagtttttaaattatgtgtatcagaaccaataagttatccttagtatgagggcttagttcctacttccaaagtaaggaataatatgtaatttttcctacccagaacataatcatgtagccagtcaatttaagtcttagaataaaaatactagtaaaatgttagctcaagtttccaagctttgcaaagaagacttggtgttttttctagacacatttcacaaagacagtagtaaatcaactacttctaagcaactttaaataaccctaaattattgtgcttagtagctataggaagtcactagtgtaaaattttagaaattgtagtttttaatctgattttgtcaagattttaaaaccacatgcttgctctactctcaaatttactatgaaagaacaatcaaatacagtttgaagtagttctacctacctggaattattcattcattaaataaatatctattggagatctatggtatgccatgtactgggacaaagtcctcagcccttataatgcttttattctggtgatccatcaaaagctattactctgtggaggctattactaattagaatttgcaaaaattgtgtttgtttaagtaaatgcaaaaagtccgactcttttcttagcttctgaaatgatcatcagccacaatacccttaagatataaaaattatgatagttacgtaggctttcttcagtacttcaacctagcctgatttgagataaaattctgttgaatttagtaaatgttcttcttattaatagattatatatctaaggatctgatttttaattcctactttgaaagtgagttacattttgcatttactgtacacttttgatgtggccaattcagttgcaaactaacatgaattgttaaaactataattctcatttccatcagcgtattcctttgggaaagaacataacctgtccatgaaaggatactctctctatatataaactactgaatcttggatttctattaactatgtggcttttagacataggtaaatgtagtgaaagaaaataatgtgagcttccatctaataagaccagactctgtctttgaaaataattattggaaggagggtggggaaggaacctgtgcccattcacatgagctctacttgctgtatatttaaagcaagtcagttatcgagaaggaatccttcagaataccgcgaacatatggaaactagctgcttatacatattgtctaactcttttaaaagttattttgactttaaaagaccaaatccacagaatgaccttgagctactattaatccacctaactgtagggcgtgaacacagaacacatctgccatctgtcagctgagaattcccctggcaccacccagactcccactcctcacaaagtcctcttggggctaagatgacttagagagaggtctttctttgctggcaaagaaggagtgcatttagactaatcattaaaacccattacctaacaaagtgcatgttcttagggaacacagagatacttgccaatgaattaatcagcaaaataggctaggagaaggtgggattagcagtctcagaaaagatcagaatccatgagatgccaaagcggtttcacttgccataaatcttcacccaattagagggatttttatcttaacatttcagggttctatctggatttagtttctttgttgctccacagtatgttatagctggggctggaacaacgaccaaggttttcctggagcttgatagggaaaatcatttatttgaataattgatcattcaattagcaaagcaaatgttgaacagttggacagctctttttatcagtgttgatgggaagtaattggctgtagttcattacaaagcagaaaattgaaaagtgtgattttgaaataatattaaatacaacccccaccaataaagccctcctgcctactccttttgtcattgttgtttggttttcttttccctcagtgctattacattccaaagtaaaaatcaaggaactgattatgttccctggctactactgaacagtgatttccctataccagtgtgtctagtgttaaataattctgcagagtaaggcctgcaagtggagaatgatattagcacttcgctggcttaaaacaacagcaaaaaggcagacaaccagaactgttgtaaagggagcactggaggggctcttgggctcagctgagtttccactcaatttgtaagaagaaaccatattttcagtaaaaatacttgcatattaagtggtcaaatgtgaatttttaacaataaaatattggatggatgtagagtgtattcattatacacaacaatagtggtttatcttaaaagtaatttgaaaatacttagaaacaatttgatacaattgcagcctattcttatttcaaagtaactttaacccttatgtcaaatgactgtattttggttcaaaatcatgtactcataaatcagttgtcatcataataaaaatattttataggatcacttgaacatttcaagaggttcttataacttggaaagagttatttaaactgatttttcaaaataggagcttctaaaggtataaattgattcctggttctcaagctgaccctgtttttagccaacataaatattgataaatcagcatagcatttatatatacttgttcatatagaatatgaaaacgattttaatgtttaaaaggaatctattttcttttagtctctaatatcatataacctgcttcttagagtagaaactggattactgtatagttcagcagtacagaattaagaacaaaataatttactgaaaacaaatatatatttgtgtgtatgcatatatatatacatacacataagatatatatgtataaatatgtatgtattcatacatatatgagatgtatgtgtaagtatatatagaaaggaacagatatctcaagggaaaattttaaaatgagttaatgaatcaaacattgattctgtttattctgtatatatatatatttttgtttgtttgtttgtttgttttttgagacggagtcttgctatgttgcccaggctggagtgcagtggcatgatctcggctcactgcaagctccgcctcccaggttcacgccattctcctgcctcagcctcctgagtagctgggactacaggtattagtatttttagtagagacggggtttcaccgtgttagccaggatggtctcaatctcctgacctcgtgatctacctgccttggcctcccaaagtgctgggattacaggcgtgagccaccacgcccggcctattctgtatattttaaaactattcttggatgagaaataacttccacaataatgctaaataatgagcatgcttattttattcctggatttaaaggaaatttctgaagaattttcccataaagaatattgcgtttcgccttaagataggtactttgctattagaaaattgttcttctaatcttattttcaatggttttattaagaatgagtgttaaatgtcatcaaaaactttttgcctcaaattaattgtatgatgcttttgtgggttttcagattagcattttatattaacatgtttctttataacaatcatctttatattccaacttttatcctgtttcttcattgtaaaaggaatactgacgtatttcttgaaaatggtctcctttaaaataatccattgtcatttttttaccctgtttggaagtatggataatgtatttttctatgacatgaaagaatcttaagagaaactactttgatattggtttcttcttatttttacctaagttttaaaatgctttcttcaattatgttcttcataaccaattctaattcatttttatggtgattctgaactcctattatgtatctctgtgtctgtcattttctctcatcatttcttaatttagcttttgtttgttcatctccttcttatccaaatgtttattgtgagtctactacgtgacaaattactaggcaagaaggatgaaggaaagataaatacaataaaatatccactttccagtctctgttaagcatttttactacatgttactctaacctatattcttttctatatcaattcaactgtttcatgcttgaagtgctgatttaaatattcagcattatagttcaacctgcgatgttattataatttagcaaccataacatttttaacttcctgagagtcagtactgtaaatttttctaaactttgtatttactttatatgacatatatattatacttgatttccatacttttctgcttctttcatgtcctcttgagaaggagtctgactgcaccagaccatgcctcacttagactgggttagatggcctgccaccctgggcctccctctccagagggtccccattttgagcctttccccaactatgctcctcctcacctaccttctcttctagattatgccttgggtagtcaagattccagaattttctgctcaaatggctctagcttgctttccagggtctgcatggatcatttgcttgggcctgtcctctcaagtagaagccttgctgtcagtgtgtaaatccctgattctgaggggaggccaaggagcgactgcttgtaaggggtgtggacagagcatgtgcagtggaccaggatggccatagaggcatatgcagggctgcttatggcaactaaggaatctggtcattgaaaacccgtgacactcaaagcacttaaagaatgataatttggaacttagctttataatatatctctagaagatatatttgtcaagattagaggataataaatattttacttaatactttgttgccttgatatataaccttgaagtatctaggcatatggtgtgcaaacctccatttgcactcttatcctgagcccggcaaatgttgagggcaagtctgcattgaaatattattctcctttgttttcttgaattattttcataattcattaagaagagtcctgagggatgttgctttgacatctccttcctgttttcttaacatcagagtacgtgctccccgagttttttgttggtatgtcaacttgcttataatgtaatttaagggctaattcagacccattcttcaaatgcaggaaaagatcacagttggaggccaactggagatcagatctcatgtgtagtgattccattagagattgtcatcaaaataacttcatcatatttagaatggcttaacaaactaagatgaaataatttttactcctgctttcttattttgaagcataacatagttcaacatcagagggacattaatggaagctcgccacccccttcccacatttgtaaaatgaatcagtgtctttccatcccatattcaacagctaagctatttatgtcccataaactcagggctcattcacttattcagcagctatttcctgagtgtctaccttgtgccagttgctgtgctagtgctgaggatacagccgcgaaacaaacaaactgttaggacatttgggaggaagaatcagataaacatcatatcaacacatcaacaattgccacagtattgggcagggataaaagtcaccaagaagaatgaaatggtgcgtaaggagacggatcacagtcagggaagtattctttggcaaagcaacagtagagagtgctcctggatgcgtggagggagcaggatatgtggatacctagaaggatattatttagtaagtattagaggaacaccaagaaagtctgagtgactggcacagattatgggagggagaaaatgttaggaaatagaataagaagagggtcagctcatatagatgtagggcattctaggccatggtaaaatgaaaccatggaaagccggggaacagttaagtagtgttgtggcatgtgtttacttatgtttttaaaagatcactctggctgttgcgggatagttgcgtttaggggtcaaaacaaggaaacctgcaaggaggccattactatagtacaagacaagagatagtgagatgatggtggttttgactctgttggtagcagaagacgttgtaggagttgaatctgaggtatatttggtctttaggaaatcagaacttaatcctagcttcaaggagtgctggcagaatctgctacaaccttgtattgtttttactctcctgtgatggtgtagctgcttgaggattcttcctgatcaggacctagggcctggtgctacttcttacacccaacttttcagaaatctaaactgaactcttttgttatatttgtgcatcctctgagcactatagaatgatgtctcagtaccttgcatagaagcagagcaagaaaatctctcctgtgttaacaaaccaccaaccacacattcgttctgcctgtaagtgctatattttatatctatttctattgtaatatgccttagatctaattttgaatgtggaacgaatactcatttttaataaaaatgtaatagtacccaaacagggccaaagaaactaaaaatcaggatgttaaatcccataaaatgtttttgactatttctcaattttatggaataacaataagaggaagaattaagaaatctctttgaaatcaataatacctaacagagcaacctttcccgtttggaaatcgcttttctgtatgtgataggggatgtcatccaaaatatcatggagaccattatgtctgcatttgtgtcagtgggtttgcctaatttaggtctcaaatacatggatgccaaacacttagaaagcagctgttcttctaaatgtattaagcaatttactttaggtaatgtagcctataaaattttaattttggattaaataagccatatcctgcagcatgcctactgcaccttgatattcaaaagatgaaatacgggcatatttagtgaatttcttctcaggatgctccactggagaagggtcaatagtttcctaatgaaagtagtcaatagcaattcctcttaggaagctcaaggaaattagcattaaacaacaggcatgggtgtctagggttttacacaattatgtgataggattgttacatgtttcaggaaatggtttcaggaggcattgcactgaagaggcaattgataggaaacagtgcaattgtcctggctctggggctggctgcattacaatgtagaaatcagaaagacacatagcttgaaaatctatactaagaaatgcagaacatggtttttataaataaattgccaaagttagtaagggttattgcattttaatgtcatgatttggaagagaacagatgttttattgggtgaaaatttgagttaaatacccatttgatttccagcttctcaagtgtcctttatgctactgtgaggttttgagctgtgaaaaactatttattgaacaaacacttacgtagccctggtgtttccagtgctttgcacatgttaacttatttaatttacataacaatactttgaagctggcgattcagttatccctgtttctcaagtgaaaaaaacaagacacagagaggttaagtaactcatccaaattcacacaggtactaaatagtgaactcaggcaatgtatgtagatgcaggacttgcctctaaaccatcagattatgctgcatcttcctatcagttttcatcttttccaactctaacctcaatcacatttgatactcccccccccccacaaaatatactgtgtttttatttctttcttatcatagctgtaggttcagcaaatgttgaagaacagtgacaggtctgccttatgtacagtggggtttgcaacattttaaaaagcagtatggatttttctcatcttttatgtttctttttatttcatgtccgtttttctgtcaagatataacctatggagaaacgttatgaaacagcattacactgaggagactatcacagctaggggaaggctgcctcactgaagtgttactgaaaacagacaggctttcaatccatgttttttggactaaacaatgtttaaagtaactttatcaataaacaactagaagtttctaatttctaagtaattggcattactcttttcttaaataatgtactaaatatgaatagataaataaacctaaaaacttcctaatggccccaggaccctgctatgtattgtgatcactagataaacaacgtcaagacaagcttaaacctatagctttccctctacagaccgcttacttattagaaaaacgaatgaccactttgaactacgtattcttttgaatgacatactcttttgtacaacccagtgattattttattcatataatcattggaaatcatgtagtgcttttcttatgatgctgttgtcttactgtgataaagtataaacctgtacgcggtaattacatggagtcacccacaatgggtggtgcagtttgctgcttttgcaacttcagaagaatgaaaaacacaaatcaagctgccaaatataagtgagcaaaagaaggttaacaaaacaaaacaacaattagctgaaaatgagtacaaataaacctttcttttcatgtaggctctacttttcatgagtgtacccaattttgcttgcaaaagccagtgacaggaaaccaggtcctaaggcccaactgtggccaggaatatgcagccttttcctgctagcatttttcctgctagcatattggtgaatatcagaaatcgcatgtacaggcaatgctgtgacataagcaaaagtaaactttctctctagatgatgctatataatataaatataatatgaccacatatgaaatttaaaattttctagtagctgcattaaaaaaacaaatgaaattaatcttagtaatataattatatagcccaatatatctaaaatatcatttaacatgtattccataataaaatattattaatgagatatattaccttcttttatggcctgagtctttgaaatttaatcatatttacatttaagccacatctcagtttggataagccatctttcaaggctcaatagccacatatggctactggctaatgtgttggagagcgcagctctagaccaagcctttctcattctttaaaagaatttgaaatgtatgctcattagtttttttctacctctaaaactatatcctgtgtattcttgtggacagtgaataaacagatggtaaagttattctgggaacacaatatgatagaataattttggaaacagttttgaaaaaaaaaagggggggctacaaaaagcagttttatccatacttgtcatttcaactcgttttcttcctctgcaatgccgtccttcctatttattcatattttacctaccgctgtagtcgaaactttctttgttgcttaattttatttctatctgtgctatccaatatagcggccccagttacattggaccattgataacggtatcaatggtattgctaatgtgactgagaaatttttaattttattaagtttttgttaatttaaattgaaaactgctactggatgcagttattaagaaactttttagtacacttggaatatttggataggttaatctcctttttttggagatgcgatctcactttgtcgttcagcttggagtgcagtggcgcaagcaatctcggctcactgcaatctctgcctcctgggctcaagccatcctcccacctcagcctcccaagtagctgggactacaggcatgcaccaccacacccagctaatttttatatttttttgtagagttggggtttcattatgtttcccaggctggtctcaaactcctgacctcaagtgatctgcccacctcagcctcccaaagggctggcattacaggtgtgagccaccacacctggccttactttttgaactataaattttatgaaaaccgaattaaagtcaagtatttctggtaaaaatttagcaccaaattgagattgcagaaagtatacataaaaatacacactgggctggtcgcagtggctcatgcctgtaatcccagcactttgggaggccgaggtgggaggatcccttgaggccaggagttaaggaccagtttgatcaacatagtgagactccatctctacaaacaaattcaaaatttagctagatatagtggatgtcgaggatgcagtgagctgtaattgtgccactgcactccagcctgggtggcagagcaagactttgtctcaaaacacagacacacagacacacacacacacatacacacacacacaggattttataaacttggtacaaggaaaaaaatgtaaaatatatcctcaataaaatttaatgttgaatatattttgcaataacaatattttggacattttgggttaaataaaatatatcattaaaattcccttgttactttttacttttttaaagtgatgacttgaaaattttaaattacatatgcgatttgcattatatttgcaatggacagtgctggtttaggtctcacctggactttgagaacatctcaaacacttgatttggagagtaatggccaagaatataatgcattcctaaaacctgtaagtcataactggcttacaggtggcctcttgaaaaagtcacagggtttaatgaagtgcatcataaatatacattagctgtcatcagagacagcctacctttcaatttattgctctttgaaataattttgcctttttttgtttctagaattatttgtttttcttttttcatttatttacatttttaaatgaattgataattcttaccaatgccataatgggatgtgaaatgtagtagtaagcctataatttgtaaagcattttgaaattgattggtttttttttttttcaaaaaagatgttataaaaacatgttattttacttagtttctatagacaggaaaagcacatagacttattagcttattgaatttgcttttctaaatatctcagtattgaattgaactactcatttatgatataatttcatacatcacagatagctagacagtgttattttagacgtcaaaatgtttttaaatcatgaaaggggtattcatacgctatgctaacaggctgtcagcacaccagagactgatttagactgtgtctgggttactttcatgacctctaatgcatctgtgaaagcatctattcactgcaccatatctgtctttcatcagaatgaatttgtcagccatttctagggaagataatgtaaaataattttccacatgtcttatttgtatttcattgctaacatgatctataatgttcttagatagaagctgatcaattcaaaaagaatttcttaagcacctacaatgggctaagtatggtaggtaatataattgatctccttgaaacaactaaaatttacagagtcactgaaattagcctatgtgaaaagtttaaacatcagagtaaagaaagataagttaatattattaggataaatagtatgttcaaagtttgattatcatcaaggtaacataattaatattcttatagtccagttgtctaggagttaccaataagattttagagaagaggtgatcacatttttagagggtaagtataaaatatttaatatatagaatatttaaaatatttaacatctacattcaaataaagtggcaacaaagcatagtgttaagaaggacaggaaaaggccagtacggtggctcacgcctgtaatcccagcactttgggaggccaaggtgggaggatcacttgagaccaggagtttgaaaccagcctgggcaacatggcgaaacccagtctctaaggaaaaacataaaatacaaaaaaattagctgggcatggtggtgtacgcccataatcccaactacttgtgaggctaaggtgggagaatcacttgagcccagaaagtggaggctgcagtgagccatgatttgccactgcactcctggatttttctttgaaaaaaaaaaaaaaaagaatgggagaagtaagaagactcaaattctaggtctgacgtaccagtgagcagtggtatgatttggggatatgttaagttttttgagcctttatataatatgttaaatggggattaataaactctgccctacctaattgacagggtcttagtgaagatgaaatgatacaggtttgtgaagggttttgctgaacttcaaatgactagtcaaatgcaagacattattataaatgtaacttcctaaattcctgtgatggcttacaatatccctctgctgccagcaagcctgatggcattgcaaattatacttgggcaaaaacagaaaagttttggtataaattgcctcacaaagaaaagttatttttcttttgaaataacagcctcaatgtttagctctgctgttttaatgtgacaaaaattcgcttaacaattaaaaaagaaacaaaaccaaagttaggtttgactggacttaatcagaagacctcttagggttgtcatctggagctatagcctttgaaaatcattttgcacttaggtttgcaactagcaattttatgttgacaaaggtcctaccaataattgcttcttgttacattttacaatcaacttcatgactaggttagtatttgattgttttattcaaatagaagattttggaatgtgaagcaatttctcaaaacatagagccatccaggaaagagattgggattttaattgtgttgccttcattattgttggatgctccaggcagttagagttcctcaagaagtttaggataaaagaatacagtgactcatctcttacagtaaatcttggatgaaatataatttgtaagttgatcagtgttttcaggatcacatattttattttatttactttattttatttttgagatggaggtctcactacattgcccaggcttgtcttgaactgctgggctaaagtgattctcccacctcagactcctgagtagctgggactacaggtgcacaccagtgcactcagcccatcacatgtattttattaatacaaaataatgcttacctcgacttcacttcctaaaacatcataaaattgtacctttctcttttgaaaagtaggtaactccaggccctttgtgacaggaccagatagtgggttggcagtactttgctgtaggatattccactgaaccaaatttaatttctcttcaaatggaagaaaacatagcatattacagcttataattttgatttaaaaaaaaaaaacttctcagaaaattctttagagcagagaaatcctgggggaaaaaatcacatcactttttacatagcagctaaaccctagataaaaaggaaaataacacctggtagatgagtgcctgagctcagatctctagaaatcatcagtcatcccagacaactgggtcttgctattgtacttactttaatgttgtttattctcagtgatttttcatgtgcattgatatttagaacatgtctcattttaactctatgtatgttagaaattgatctgcatttgaaaagataaagatcaattggcactttgacacatttgagcattgaaaagaatattttaaaataggtttgagccattagaaataacattatgaaatataatatttaaacagaattataaaattttcagtaagggtattattgtaatagcaaaatggagtagtacttttagtgatatattttaattttgaaaatatatatttatcttttacattatatattgttatatttttacattatttatatgaaaaatatagaaaataaaatatatattatattaaatttttgtattatatatttttaaatgttatataattttttattgtattatgttgtattgtattttctttatttcttttcttttttttttttttttgagacagattcttgttctgttgcccaggctggagtgcagtggcacaatctcagctcactgcaacctccacctcccaggttcaagagattctcttgcctcagcctcctgagtagctgggactacatggacatgccaccatgcccagttaatttcttgtatttttagtagagacagggtttcaccatgttggccagggtagtctcgaactcttgacctcaggtgatccgcctttctcggactcccaaagtgctgggattacaggtgtgagccactgcacccgacctaaatatttattttttacatgtaaataaatatatacttaaatataaatatatctatattagttacattgttttgttttgcttatggtgtcctttcttgataaagaatttgacagtgcttacaaaaatacataaactgcaatgaataagataaatccttgagaaagttagtagggcagaaaaataaggcaatgatgataatgatttgatgacgatgaagtggttgttcagtgtggcatcaatactaagcactgctgtagacacttttgatgtacttactcatgtaatcctcacaataaccttagaaatatcttaggatgaaaaagaaattaaggtacatattccaagtcacagagttaaaaaggcactcatttgaaatctgtcacccggcctttgagcctgggctctgggtcactgagctcccctgccttctccgtaaaaccagcaggtaaaattacatatacattttacagggtgccacacatttggttctaagacttagcagctaaatcaaagctgcaaaagcaatcatagtgtcaataggataaaatatcagtcattttgaagataaagtgaaatgctttacagatttacttgaaactacctccaccaaatattgaatgctgtgtcaaattgtccccatatcaataatgggatatagttcttgaaagcatccacacctcctaacatcaacattttagcagcattttggtgtatcaaaaagaggtttccttttcagtatctccagacacaatgatgtagcttgtgcagttgttggtggagtcacatgttctgtgccaggaaagcagtgttgtattttgccagctcagctacagtcaaacctgtcagccttcagacctttggtatttttgaaatgcagtccaggaagtgctccagaaagtttcacggcatggttgagagtggcagcagaaagtgggaccaggagtcattgagatgggtcattttgaacatgcagtcaagtggcacatcttaatatgttggtaaacacagatgtaaaagtatatcaatatgtcacccccacactttatccaaacactttgcccagtatagttcaaatgaggttttcaattgcttcccccagaagtgtgagattcagcatctacgtatggtaggccaattgccccaagcctagggctgatgctaccttgctgtgcaaggaaagaggtgattaggtctaaatttgactcctggagtgaggcctcagggtggctctccaaggtgtcaaggggtactgtagctgttatttcaccagtgaaaagcggcatctgcatgaaactctcagaggttttttgtttttgtttcttttttgttttgtagctaaacaatgaactaacttggcactgtttcagaaggggcattatatcaaagaacattctttcactctcttttgtgactgacaagagacaagcaaagcctcttttatagagtgcaattaatcactatcaaaacacacagctgttgctttaatttggctactaatttacttatagtttgattttgccacttaaaatgaagtattatcactgaggcaacaatgtgaaagtatgctgttgtaaacgatctctgagtcataaaatctccacttgttttgccaaaaacttaatctgatgttcaatgaatctcccactgcccgaagacctctgtaatcctgggatgcgacattttgtttgcagactcttgatttagtggtgcctctgccaaatgatcactaacaaatgatagcacagccaagtgagatcagtgagatttgtgtctggtttgtgtaatggtaagccggtggtgcagctgtctgccagagactccccctaaaaactcagatatagtgagcaataatcagctcattaaaaaatgaaacagccaagaagaaccgttatggtgattgaaaacacttgctggtgcaagtgtgtccatggcccagtccaccagctggcagaggtgtagctagggtttctgagtgtgtgtaactccagggggtgatgtttacataaactacaatatgaacggcgccccctagagctgtgtaatatgatatccctgcattttgtagtctacactttttaccttttccatggtatcctattattatttaacacatttgtatttccacttgcctataaactcctttataacttgtttcattttcttgatcttcatattcccaggccctagagtgcctatggcatagagaaggggttttcatttaaagttattcaatgaatgaaataaaagtgcaaatatatttttcaaagccaaggattttagcttttgtgttttaacaagtaagaactttccaaaaataccattcatattggtatgtcagctcagttgtcacatgatataacagtgaggaatcctgcgggtgcaagtgaaagaagcccaaatcaagcaggtttaagtcaaaaagataaaaaacacatttattggttcatgtaacagaaaatcccagaattagacccatctggctccatcacagtcaaatccattgctctaaatgatgacctgaccacattcttgctccatctctcagctgtgcctttctttgtgttgctccatgcaacctcgctgtttccatcccacatcaagatggccatgaacagcgtcatactaacagccagtctttcagcaatcattttctccccatcacagcaaaatcccagatttcattgtaattacactgccttgggtcatgtgctcatcctgaaccaataattgtggtcagaggattggaacgctccgatgggcaggaggggaagcgagtgggaaaccgaaccacgtggcctaagagggtggaagaggtttctttttcaaaacaagaagaaatagatgatagaaaaaggaaaaacaagatgttttcctgacatcattcctcatttaacaggtgttgaaactagggctcagagaagacatgtgacttgacaatgtaagtcttctgacactgagtccagtgtgttttttaccttatctttcattaattgttgggctgtttcagtttgtaagtgattagaagtaagatatatatatatataatagataatagataatctgttttttatatatatacgtcacgtagcatggtgctctgagaacactgaagaacaagaaggagtgaatgggttgattgatcattagaatcataagactattttttgagcctttggttcagtatgattcagcttgatttcctaatctgtgaaaaaaggcagtttgatttttttgacagatcatacaagtaggtagaagctttttcggaattactggcagtgatttcaacaaaaaacaatccaatgcaaatggctgtcttatttctctgcactcttgactactgaaatgtttgttttgtttgctttgatttggatgtggttctagttttggtgagagtgaagtggcactttggcctgaaggactgtgtgttttagagagtcacagacattcgatctgcagcccacactcacaggagacactttcataaatgctgcatgattccatgtccacatctgcacagagcagcacatccttggtgatcacattttattttaacttagttttgtttgctttttaattcactttttgtggcagttcatcttgaaggtatgaaaaggataatgatttcacaagaacttgagttgaacgcatgcagaagaagagagagttaaagggactgccctgaaatcaacctgcttatttaagtagatttgaagaaaaacagagtatgaaaacaacaaatcagcctgacttatctaagaagagtggataaaatagtccctgcaggaggaaatgtgtaaccaaatccagtactttatcacatcttcatgaaaccttgaaatagctctatgaatttatattgtttccgaaagacatgtgatccgtgctgtcttatcctgccccactgtgaaccctgaaatcaatccattgctctctcaaactttgggaaaatgatatgctggaaatgtcaatgaactagctgcagtcacagaacgtgtttttactttctgagtttactgaagtggaagacagaaaggatgccttcctaaaaaataaccgcatatactcacagacctatattttctagacatgagtacgtttctattaaaatgcctccttaacatgagaaaaccttgtaattactttctttcacaaatcatttgcctcctttatatttccaaagatggccaattctaatttcttttttggaggtttaataaaacagaggccttggagaaaggaaatggataccgttcaaagaaatccacctcctgaaacacaagaggccagagttagatctttggtgcttccatctttccacaaatcactctcgtctgtttcagcttacattagctcataatcattgttttgtattgtagatattctgaagaagcacactatcaatggataaaatgcaatttaagatttctggctcataaggaacagtgaaaggtggctaaacattacagttgtattgcactacttaacttggaatcctttccctgtatgttttttgcaaattttctgtttgtttatttatttcacaatacttttaacagtgctaatctcttactctgtggagcagttaacaattctccaactggttatacatatcctgtgccattcgtgtcttactgctcctcttcatattgtggacaatgatttgctaagtctttttcctttaacttacagattaccagtaattttaaattcacagataacttttaaaacatttttataaatatattggttaaataaattagaaagtaatgcaaatgaaagaataataagaacatgtcattgtaatctctgaagagaccagtatatatagcatgtataaacgtattgttgaaaaggtaacatctgtatatttctcgtttagacctataactaataaatagatgttggtatctccttgggaaactccacagagtttattattcatcagatggttctctaagtctatgtattgagtatttgtcaagcaaaaagggaatgtttgctacttactagctttataaacattgggcaagttaatggacttctctgtgcctgttttttaatcttcagaatggcagtaatgatattacccacggtgctattgtgagaattaaatgagggaaaatatccaagtccttagtaggatacctggcatattgtaagtgcttcttaagtatttgttattctttaaaatatttttttcaatattgttactaaccataatactgttagagaattattttcaaaaccaagctttcacattttgggaggcagtgtcatgtttacagcagtcaggcttaccaagccagaggtacctagattcctttcctagctcttctattaaacagatggatagtcttgggacacactcaaagtttcaaaacccaagttttcatctaggaaaaacacagggagctttaaaaagttgcgtcccagagggtagctgaaaaatgagaaggtaatattattaaataatgtagaaaaatggcttcataaagaaaacttctctcaccttttttttttttagaaacagtataggtagcaattattaaactgagaaaacacttctctagtttaacaaatgatgctgaagcttgtcgttaaatctcatccaattttttttgccctagagctgaacacctttggccaacaaaagaagttacatgcctgattcttaaatttgtaaacaaataaaacattattttctgtttatttgtacaatgtagaagtaggtctaaagtaattggcaacttggcaagtttttattttatctcaacagtgaaaatacttaagccatggcatagccccagacttaatttcttatatcattcaatcttcacttttgtcttctgataaatggatactagctacttaattcttaaatccaatatgatttccaaaacaaacttattgggcatgacttcaactatactggttggttaatcttttacttttgatgtagaatttaattacagacctcaaatataactacctccaaatacaacatgaaatcttaaaactttaactgcctttaagcatagccagagtccttggaactttttatttatctgcagacttctacagaataacagtttcatggctgtggaaacatttgtcatatttcaaaatctagtctttatctgtggccctaaagtagatttaggtcttgcaagatttttttatcttataaaaatagctcacttctttcaacttcatgtaaagattgcaggctgggctaaagtgacaaagaatgccttaaggggaactttgaatgaataactttaaaggaaactattttcaccaaagacttgtccagatttaattagttatgagggtcaaagggagggagaaaaggccagaagcctgaagggattgccagagtaaaatgttaaggagaagtgaggactcacgtggagaaggaagtgtagccacttgaagttttaataattttgtgacctggtgtcaagtattgtgatttctaagggcaggagaggtaaaaatgtgaaatattaaccagcactgttcattgctagaggtgactcatacccttaccatcttcttcagtatattgggtatattatccttcaaaataataaattttggaagaatgtcatttgctccatcaaaaaggatgaaataaatgtggtttataatgaacattttctctcaacagagttaacactcttcttgcaaagccacaaaaaaatgaattctatcacatgccacaaggaaactatgattttaaaaaaggacacacatggatctagaattgatctactttaagctaaaggtagaaactgcattaataaggattgtgatgcttttttgtttttgttgtaaaacacctgccaaaattttggtaccatgtaaacattaccaaagccataaatgtgcagtggtgttttttttgttgcttgtttttttgtaaatattgtatgatggtagcttatactaaacatagtaggtcagcagttggcacataattggtttatgatagcaccaagtttgtaagggatggatcaagtgaggcagagtatttatttaaaaagcagtagtcaagacacagaacatgtatagcattatcccatttatctgtttttgaacactgtatgtgattcacacacacacacacattcattctttactgtaaaattttagctactaacatatgttactattagtgttttttgtggttgtcatttttgtttttgtttttgttttgagacagggccctgctctgtcacccaggatggagtacagtggcttgatcatgcttactacagcctcaacctcctgggctcaagtgatcccttcacctcaggcttcccagtagctgagaccacaggcatgcaccaccaaacctggctatttcttcctttttttaattttttgtagagacagaggtcttgctatgttgatcaggctgacctcgaactgctgggctcaagcgatcctctggcctcagcctcccaaagtgctgggattacaggcatgagacaacaggcctggacagtattttagttttttaataatagctttttaataaggaacatgtaacagcataaaaaaaatgcaaggccaggtgcaatggtgcacgcctgtaatcccagcactttgggaggctgaggagggtggcttgaggccgagtttgagaccagcctgggcagcatagcaagatcccatctctacaaaaatataatttaaaaaattatctgggtgcagtggcacatgcctgttgtcccagctactcaggaggctgaggtgggagaatcacttgagtccaggagttggaggctgcagtgagctatcattgtgccactgcactacagccttctatgtcacagagtaagaccatgtctttaaataaaaaaaaaaacaaaaaaaaggaaaacaagaaatcagtagtccacaggggtagctcaaaattaagaagagaaaataaacctcagatgaattagaaatgggttggaaatgttgtcacagaccttacaaagtcagaaaatacatagcagagccatgaaattttgatactggcctggaaggtcttccccttaatacctgtgcaatctcagaaaagtcactcagaccagttgcgcccagtttcctcttatataaaacgagacagttttaccaactctaaaattcactgtagatatttacttatgcaacagattacttctctataacctcaagcaatactcactcatgttttcccaccctacagttttgtaactgccagttagccagtgagaatggccacaaagaaaggagacatttctctggacctctttctcttgccttgttacccaggcctctctctcacacagtcctgatacacagccatggtggaagcacagactcctagagtgctaagggacttctagactatattcactttctggaaactgccatttgtgtgtatgatgtctttacaacttggatttttgtttatagaatatgaatcaatccatcagctcacttaaacacacttagaaaaggcaaaagatcattatgaatgtggctggaaccaataccaaggcctcgaactcatggttcaatgttcctttcaccacttgctgatgcctcccaagcagtacttgaaaataaacaaattttggtaagtgatatggtaactggaatttctacatagggagatttttaataagcaaattctgaaattttgattataagttatagcctaaattttaatagggagagaactaagataagacaaaaacaattttgtataccataggaaagaatgaggaagaacgaggaatctgttttttttttgttttgtttttttttttttttttttgctacagggtcttcctctgtcacccaggctgaatgaagtgcagtggtgcaatcacagcttactgcagcttctaactcctgggctcaaatgatcctccaacctcagcctcctgagtagctgtaactacaggtgggtgccaccacacccaactaatttttaaattttttgtagatacagggtctctctatgttgcccatgctggtctcaaattcctggactcaaatgatcttcccacctcagtcccccaaactactggaataagaagtgtgcacccaaccagtaataaggagtcttaacaaggcattaacacaaaaactaacgtattgtttattaaaagtagtaaaatgaagagtattgacttttatatttttaaaaattgggggaaacatagttttaggaatctctatgtattcatccatttattcagcaaacctcgtcttttatttatctttggttttgctatgtaccaagagtcccttagcactctaggagtctgtacttccaccatggctgggtactccagattaataaatgaaatgcacagaaacttgttcagataaactctgtttcatgctgggggggtggggcgcagaaaagaacaatgtaatatattactgtgtgataggcacaacggtgcaatgatgcccattgtgcactggtagcagggggagatggcaacaaccccatgctggaagggcccagaatgacttgctggaggaaataaagcttaaggtgaacttagaagactaggagttcaccaggcacaggagagaaaagacattactggtggagggattaaagagtactagagctcaagtgtatttaggaaaatgagagaagcttgataccaaaatagacattcaacaagaaaataaggcaagtagaatatttttatatgtggatatcttatcttgtggtcatctctaagctaggtcatttacattcccttatttcatgtaacccacacactgtcgccacattgccatatctacagattttatagccacaaaaactgagatttggtgaaatgtcagaagtcacatacctaataagcagcagtactcatatttaaaactaggtctgtggaatctcaaagcctatttttatagcaattacacaattcttaatctatgagaacaaaatctatattctttcctagatacagacagctctgcaatcatttattcaaaaaatacaaattcaactccctgagcataataagcaccaagtatgcaaagatgcataacagccagctagttagctacagagctaattataaaaggtagtgttagaaatagatataagcccctaacaagttgaagatacgggtgggagagagatagaaaatggttctaaactggcacaggtgaagagagtcagagaaaacttcctaaaagaaatgatgctggctgggcatggtgactcacacctgtaatcccagacagcactttgggaagccaaggtggaaggatcacttgatccccggagtttgagaccaccctgggcagcatagcatgaccccatctctacaaaaaaatgtaaacattagccaggcatagtggtgcatgcctgtagttccaagtactcaaataaggctgaggtgggaggatggcttgagcccagacatttgaggttacagtgagccattattgcaccactgcactccagcctgggtgacaggacaagaccctgtctcttaaaaaaaaaaaaaaaatatatatatatggaagagttaggtaaaatacgatagaaaagtcattgaagacagaaggtgtagaaactgcgtgttgtgtgcataggatgatacagggtctgtgtttttggaatgtggagggcaaggcagggagtggtgaaagatgaggttggagtggtcagcaagctatggaggccctatagaccatgtgggcaagcttggattcatcttataggaaacgaggagctacaggaatttaaaccacagggggacttagtcagatcttacctttagacagcaggcacacaacaacagttatgaagatttgaaaatgtttaggcaaaaaatgatgataatagtggaatccgaaacagaaagaaacagattcaaaaagtatgtaggtcatacaatgagtagaacttcgttgtttttatgttggaaatgagggagaggaaagagtcaaagataattcttagatttctagcttggggcaatcctttgattttgaaggttttctgtgctcatgaacttcattaggacttatggacttctgtacttttcatgtgtattattaacaaatcatttcactgaattgaagtaataacttctacattctatagtcactaaaatagttttttaatttttaaagaaaatcttaaattagagtttttaaatggttatttagttaaaatatactttaaaccatatggtcttatcgttggttataactatttttagtgtcacaataattttaatgataaacattgtaccacatcaactaagttttctttttttaaataaaccaaatattcttattttcaatatatttctattttcttttcatagtttgcaatattataaatttaattcttgttttcagtttggtgatgttagtctccttcactatcttagcctaacactctgatataattttccatgcttgtgacttctaaatatttataaaacagttttttctttggaacaaaattggcacagtgttgaaaatttcttgaagatgggttataggtacttgaggttctttaattttgcatatacttaatttttataatattatgaaatatataatgcatgcatatttttgatatagatagatatggttagattatattcaggtaatttaatttataatatataatctatccatggggatgacattaattttcttcatagttcttgaaacaagtcatcacttttagatgtgttcacttaaaatgaaaagttttagaacccgcttaggtgtgtggtagagctgactgcagtaaaaacaattgagacccccaaattgcattaaagcatttttacagttgaagagcaagtaatggttttatctgggaagatcattaatagatttttgaatgaactcaaagtcattaaggaataaggcattaagtgcagaataaataagtgaaagtggaaaaaattttaaaggctatattgatggaaaatagaatcaccaaatttggctttggtggaatggtattaagtgaaatggaaattaaataagctttgggccatgttgtgtggaatgctgaaagtttccagcagaagctgttataattccacattcatttgggaatgctaatgtaatgatgtggcataaatggagttgagagaagaaaatctagagcaaggcaaatcagtattgaggctcttgtaacaattcaaataaaaatgataaggacctcaacttgagtcctggtgatgaaaaggagaataggagttgagggtgagtgaaataatgaagagctggtatgcactgtaattgtcaatggattaggcctgacagggagaaggaattccaagcttttgaacgatcttgtagtctggattggggagctgtgtcaacaggggaaggtagttttagaaggaagataagttcatctgatgtcaagtgttgaacaaaatggacaaagtttctgatcccataaagcttggagttttattggaagggaaaggaaataaacaactaacttagtaaacaagcaaatttgagaaaatgataggtagtaagaaataatcagatagaaggaaacgttcttggagggagaaatagacttgagatacaatggtcaagaatccctttgtccagggtacatcctgagctgaaacctaaacggcagtgagaagaggaaatatccttcctagagaagtgaagggcaagtgtgaataccctagggtggaaatgagtttggtgtgttcaaagatacaaacaccagtctgtctgtctggagcatggccttgaaaatgagacatagaggctggcagcaatcagatcaggggagttcttttcggccttagtaaggagtctgatttcatacttggtcagtgcaaaggcattgaagggttttaagaaacagcagagtggagtggaaggttgtgtatgtgacatgatctgctaactgaagccacagttgggatgagatgccttggggagagactaaaggagaaagcttggtaagtatctgactgtatccaggcagcaaggaagaaagggaaaggtcgaagacataggacaggaagcaatagagtgctaatgaacagtcccccaaagaggaggaagtttgcaaaaggagagagttggtgcagtggggtcaaatgtcagatgaggccgagaggttgaaggggcactgtattcagaggtgtcatcttatttctcattcacaacacgtattagagtcaacttgaattattcagtgaaggaatgtatttagtccaaggctctacacatctcatggtggatggcattagcacttgcatagaagatacatattttttttaatttttaattttttttaaagacacaatctcactctgtcaacccagtaggagttcagtggcatggtcatagctcactgtagtctcaaacccctgggctcaagcaatccttcctcctctgcctcccaaagccccaggattacaggcatgagccactgcacctggccacatagaattttttaaatgtgggaactggatctgtacttacaaacactaaagggacagtttttaaatatgcacatttctgttttattttgtacaaggatttcttccaaagtttcatgattttgattaatagagtaattcctataaacttctgtcttatcttacagaacctctttaagaaccacaatgcaaattaaaaaaaaaaaaagcctaaccctaaagtcaggtttactgcctgaccctgaagtagacattggttatgcagcagtgagtaagataggcactgcccttcaccctctgaacatgccatctcatggggaagaaaagtgaaccaggaaaacagcaaggagcaaagggagaggttagcaagggctaatgtccaggagtggggaggccttcaggtgaaggggcatttaaactaatatctgagaaatgtgtaagagttatgagaaatggtggggatgacattgcggggaggagaatctgacagtgtctgcctggccaggctctagtccccagttattcaatcaaacaataatctagatgttgctctgagaagcttcagctctgattttaaggcctttcaactgattgaatcagacacatccagattatctagaataagctccctcacttaaggtcactaattgtggtctcaatcacagctacaaaataccttcacagaaacacctaagttgatgtttgattgaataatggggaactctagcctggccaagttgacccatataattgaccatcacagagatttttccagagaagagagcatgtgtcatgcaaatacattgtaataatgaattttcaatctttattagattattctatattataaatcattcttattagttagctagtaaggcttaaccctatgtttaagttgtcctatttgtctgtcaataattattgaatttttacaatattcctatgggtaatctttttttgttcttcaaattcctgaggttcacaatactagtacagggtatgtagctctaatcattaatagggagtaaggaaatggtagaacttttttttttttgagacggagtcttgctctgttaccaggctggaatgtagtggcacgatctcagctcactacaacctccccctcaagggttcaagtgattctcctgcctcagcctcctgagtagctgagactacaggcatgtgccaccatgcccagctaatttttgtatttttagtagagatggggtttcaccatgtttggccaggatggttttgatctcttgacttcatgatctgcccacttcggcctcccaaagtgctggaattacaggcgtgaaccatcgcgcccagccggaactttttcttaattccctatgtaagaccctccacatattagcaaacgtttctgatatcctaaaattaagcacgttaaagtgaatgtcaagtactaatgagttacaaattagttataaacatgatatttacataactagactaatagaccaatttctatcataaagtcagattatcttaaatttactatcttctatttcatgatttctttttataagtaaaaagatttcattgaaatataaagtgtggcttccactatagtagctaagacagtctcagcaaatagaaagtgatcaaccaatattgatttctaagccaaatttgagaaagctactaaactatgttagtttaaagtcagaggtcacagacatgaggacgttagggcattggaaaatagagaaaaatgagataaaggcaggaagaattaaagaaatgttacacattatacttacaagtaccatggtctataaacacaggttttaatggagacatcaagtgattttttttatagagtcagtatcactgatttgggagggttgaatttaatgaagagacttgtggttattctaagctgaagtaataggttgcatgtgggaatattttatttctctatctcttgatttgaataaaagctcaaaaagcagaaaaaataggaatcactgataatctaggatttgaaaaatctgtttcaaataaaggttaaaatcccccataaagccctccagtccttttccccagaagtaatgaccatcaatgtttgtgtgcatcagcttctaggttttaccttatatttcttgtaatgtgtgtgtgtgtgtgtgggtgtgtgtgtatgagggagatacagccacccacccacacacacccacacacacacacacacaccctttctctctcattctttttatttttgtctgcattttaaaaatttgtaatttttgtgggttcagagtaggtgtatacagttatggggtacgtgagatgtattgattcaggaaaacaatgcaaaataattacatcaaggtaaatggagtattccttacctcgagcattcatcctctatttgtgttacaagcaatccaattatactcttttggttatgttgaaatgtataataaatttttgttgactgtggtctccctgttctgctatcaaatactagatcttatacattttatctaactatgtttttatacccattaactctaccccctcccgccctccctctcactacccttcccagcttctggtaaccatcattctattctctttctccatgagttcgattgttttactttttagctcccacaaatatgtgtgaacctgtgaagtttgtctttctgtacctggcttgttacacttaatataatgtcctccagttccacctgtgtttttgcaaatgacagaaacagtctttttttataactaaataccattcagtcataaaaaatcttttttatagattgtagttttcattggatttctgtaatgatcaatggtgttgagcaccttttcatatacctgcttgcaggtagtttacaaatgggtactttgaaaatgtggtagatatacacaatggagtactatacagtcattaaaaaatacttttaatgactgaatagtactccattgtgtatatctaccacattgtgcatatctaccacattttctttatccgttcatctgtggatggacacaggttgctttcaaatcttggcaattgtgactagtgctacaatgaacatgggagtgcaaatatctcttcaatatactgatttcctttcttttgggtatacttagcagtgggattgcttgattgcatggtagttctatttttagttttttggggaacctccaaaccattctccatagtggttgtactaatttacattccccccaacagtgtatgagtgttctcttatctccacatcctttccagcatttgttactgcctgtcttttgaataaaagtcattttaactggctttactggtcattaaatttcattgtaattttgatttgcatttctataatgatcaatgatgttgagcacctttgcatatacctgcttgccgtttgtgtgtcttcttttgaaaaatgtcttttcaaatcttttgctgattatttaattagattattagattttttcctgtacagtttgagctccctatctcttctagttactaatctcttgtcagatgggtagtgtgcaaatgttttctatcattctgtaggttgtctcttcactttgctgattgtttcctttgctgtgcagaagcttttcaacctgatgtgaacccatttgtccatttttgctttggttgcctgtgcttgtaaggtattattcaagaaatctttgcccagcccaatgtcctgcagagtttccccaatctttatttttagtggttccatggtttgaggtcttagattcaattctttactccattttttattcaatttctgtatatggtgagagataggggtctagtttccttcttctgcctacggatacccagttttctcagcatcatttatttaagagactgtcctttttccagtgtatatgtctggcacccttggcaaaaatgaattcactgtaggtgtatgaatttgtttctgggtttgttattctgttccatgagtctgtgtgtctgtttttatgtcagtaccatgctgttttggttactatagctctatagtataatttgaaatcaggtaatgtgattccttcagttttgttctttttgctcaagagagttttggctattctgggtgtgttgtggttccatgtaaattttagcattttttttctatttctgtgaagaatgtcattgatattttgataaggattgcattgaatctagattgctttgggtagtatggacattttaacaatgttggttcttccagcccacgaacatggaatatctttccatttttgtgtgtcctcttcaatttcttctgtcaatgttttacagttttcattttagagatatttcacttctttaattaatgcctagggattttattttatttgtagccactgtaaatgggattatttacttgacttctttttcagattgtttgctgttggcatatagaaatgctaccgatttttgtatgttgaccctgtatcctgcaactttactgaatttgtttattagttccaatagttttttgatgaagtctaggtttttccaactatatgatcatctcatctgcaaacaaggataatttgacttctttctttccagtttagatgccctttattttttttctcttgtctgattgctctagctaggacttctagtactatgttgactaacagtgatgaaagtgggcatccttgttgttttctatatcttagagaaaaagctttcagatttgtcccatttagtatgataccagttgtgggtttgttgtatattacttttagtgtggtgaggtatatttcctctatactcagtttgttttagtctttctatcatgaaaggatgttgaattttatcaaatgggttttcatcgtcatatgttgttgattttcattctctcaataggatgtatcacactgatttgtgtatgttgaactatccttgaatgcctgggataaatcccactgggcaatgatgaattatctttttaatgtgttgttaaattcagtttgctactagtttgttgatgatttttgtgccaatgttcaatatcagggatactgacctgtagtttgatttcttccgtatgtccttctggtttgggtataagggtaatactcacctgatagaatgagttttgaagtattccctgctccttcatttttttgaaatagtttgagaggattggtattagttcttctttaaatgtttggtagaaatcagctgtgaagccattgggtcctggcttttctttgctgggagactttttattacttctgtgatccccttacttgttaatggtctgttcgagtcttggatttcttcatgtttcaatcttggtaggatgtatgtgtctagaaatttatccatttcttctccattttccaatttattagaatatagttgctcacagtagactccaatgatcctttgaatttctatagtatcaggtgtaatgtctcctttttcaaaaaacttgaaaatgaaaccaacttttgtttcattgatcttttttattgttttcttcatttcaatatcctttatttctgctccgatctttattatttcttttcttctactacttttgggtttagtttgctatagcttctccagtttattaagatgaatgtttaggttgtttgtttgaagtttttctacttttcagatgtaggcacttaaagctataatttcctcttagtactgcttttgccatatcccataggttttggtatgttgtgtttccattatcatttgtttcaataaatttttaaatttactttttaatttcttcattgacccactggttgttcaggagcatattgtttaatttccatgtgtttgtacagtttccaagattcctcttgttatttatttctaggctattccattatagtcagagaagatacttgatataatttcaattttttaattttttaagacttattttgtggcataacacatggtctatccttgagaatgatctatgtgctgaagagaagaatgtgcattctgtaactgctgagtgaaattttctgtagatatctatcaggtccatttggtccatagtttagattaagtctgatgtttctttgttggttttccatctggatgatctgtgcaatattgaaagtagggtgttgcagtttccagctttaactgtattgaggtctatctctctctttagctctaatatttgatttatatattatatttgggtgctccagtgttggatgaatatatatttacaattgttatgccctcttgctgaattgacccgtttatcattttataatgaccttctttctctctctctttatatagtttttgtattgaaaaatctattttgtacagttattcctgctcttttttggtttccatttgcatggaatatctttatctgttcctttattttcagtctatgtgttcctttataggtgaaatgtgtttcttgtaggcaacagatcattgggtcttattttttttgttttgttttataatccattcagttactctgtgtcttttgattggtttaatcaattcatagtcaatattattattcacaaataaggacttattcctgacattttgtgatttgttttctgtttgttttgcagtcatcttctcttccttctttccattctccctgtcttccttttagtgaaggttttttcctcagttggcatttttaaatttctttgttttttattttattttgtgtatgttttctgatttgaggttatcatgaggcttgtaaatgatatcttgtcatccattattttaaacagatgacaacttaacactgacttgtataaacaagcaaacagaaaactaataaaaactctacactttaactttgtcccctgactttttaactttttgttgtttctatttattctttattgtactgtctatgtcttgaaaagttattgttattatttttgatcagttcaccttttggtctttctactcaaaatatgagtagattacataccagaattataacgttataatattgtgtgtttttcgtatacttgctattaccagtcagttttgcaccttcagataatttcttattgctcattaacattttctttccaattgaagaactcctttttgcatctcatgtagggcaggtctggtgttgataaaatctctaagcttttgtttgtctggaaagtctttatttctcctttatgtttgaagtatattttctcttgatatactattctaggaaaagaagattttttttccttcagcactttaaatatggcaggccactctatcctggcctgtaaagtttccactgagaagtctgctgccaggtgtactggagctccattttatgttgtttttttctcttgctgcgtttaggatcctttttttatccttgagtctttgggagtttgattattaaatgtcttgaagtagtcttatttgggttaaacctgcttgatgttttgtagccttcttgtgcttgaatgttgatatctttctctaggtgtaggaagttctctgttattatccctttgaataaactttctacctttatatctctctctacctcctctttaaggccaataactcttagatttgtccctttgaggctatttgctagttgtggtagatgtgcttcatttttttctcattcttttctaatttgtctcttctgactgtgtactttcaaataacccgacttcaagcttactagttctttcttctgcttcattaattctgcttttaagagactcttgatgtactcttcagtatgtctgttgcatctttcagctccagaatttctgcttgcttttaattatttccatttctctgctaaatgtatctgatataattctgaattccttctctatgttatcttagatttcattgaacttcctcaaagcagttattttgaattctctgaaaggtcatatatctctctctctccagcattggccagtggtgtcttatttaattttctcggcatggtcatgttttcttggatggccttgatacttgtggatgtttattggtgtctgtgcattgaagagttgtaatctaagtttttggtcactccagctatgtgtgcattaggtggcatcccaagcccagtaacactatgacttttgcagactcatagaggtcttgtggtcttggataagatctggaagacttctctggattactaggcagagaattttggtctcttcccttactttctcccaaacaaacaagcagagtctccttctctgtctactgagctgcctagagcttgaagaggggtgacataagcatccctgtctctacccaacactgggacaatgctgggtcagacctgaatccagcacagtactgagtctcacccaaggcccatggtagccactgcctggctatcatctatgttctctcaaggccctagggctctggcagcaaaactagccaggcctttgttcttccctccagagaagcaagttgcccccagccctgtgcggatccagaggtaacatctaggagccaaggcctggagtcagaaaccttaagaatctacctggaactctattctactgtggctaaactggcacccatgccacaagacaaagtttctcccgctcttccctctcctttccaccatcagaggagtctttttccatggccactgccactgccaccccaggcccacagcaagtactgcttgactaccaccaatgttcacttaaggcccaagggctcttcagtcagcttgtggtgactcttccttcagggcagtgggcccccctttggcccagggcagtttcagaaatgccatccaagagccaaggcctggaattgggaacctcaagggattcatgtggtgctctgtcccactgtggctgagttggtacttaaggtgcaagacaaactcccttttactcttccctccctttttctcaagcagaaggagcctcatcccagtccattctcactacagctgggaatgtgctcagtctgaagccatatgaagccagcacgtctctgagtctcaccccagaaccacagcatgtaccgcctggatattgctgctgattattcagggcctaagttctctttactcagcaggtgattaattctgccaggacttggtccttcccttcaaggtagtagttttgcttctggcccaaagcggctctagaaatgtagcctgggaactatggcctagaatatgggcctcaggactgcccagtaccctatcctaccgtggctgagctggtagctaagtggcaaaagaaagtcttctttactcttccctctcctctcctcaagcagagggaaggaatgtctcctataagctgtcagccatgctgcccatggttaggggaggggtggcacaagcactcccttagccagcctggctggtatctcactaggtagcatgttccccaagtccagtggttccgagcctggcatagaaccattatttgcccaagaattgtagtctttgtggcctagactgcctttcaagtttatttaggaccttacagcccttagcccatggtggcaaggcttaatagaacgcaggttctgacggtaaggatgggtgagtcccctctggctagggcagtataaatgctccctctgtgggccccagctgaattctgccccattttggtttctgctgtgacagggtagcactctgttccaatgcaaagtcgcacaatcactgccctcttcctcccccaaggacacagattctctctccacacctcacagctactgctgggagttgggagagtggtgacattaacaattcaagactgtctttcctacattcttcagtgcatttttcagtgatatgaagttaaaaccaggtactgtgatcactcacctgagttttggttctcatgaaggtgctttatggtgtatatagtcaatttgatgttcctgcagggaggacaatcagtgaaggcttccatttggctatcttgctctgcttcctcccctcccttcctccctctctccctccctcctttctttctttttcttttttcttttctttttttctttctttctttctttctctctctttcttctttctttctttctctctctttcttctttctttctctctttcttataaaaaaaatggtataattctacacaaactggccaaaaacttgttttatttgcttgcccttctaggtcaatacgtacaaatccactttcttatttctattggccagccagtgtacttttgcttggatgtttcagaaattatttaaccattcctcagttggtggtcagttgttctcagtcttattcaaataagtaattccagctgccttttgttgtaatatatcatgtattctttagacaaataatgctgcagtggacatcttcgtacatatgtatttacactttcatgtcattctgtctgtaatatggattccaacaagtgggatagcttatttggagatatgcagagatgtaatttttacttatattgtcaaattctatcttctgtgatacccatttacactccagccatatatgcaattgcacatttcttcacctcctcatcagtcattgagtattttttagctaatttggtaagcaaaaattttcttttgcaaaaaacatcacattgcatttattaaattatttgcaaaagggggtaaatgtgtttgtgtgaaaatgtcttctaagaatacactgtagactacatggcagaggtagagatgataggctggaaaacacttaggaggatagattaattaataaaagtcagagttcatgaaggcttaagcgggcagaaaatggtgcccccttttcagagttaagtggatatcaactagcatattagctgtatattattaataatgtatgggcatgatttggcaagtatttctttaaaagcaaaaaaaagtttgttttgaagttagaaatcattcagtacttccaagttgtgcaatacatttaaggcattatgtagtcaacgacttgaatttaaatgatgaatccattaatatattgcttgaaatatagaccatagtctttgtcttcctgaggatattttaatcaaaatattaaaaataagctggagtctcattcaactagttaattccagctgccttttgttgtaatatatcatgaattatctctctgatggatgggtagccaaatgcagataacattagctttgcagtcattcattttaaattgctcttgaatcacttggaagtaaattccatttcagaggagtatgcttcaagtctcagacaaagagataatggtcctatattttatgatataagcaataatagtttaagtcttatgattcagaaatatagaaacttatgtattaagttgatgaaaattaaggcttgatatttagcaataaaatcagcaacctaaagctccctagattgatgttcatagcataatatattcctgtgaagaattaggtggaatgaaagtctataaaaataatacatggtgaaaagctttctcttcttgggtataaatgaaacagcaaaagcctatgtgagataacagaaaaaaggaaatactgagatttattgatatcaagataaaaatggtactactgttggaatgtcagtattgagtaatagtagaaagtggaaaattaagtcaaatatcagaggagggtaaaatgaataatagcgttacatctaaatcaaaaatgcgttaagttaatactgaattcaatgtacagaacaaaagcaactctggaaattttaccttgttaatttgaatgaactacatgtacaaaacgtgtttcacaatttaattaatcaagtcattttgcccagatagcacaatgcagtcaataccagcagctggggtgtgcatttatagaaaaggtaataatttgggatacctgtggcatgttgccagaaataagttcacagtctgaagttgctgttcacaaactgaattcttattatcaccctaatgtcactccttcagatatttatattaaaaaataaagtggtaagaggatgtactcactgatgtccttgaagaaaaaaaaatcaatttttttatagctccaagttttgcagcatgaccttaagctgtttttttcattttgttttgtggggtttttttgtagtatggtaatattaattgaattgaaggtactgatctcagtaaacagtctaccacttcagggtggaatcacagattttcttatccccatgggttcagcagtcctttaatgccctgaaaaagtaaaaattttagcatggcagggattttacttattttggaacagaggacctttgatgggcactagggaacatccaaaggaaggccacagacacataaagtcacacaccttcccttgcacaccattgcaaatacgcttgcttagagaattgatatgagcctgagtttctcagtctgaacaattgtgttttcctttagaaaatagctaattaccacaagaagctggaaaacaaactaagttccaaaatgaatatccagtaataaagatgcaatttcatttttcagactttccatgaagtgagatgctcatttacctgacatttgtagacagggctggtttcacgggtatgtgacctctgctgtcacacaggaccagtgtttggtttaatgttctgctgtcacaatctcagaattcttaataaatttttaatcagggatcttgaactttcattctacaccgggccacacaaattttgtagccagtcctgtttgtagatatttctattgttaaaacatcttataattgtaaatgaatctgaggcactataaactctaaaattccttgtgaatctcttaggaatgatcaaagttgccattagtataatattcatgcatttgtaagatttttattgaccccatataatgtgctagacttagggaaaatgaaaatgaaatcaatatagtccctgctttcaaagagtttcatctctagtgttaagcatttattgtatatttcaagttttttgaaaattggtaatagtcttataaaaccaattgcaaaactgaaaagtagattcctccacttgtatgactggcaaatgcattacacagaggagctaaatattcatgtaggataaatagtatttgtagctgatcactttatctttaaatacatgtagctatagtcatgctggatgtttaaattaaagttttcatctattatttcagttgaagagaattggcttgcttgtttcattttcaaaactttctctagaatagaaaaaagttaggatacagtttcgtaaaaagatgatttctaaaataacactgtatctgagaattaatgctgaaacttgacagttttctatggagcaagaatcagaaagtgttcttttagtatgttaacttgatggtgggaccaacttcgatggttgagtaaggtacccagctcatttttgtatgtggagaaggcaaggatttcacaacaggggtgagcccactgataatcagcttatttgcattttatcatatctgtcccactgtacatatctactaaatcaagttcttgaattttctatattaatatcattctcaacaactgagttgagtaatagaagtgatatgccatattgcctataacaggaattcatccagggcataggcttgactttactttgtgaatattataggaaatcttaataaactactatgctgtggttggctaaggcatctctctagataaacttttaacgattgattctgcagaaactataatgatatgcaaagaaaaactggatttattaaattaaaacatttctaatgatagaaatcttccttaataagttgcattttcaagtgttaacaaacatcttgaaaaatcaataactgtgtgaaacctcaaaccaagatataggttcatctctctttacttgtggtgatcatgttgtcttaaaagtcaaaattaaggaaatacaaagttagtttgcccatacattttctaaatatattgttaaattatcacttttttcccagcatttaacagagctgcttttgacttgaaaatgtgtgacttttttgcttccatttgtcttttcagtagtttacaataaaataatcagaagaaagagatacatgctttggcaaggcagagtaatcaatttttagtgcctatgaagtttttctatagcatgtgaacatttaaatacttttgctatattattgaataaggtaaggtagtatacaatcatctgtatcttgcaatcattccttttcaagttttaccttctgaaacaatggctgaaagatttattatactttgcatgcttaaataaatagttattaaatacagtcacatgttttatgtgtacaaacatagttaaaaaataaagtctagttgaccttccaccttcataaatagtaataattaaaaccaacagctaacttctatagaatttgagtcatgttttgcggagctttattgattatcagcactgtccatcatcacatataacagtaagtgctttagaagaaaaaaaattggttaagaccttcaagacatcagtttcatgctgatggatttgtcaatagttcagttcctcatccctttgcctttctgagctatgtttatttaagcagtcttgaatgttcttgcatattgactaaaggagctgcaattgatggaaacaaggttattctttagtaagctgacaattttggtccttgatgttcaacaatggaaaaactagaaatgatgccctgccaaaagaaagcaaattaaggaggtaaagtgagaagaaatatctaggtataggaaacaacatttacatttcagtgtcaaaaatttactactgtgggcagcttggaatgctagttttgtcagtgatgcaagtgaagtcaatttttactgcaaaacagagtagcagagaccggacatcattactatttgacagctatcttatgacttgaatgaaaaaagttccaagccagttttcttagtggacagatgtccactataccaatggctatcttccaacacagggcaacaactgaaggagaaataaaatgactttcaagacaatatgtgagcaaccagcctttaagtaccaataccatgctctatatttactactgaatatacgtacatttaaagaacttgtaaaaaaattttaattttgacatcagagttttcaattacgtatttgtaaccagtttggggaattagtaatagctctgttctcctctgtcccaattggaagattattattaggctgaacttatttatggtgtgttggaaagactgtttttaccttgacttttgtaaaacacaataataggttttattataaaaagcacatttattattaattttttattttgaatcatgcagaatccaggtttaaaatgtatctcaaagtgtgcaaattatctaaagtggtttttaaattttgggttgaatgaatatttcacacaatgacatcttttgaaaataacaacagatttgaattggaacgtaaatatccttaattaaagtttctaatatttctgctcggctccttgcaaagtgtgtaagctttatctatgagccttatgattttcaaatacatgtttctaatgaagttgctcttgcttttgtctgctctcaagggtgacactctataatgggaaatgtagtgatacattgggaagatcatggtttttaattgagatacacatgaattccagtttcagctctgctatttactacctatgtgctcagggcaacttacttatcctccctgatgttgagttttgctgtgtatagaaatgggaataataatccatatccttaaatgaccagtcaatagatctaacatacagcctggcacacagcaggcattcaaatcacttaattactgcatttataagtcactatttttacatgactagcaagtagaaggcaagttgttacaatgtgttaaccatcttccactttcttcttctttctcagatgatgacttttttcatgaactcccagaaacttttccttctgatccacctgagcctctgccacatttccttattgagcctgaagaagcttatattgtgaagaataagcccgtgaacctgtactgtaaagcaagccctgccacccagatctatttcaagtgtaatagtgaatgggttcatcagaaggaccacatagtagatgaaagagtagatgaaacttccggtgagttttccattgcatttgcattgcacttcaagattcacttactcactactctagcatgtggacatactgttatttcaattagtggaatggaaaatggagttattctctgacaaaaagttttgaattggtttggttaaggtttggtgatcttgtttcatgtgttgaaaagtaaaatggtgtgaataaatcttgacttgcttcctgttggactacatgaaattaaaacatggttcatacttaagaagataaataatgcgaatgaatagactgacaatgttaaatgcccaagcaaataataatattcttgaattgcacctgcgtggtagtcagatctaaatatcccgagatctggggagcatttttaacttggataaattgaacgtgtttacattaatgtctaatgttaatccatgtgcatagtttgcccttatatttgttaaggatttgtaaatgtcatagattcaaagtatcttatactcataacttacatccaaagtgaatcctaacttcctaactcttatctaaaattaaattgagggtgattcagaacagtgatagtgtaggattcatgaacagaagaaatggtaattgtagccctttctcagagggtcttgatctgattatctttgcccctggcttggttaaaactcctgactttgctgctctgtaaataccatccttaaagataaaatactaaaggcaaagaaaggatggagtagattctaataacctgtgggatttcaattagatataaaggatagcaattttctgctacacaatggataaattagggtagttgtggaatctcctggagttcttttaaattggaaacatatatatctttccatggtagcatacgtgtttttgctctccagcagacagaataactctttgaactttcagatctcttccagacttatgattttgtaatgttgacatatatttaagtattaatactttattattcaacattttcaagccaaagaatatcaagcatgacaaaaattgaagcatttaaatatcttttttacccttactagatatctctctgaaccaaaatggatacacatgttcaaaatccaaattgtaaataattcatatttgttcccaaatgttggattaaccagagacaagtagagaccagcacttgagggctctactttctactttcaagatctccgacaagataaatagcatattgatgtgacagaacataaagaaatagaacagactatgagaggactgagaagaggcaactttttaaaaagcatgtaggacatattctttataacataaatggtctttggaaaatcaggtggcaactctacataattgcttgtcaatttgtgaatcaatatgctcactgaatgcaagctgatgactgcagatataactgggtatccaattatagggtagcttacttcagggaattgtcccacctcttggtctaattactcagaaaataactccaccagatgtcttcaaaatctcaagtggattgagttttatttgtttcagctcatgtatttgtatagatttcaaacaaataagctttaatgataaaaggaaagagaaataacaaaaactcaaatacgttacaacatattcaggcttatctttactaaaataatgacatgcctatataggaagattataaatagaaacaaaactattctttttttattattatactttaagttttagggtacatgtgcacaatgtgcaggttagttacatatgtatacatgtgccatgttggtgtgctgcacccattaactggtcatttagaattaggtatatctcctaatgctatccctcgcccctccccccaccccacaatagtccgcagagtgtgatgttccccttcctgtgtccatgtgttctcattgttcaattcccacctatgagtgagaacatgtggtgtttggttttttgtccttgtgatagtttactgagaatgatgatttccaatttcatccatgtccctacaaatgacatgaactcatcattttttatgactgcatagtattccatggtgtatatatgccacattttcttaatccaatctatcgttgttggacatttgggttggttccaagtctttgctattgtgaataatgcctcaataaacatacgtgtgcatgtgtctttatagcagcatgatttatagtcctttgggtatatacccagtaatgggatggctgggtcaaatggtatttccagttctagatccctgaggaatcgccacactgacttccgcaatggttgaactagtttacagtcccacaaacagtgtaaaagtgttcctatttctccacaccctctctagcacctactgcttcctgactttttaatgattgccattctaactggtgtgggatggtatctcattgtggttttgatttgcatttctctgatggccagtgatggtgagccttttttcgtgtgttttttggctacataaatgtcttcttttgagaggtgtctgttcatgtcctttgcccactttttgatggggttgtttgtttttttcttgtaaatttgtttgagttcattgagattctggatattagccctttgtcagatgagtaggttgtgaaaattttctcccattttgtaggttgcctgttcactctgatggtagtttcttttgctgtgcagaagctctttagtttaattagatcccatttgtcaattttggcttttgttgccattgcttttggtgttttagacatgaagtccttgcccatgcctatgtcctgaatggtaatgcctaggttttcttctagggtttttatgcttttaggtctaacgtttaagtctttaatccatcttgaatgaatttttgtataaggtgtaaggaagggatccagtttcagctttctacatatggctagccagttctcccagcaccacgtattaaatagggaatcctttccccattgcttgtttttctcaggtttgtcaaagatcagatagttgtagatatgtggcattatttctgagggctctgttctgttccattgatctatatctctgttttggtaccagtaccatgctgttttggttactgtagccttgcagtatagtttgaagtcaggtagtgtgatgcctccagctttgttcttttggcttaggattgacttggcgatgcgggctcttttttggttcaatatgaactttaaagtagttttttccaattctgtgaagaaagtcattggtagcttgatggggatggcactgaatctataaattaccttgggcagtatggccattttcatgatattgattcttcctacccatgagcatggaatgttgttccctttgtttgtatcctcttttatttcattgagcagtggtttgtagttctccttgaagaggtccttcacgtcccttgtaagttggattcctaggtattttattctctttgaagcaattgtgaatgggagttcactcatgatttggctctctgtttgtctgttgttggtgtataagaatgcctgtgatttttgtacattgattttgtatcctgagactttgagaaatgaaactattctaatatcgaacgcttataacaatttcatgctatgttggtaacacacccacacacacatatacacatatattgagagagatttcttctctgtgaaatctttattttttataattgtacataaaaattaattaatattacatacatcaatgaataagactaccttataaattaactgtaaactaaaatagtttgcatgttttcatttaaattcaggagagatagatgagaactaagagaagatttaggaaattcagtactttctcagttctcctgagattcaggaatggagtaatatacaacatagctttattaggagctttcattttcatccagaactttacagaaaaggccagcatccagccaaaggctgacatactagactcatgtaggtattacctttaaagttttgaaaaacttggtgggaatgtacattagtacaacctctatagaaaacagtatggagatttctcagagaactaaaaatagaacaccatttaatccagcaataccactacttggcatctacccaaaggaaaagaaatcattacatcaaaaagatacctgcactcatatgtttttcatagctctattcacaatagcaaagatagggaatcaacccaagtacccatcagtggataatcagataaggaaaatgtgatatatacaaacaatagaatactattcatccataaaaaagactgaaaccatgtcttttgcagcaacatggatggaactggaagccattatcttaagtgaagtaactcagacccagaaatatattaataaatgccacatattctcacttgtgagagctaaataatgtgtacatgtggatgttgagtgtgaaatgatagacaacagagactcagaaggatgcaggtgggtgaggggggttggtaatgagaaattacttaataggtacagtgtatgttattcaggtgatggataccccaaaagccctgactttaccactatacaatctattcatgcaacaaattatacttatatcccataaattactacaaataaaaagaatgaagttaggaaaaaggcaaagatgcccacagataccattattaattggtattattctaatctactagccagtgccattagacaacacaagtaatgaagaggtacaaaaatagtgaagaaagtagaaaattatcatttatgacaaattatgtgattttttactcctggaaaatgtatgcattttaaaagaaaaaaaatctttaaatgaagagaatagagaaaataggtgataaaaaatttgtatcaccaaccaactttcctatgtacagacagccaattcaaattaaaatgcagtaaaagatgtcatttagaatagctatgtaaaagaaaacatgtaggtatatacttatcaaaaattttgcagaattttataaaggaaatttaaaaatcctacttagaggcaaaaaagatatcatgacttacattaaggaaagacatattcttgaatggaaaggtcgaatatgtttaaatgtctaatgcttataaatgaatctgtaatgtcaccatcattttattaaaaataatttgggaaaatagctgagataattcttaaatagtagagtaatgaggaaaacccaactcattataaatataatgctaaagaagttaaaagagtttgatcttagcagaggacaaaacgtacagattaatagattaaaatagagatcaagaaacactaaaagacctaaggcatttgtacctattacattacctagaatgtaataaagatcagtttttcaaccagtgaggaaaatagtttattcaatacatgaattgatataacaagataggaagttggaaatagaaaaataataaagaaaacttgaatctatctcattctttagaataaaataaatgctagatgttggggcttaaaatcatcatcatcatcgccaccatcaccatcatcattagtagaaaatttggcagttggttggttggtttcagtggtgggcatagtcttttaaattaagacacacaatctataagtcttacaggaaggcattattaaatttgaatatccaaagcaagaaaaccacaaacaaaaccaagagacagatttaaaaactagttatagtatctgtggctatatattagccaaagggctaattttataaatacataaatatctcctaaactatatttaaggaaaagatcagcaaccgaatagaaaatcgagcagagttgttgatataacaagatacaggaacagcaatgtaaatggtaattaagtatctaaggagatgtcatcaggatccaaacatttgttaatatgtagtgttgattaaaggcataatttcttgatgggtgtttaaattgatacaatctttttgaaggcccatttgaaaataccatcaatattgaaaggtatatagatttcactgattagttacaaacctaggaactatctgaaaatataattccaaatgtgcacaaagcttgtccattgaaccttcattgctgttgcatagcagggactgtttatccctactgtgatacttttaaatttattttttatttttctggaaacagtgtcttcctctgtcttccaggctggaatgcagtggcatgatcatagctcactgcaagcttcaaactcctgggctcaagtgatcctcccacctcagcctcccaaatagctacaactacaggcacaccaccatgcctgactaatttttcattttttgtagagatggggtcttgctatgttgcccaggctggtctccaaactcctgtgctcaagtgatcctgctgccttagcctcccaatgcactggtgagagaggagagttccctccaccccttctgggacatggaacaggggtatggctcatttactctttaagccacactcaaacagctttcgagagggggagcatgcaggtgagggggtgcaggagctggggcgagtgcctttgggctccagcaggaaggaaccctttaccagcctgcagcagtgagtagaagttgcctaaaattttcttttttggttgtgtctctgcccggctttggtatcataaatcaaaaccactatgagatatcatctcacaccagttagaatggcaatcattaaaaagtcaggaaacaacaggtgctggagaggatgtggagaaataggaacactttgacactgttggtgggactgtcaactagttcaaccattgtggaagtcagtgtggcgattcctcagggatctagaactagaaataccatttgacccagccatcccattactgggtatatacccaaaggactataaatcatgctgctataaagacacatgcacacgtatgtttattgaggcattattcacaatagcaaagacttggaaccaacccaaatgtccaacaatgatagactggattaagaaaatgtggcacatatacaccatggaatactatgcagtcataaaaaatgatgagttcatgtcctttgtagggacatggatgaaattggaaaccatcattctcagtaaactatcgcaagagcaaaaaaccaaacaccgcatattctcacgcataggtgggaattgaacaatgagatcacatggacacaggaaggggaatatcacactctggggactgtggtggggtcgggggaggggggagggatagcattgggagatatacctaatgctagatgacacgttagtgggtgcagtgcaccagcatggcacatgtatacatatgtaactaacctgcacaatgtgcacatgtaccctaaaacttaaagtataataaaaaaaaaaaaaaattaaaaaaaaaaaaaaaaaaaagaagttgcctgtgacagagctctggagccccagagggcacatgttataaacaatgctattttagctttgcctccacggatggcttaaatgttaacagctccgtgaagagtcagtgtgacagcctttttgggttcctgcacccagtgtgtcctgaattctttttcatcattaaggaagaatcaggtcacaggaacagtttatgaatgtagaggattttattaagtggcagaagtggctctcagcagaaggggagctggaaggaggatggtatgggaagaaggtgatctttctgtgaagcccggccatctgcggccaggctcctctccaaagtcatgcagtcagaagttatactgccccatatcactggggctacaggggaagaggccctaatacattttaaaacaatgaggttgctccagatatgaagctatagaaaactctctgagataaaatttagaatgaaagccaaagtagagaacactgtgtgtgatatgcttccatgtataaagaaagaggatgcatgtatatttgtatgtgcattggaatttttctggagaaacatataacaagcagttgacagctcagagtctggggtgataaagggacttttattgtttgagtttttttcaatcctgtgaatgtgttattttcataataaataatgaaacctgaaaaaaagcccataccactttattgcctctctttgcctgctatcataaatccccaatatggacaaatattggtggagaaatttgtaggctttttacgttaaagctttttgctttcctgtgagatcagaaatattgtgaatgcaattgaaataaaggcatttgtttttttaggggtggaggttggggggttttccctgaagctagatccaccctgcaactttggttctcaactggagtctgactgtagtattgttggggacttagtggttcttaatagcaagaaatgttagaatacattaagtcttgaaacgtatttcaaatcaggtaaattttcttagtatttgaaaaaatcaaacctggttatcctatgataagacagagaaaagacattgcaaacaagttgcttttatacatacctctgacttataatcatatttagaaggatatttagtgacaagctacattaccttgagactaagaaaaattgactacattcaataaaatatctatcaaaggtaacttcatattaaaaacctgcaagacaataaaacttaaacaaaaatttattctccaactcataaaattttattttaaattatgaaatcattaaataggaagcaaataattatttctactcactgagtatatctatccattgatcataacaaaatatactgattgaagatcattcattaccattactctttgcctttccatcatttaaaccacagttgcatttcttacatgtatgcaatataagaaacagaaaagtggaaagcagcttataataaatgattcagaaattttcaatatttgaaagttcttgatttggtaatatagtaatacatacctatgttgccttcaaaattccatagaaatcatgatctactcaatattttgtggttacatttttaagaagaactcaggctcagctgtttgctttctatttacttgaagccttttcaactcttgtttccatggtacctaagatctaccatctaaaagcaaatatttttttctctatgaagaagcaaaggagattagaaaaccatggttatgttgaaattgtaataatccctgagattttcctttttcatctttaattattctcaagttagcagaaaatatcaataaggtcaacacaacaaaaataaaagttccaggccttatactgagcaccttacatgtattctgttctttagtcatcacaagtgtcttatgagataatttctaagattctcctttggtaaattaggaatctgaggctctgcaggatgaagaaacaaacttgcctcaaatcacttaatgaggaagtgacacagccaggatatgaacccagagctctctgcttccaaaacctttgctcttggccctgcgcctggtgtctccctaaattttaccataactactgaacacagaacagttagtctaaaaaagagctatgcaatacaattatttgttttcccaggaagagaagggctgcttcagagtgtcagctgtatgtgcatttttcatgttttatttgccttccttgccttgtgtcaggttttccacatgcagacctttgtgattctttaacataataacataagctagtgcttagggtctggttttccattcttgaaggcctttgctctttggccaattagcaaacagtcagccttaatggaaaaaaggaattgatgaagagaagctataattgggcataaatttaagtgaattgcttctaatcaaaacctagacttaggtatactgtgcttactcaagtccccatttgttgcaggagtgggaacactgaaaatcttcctccttttgtattcctgtttcagatacctcttctctccatccaggcaccaaaaattaaaatctcagcttcatccttcactccaacaagcaaaatgatcatcaagtcttgccaatttattttcaaattatccttctgttttaagtcttgcttatactccccttctactctttaatatatagctctttgattatctaaatagccacctacatcttctttattttggcctttttctttttccagcagtttattctccaagtagttataggcctaaaaaacaagcgttcaaatggtttttccaagtggttgtcattccccctcttaaaaatatataatggtttccctttgtccatgaaataaagcacatcctgcttgatcttatcttcagtcttcagtataattggctcctaatcaaactttctagctttgtcccatagtttcacctttaccacatgccttatatagtaagccgatatggtttttcctcttaaactgtcttcaacaaaccaccagtgtcttataagttcttaatagatgttattttggaaaacaagaaaacaaaagctttgcagccaatttaggaaacactgtagtaattatattcccgttttggagaaagtgttaagtcatcttaatccatttgggctgctgtagcaaaataccacagcctgggtagtttataaagaacagaaatttatgtctcagagatttggaggctgggaaatccaagatccagcagattcattgtgtgatgagggcctgcttccttctagatggtgccttcttgctgtgtccttacatggcagaaggggcaaagggtgcctctcttgcctcttttataaaagcagtaactcattcttcatgacaattgcccccatggcctagtcaccttccagaggccccacctcctaataccatcacctagggagttagtatttcaacatacgaatttgaggggatatgaatgagaccatagcaaatgtatattagcacaacagtccccaacctttttggcaggagggaccgttttcatggaaaacaatttttccgcaaagtgggagggggatgatttagggatgattcaagtacattacatttattgtgcactttatttctattattattacattgtaatatataatggcatgattatacagctcaccataatgtagaatcaatgggagccctgagcttatttttctgcaacagtcctatctgggggtgataggagacagtgacagatcatcaggcattagattctcataaggcgcatgcaacctatatcccttgcatgtgcagttcacaatatggtttgtgctcctatgagaatctaatgctgctgctgatctgacaggaggcagagctcaggatgtaatgctccctcacctgctgcacacctcctgccatgtggcccggttccagtactggtccctggcctgggggttggggacctctgtattagcatgtgaaagtcttaggaaaggtctgtagtgggaaaaccttatttatttatttatttatttattttttgagatggagtctcactctgttgcccaggctggagtgcagtggcatgatctcggctcactgcaacctccgcctcccgggttcaagcgattctcctgcctcagcctccccagcagctgggactacagatgtgtgccaccatgcccagctaacttttgtatttttagtagagacggggtttcaccatgttggccaggctggtcttgaactcctgacttcgtgatccacctgccttggcctcccaaagtgctgggattacaggcatgagccaccgcacctgacccgaaaaccttatttactatttgtcaactgtaatctttttcacagaatctctaatgaaatatcatgagatcttaatgtcacaccaggagatgatttaggaaatgctgctcacacattttcaaaggggaactacgggagatctgtataaattctatcaagtgatgcctactcttttctttacccttttgagcattataatcatagaaacatgaagttttgagaactatggcagtcatttagttcagcttaattaattattggcatgctcttcattaaattgagtgaaactaattttttattatcttgactttgtggacctacttacgtcagatggaacttcagaaaataagtttgttcacatcctgtcctcttattattagtcttagataacttgaaaaagacaattatcacatctctcccctcttcagtctaaacattatagctgaagagaaagctccatgaaatccggggtcgtgtctgtgttttttactgttcctgctcctgcttaacatggtgttgggtacttaataggggctcaacaaatacattttgaatgaattaactatcccttataccatagttttcttcactccacctctgtcagcatcttactcattcttaaagaagtatctcaaatgcagtactgtgaatgaatctttctatatacaaacccaagtcataggtaaatatgtcctcatttctgttatttgtacttccattttcattacattcatggtgattgtggaaatattttgataattcatatgaaattatcaatatttgaccttcggctttttcttttcttttttttttttttttgagacagaatctcgctctgtcacccaggctgaagtgcagtggcatgatctcggctcactgcaatctctacctcctgggttcaagagattctcctgccccagcctaaaaagtagctgggactacagatgctgctggcatgcctagctaatttttgtatttttggtagggacggcatttcactgtgttggccaggctggtctcaaactcctgacctcaggtgatccacctgcctcagactcccaaagtgctgggattataggtgtgagccaccgtgcctggccaatattcaaccatttttgaagtgcaaaaatcacagtcttatattcaatatcatgtgttatttattaaagttatatttatgtatacatatattaatagatgtgcatgtatatataatatatgtaatctctgtctcttcaactagattggaatggtatggtatagtttatattttgtaaagctttttcttttctgtagtttataacaaggtgctaagcacaggcaatgatcaatgacagtttattttctgagattatagctactcatcctactaaatttgtggaactgaaatttagtgagacaaaccaacagtgtgtatttggaatatttcatgaataagtaatttgaggaatacataaagatagcttaatcttctgtaagaagagttactttatacaataaatatacctatcacaccaattgttattctccatgtaatcattttaaattcagttctcattaacagagtgaacaatttcaaaaggaagttatgtgggttttgcttaaattttagtaaatgatgcataaaatttgaaaactctacttgaacctcattccataattttttatttaagtcagtgggagtattgccttggcaagaatggagctttatatctgtaatacagttgtctgccaatgaagataaatgattctggaatttaaatcaattatttatttgatttctttctcagaggtacttatttcaataccagaaactaacaatttttcttttcagtatgaggctggccccagggctgagtaaataaaaatagaaaattgataaggacccatgtagtacatgaagtctgtttcactgagttaatctgataatgtcacaagatggtagttgctggttagtcataacagaatatcaattgtcccggattgaaaggtgtaatgttttctcacctttactttgcaatcatattctaggccatatctgtgcaataaatagatgctattaaaattttctatacagtatgaagattcaaacattaaaaatcttccccatgggatactgaactatatagttcagcttatttttcatttattagtgttcacaattgattcatccttatttcacattgactttgtctttaaacacctgggctaacatggccaacataaactcagctgcaattacaaaaacatagttagatcagagttctagaacttatgtatttgttgcagttgcttctattatatcacgcagatgaatctctgctagctgacttatttgggctcaccttctgcgtataaacgtttttgttttcattctttttctgacttacaaaaagaagagaaaattgaaaatttttaggctacacatttagattctttttgtttctaatctattgttgtcatgaagtttttatttttattgttatttgttcatttttggtaattccgatatttgcaaatatcagtattatagaccctgtatgtactccagagcaccccgactatatcctatttgcagaactatgtaattttaatttaattatatcccatggggaagatttttaatgtttgaatttcatactgtatagaaaattttactagcatatatttattgcacacatatggtctagaacatgattgcaaagtaaaggtgagaaaatattacacctttcaatgcaattttagcaagttgtgtttcactaggggaaaagagaaattttctaaaattatatacagtgagagtttttagtgtaagaaacataaaggaattctcccctgccaattaacacttagggcaaggttacttgtaacacataactcctcttcctttccacagtgaagatgaaagcactgattaatacaatttaatcaagaatatgcatataagtagatatgtaagtacagacacacatgtgtgtgtttttccaaatttagaagagaaaaaatcaaatcgtgtccaccctcaggcccacgcagaggctacaataagaagcaggagtccaaggaccgttcttcatccagataacatgctactgaaacggacatttcaggagcaaaattagtgattgtgttgctatagcaattttgccacatgctcagcaaccgtgcatatgctgtggcctgagttttaatatgaccacttcaaagtgagaatagaacaattgttaaaagccatattgtactttttaatctaacctttggctaaagtatgtgaagggtttaagaagagtctcttttactttcttttcttttcttttcttttttttttttttttgagatggaatttctctcttgtcacccaggctggagtacaatggcatgatctccgctcactgcaacctccacctcctgggttcaagcaatcctcctgcctcagcctccccagtagctgggattataggcgcccgccaccacactgggctaatttttgtatttttagtagagacgaggttttaccatgttggccaggctggtctcgaactcctgacctcaggcgacctgcccaccttggcctcccaaagtgctgggatacacaggcgagagccatcttgtactttatttttgtggaagaaacatgtttttaaaagtttggggttgtcatacaaaacagattaagcatcattttaaaagaagtttaagaaacaatgtatggttaaaagagatggtccgcttccaaaagagcatagcttttctcctaaaatttaaatattattgttgggtgtctgaacctattgtgctaaatataagtaaactggttggtaattatgagataatgatccaggctgttgttccattctatttgtttctgtaccactaaatcttagtacccattattctctcaataatttggtcaaaatcttgatgctatttctctctccccaccctatcatttttttggcatctttgaaaacacaacagagaactttttagttaaaaatttccacaatcgatgaacaatcaaatgtgaacccttgagttgggaggacattgctaaatagctctggatcatgttgtcttcccccgtgtttaccatcagtcctgagtcttccctcagctagtgattctcagaccagtcctggggaagcctgttgaaatatccattcttgccagatcctctaaatagtaccttttggagatgtaaaaaccagcccatgtaacatgagcgctaccatttgccaactatcagggtctggcaaaaaagtaagcacagcatgtaggaaatacagtatcttgcaatgaaaagcaattctgatgacggagccttggactcatttctaatttcatcaaaggcttaacctgattataaaaattgtgttctggaagaaagtttccagaacatgaaggcaagagccgcaaggaactattagggcaggaagtgtcaaccctggctgcacttgacagttaccaggggggacttttgaaaacacctaggtcctggccccagccccagagataataatttaattgggaacaggccatagcttttcctctgtgtttgttttaagctctctagtaatgctaatgtacaaccaggcttgaaaaccagggtacaagagagatgttatttattgtaaaagtgtggcagagagggagtacatagatgttctgttcaaaatccatgacctagatactttacttggtgctgtaagtagagacataaccaagacttgattactgcacttaaggatattccagtctggagggagcgaaagagaggagggaaaagagagatgggggaaaacgagtatgctttacgatttgctcaggctttcctctcattctgagaataaattcatgaaaccccttggtagtcctatggtatagagttacatggatagagctcctgctttcttcaatatcctttcccctgtctctgcctattaaactgctaaagcagaaggatagcagccttctgagggaagtgtggggaactctcaggcttaagtgaattaaaatttcactggcaaaacccaggggaatgttctgtacaaggcaagtccaggaatggcaggcaatgaatggcatgcctctttttatagctacaccctggatgaccctggacaatgatgccctctgtatgaagtgacctcagtgactaagaggctgcctctccacacccattcggggggcatttgtgaaaccagaaaaacactgcatggcagacagttttttctcacctttttgctctatcagatttctgcatccaggctttgaatggacagtaagtgcccttagtcactgcatttgtctcctaggcttaaaacaacagaaatatattttctcatggttttggaggctagaagtctgaaatccagcagagctgccctcctcggggagctccaggggaaaatctgtttcttgtctcttccagtttatggtggctgccctggcactcctgggcttccagctccatcactgcgatctcagcctccatcttcacgtcaccttctcctccacatctgtcttcctctctgtgtgtctcttccaaggactcttgtcattggattctgggctcacctggataatccaggatattatcctggattacctaaaagtcttgtttatatttttcaaggtgaacatatttttatctgcacttgatctgtattttcccctctgctgtcctcccaggctgttcatctccttatctcaagatctttaactaatgacttctgcaaagacctttttgtcaaacaaagtaagattcacaggtcccagggattcagacatagacatatcctttgtgggacaccattccgcattcagcccactacagccaccaagcatttgtcaagaaaaaaaatcacttaatatgacagtgcaggagggaagtgatggtggagagaccgagtaggagtggtgggggttgaaagtaaaggcacttacttacctggctgtttttcctcatttggtcggtatttctaaggtaactataaatggaacaggcaatgaaagcattccctagtgttctttaccagctttctgaggcctcccccagtctgctgccttctactcggggccagagacaggaagagaactgctcagcctggctctgcatagcgctcattttcctcctgctcacagcatccttgccagcccctgcactgtgacagccattccgtctcattctcattgccacgtttctcatacaagttctttctccacattgttgccaaagccaaaccaaaatagccaatacaatcaaaagagcttcactttataatttcctttacacacgcacatatacacatgcacacacacgcacacacttatttttgcttggcctagcaacacaatgggaatgtaaacacgttgttaatgcagccgctctcagttggcttcccagatggcttgaattcaatagatttttccccctgatttcctcagcttctcctagcaagtgctaaacagccattatgccttttcctgcacattgagattcatctgcaactactaaactgcctccaaagtgcttcaattttgcatgagcgctaagctgggcactgggagacattacccagtgctgaaggcccagatcattagaaagagcatgtaaatcctctgaaccagaaataaaaagtgcagagatttcctttgtgaagtcccaactgctgctttatgtaaaacatgaacctttggcaaggttatatgtggtcccattcccttttatttttgctttttttttttcttttattttggcatatgtgttctttttttttctgagcagtgagatttccatcaggaacatatgaaattacagccattctctgtcattatttttctttttaggacctcagatccctcttcactttttatagggataataccttgaagtattgctaaaggatctcctacatgattgactttttaaaaaacttgctgaataccaagaaactttgaggtgggatggattgacatttataagatatgtacaggggacaaaaatctatattatttaagtatagatgtaaggagtatgcagatattggattatggacagaagttggaatacaagctaaaagggattgtgaaaactgttaatgagaaagcagtggttctattcttctcattttttgataggtatttccctgtgcattattacctaaaagtcttgtttgtatttttcaaggtgaacatatttttatctgcacttgatctgtattttcacctctgctgtcctcccaagctgtttgtcagaccatcttgccacaaattaaaagtgtgcctgcggtcagctccgaagcgcctatgagagggtggggatgctaggcttggaatcctgagagccccacggttttgcatgctgtggggttgggtccacactccaagtccttggctttgtaacaaaaagcacttatgatggacaggttgactctccatctttatttattatttcctttgcagtaggattttttgatcagttgtaataacatttattttgatctatcatgtacccatttaagagtaataaaccaggctccttttacatgttttctctataattatttcccttttttccatgtacatatatagtaggtcatgctatcttccttttaggattctgagagtaaaaatgtgagcttgatgtacacttaatgatcagatacagcagttcattatttatctctaaacacatttccaaggacatttattaaccactgatttattcaacagtgaatatgcaactgaaatctgacagaagtgttaccaaatgggcttataataagatatgaagtaaatgcattccaacttggaagtaaaaagaaaatactagatgaataatatgcatacaaatgcacacagagacattaggagcctatgtatactctctgtgtaatatatccatttttatgctgaaactcagttttgtttgtcagcatgttgtatgtatccttcaagctaaatattcctatccgttaattttcctttactaaaaacatagctaatcatgcaaatgtcatcatctttattagtgctagtatcattgcaaaatattatttactatgatccatacctcatggctctaactgcatatattaaatagctacctttcctgttcttcttctagtggaaattgtttatccacaaaagtatgtgtcctttgaagcaatacatttgtaaaataaaggaagaagaacaaaactttgcctggagatatgaatagacatgattgaagctgtttgttcgattgtcaatattatacagttacataaatgtctcagggaattggagctcatagtgggaaacaatcatttttcttttttttctttgtaatgctagtgtagaatagacataaagacattacaagttccaaaaatactcagaatctgggttcactcctgactaaggcaggaagagctgccctgaacaaggtcaccttcctaagattgttatgacaatgaatgtaccattctaacatgtttcagccattccatcttgggagtagggggtgtctaaatgttacagcagcttaccataacacagacttaaatgatatggaatataatatgcttggcacacagtaggttttcagtaaatacctattgaataaatgaatgaaaaaaatacttataaagtccatgaaactttgttgcttttttaccatgatccaatgcttacctccaaacaattaaaatttatttttaatttgacatttttttagatacacaaagacggatttccattaattctgagggttttcaaatatctgaatatttgattttaatattatgcccaactgcctcaaaatgcagatgaatttactatgtgacaaaatattattttcacaatttcatgtttgcaatatttttcaaaatgtattttccagtataaatgttgaacaaattgacgtgaaatactaggtcatagtgtttaagtaccattatcattttctttacagtcaatcatgttttgatgtttttgcaagagataaaactgaaaccacagaaaagtgacatctgatttgtgaagagccttgaatagcagctagagagctccctgagggggctcacattctagttggaaagtgaaggaagcctccagaagacatgattatactcatgaattttatatcttttttaaaatatggatgttagcttattctgtccaaaattagtcagaactaacctacttagtaatttctgttcaattgcttaatgtctctgcctcacctgtgttattgaatagggatctagggaatgcctgatagaggagctgtgcaagcattgtggttgtcaaaataagtagaccttatgcactttgattcttcatgtcaggatagctccgctatatctacacttcaggatggtggggttctggaggattagtaaaattccaggtggcttggctgaaggagaagaaacttaaaggcaactcccctgaactcatttctagtgttcagaatccatttctaaagaacctagcctcatctgcattgccctgaacaactgaaatcttcactcagacttgacttgcccgagtccactgaaaattccccaaaccagtcatgtctttctcatctgggtatgtgactaatatagttttcaattagtggtgctcttctcccctcctaagtctttatagtacctcaaatgataattttgtgaatagaatacagctttattcacaagataattatgatgcagtacattttaaagacattttatggatttcaagtactttcataactgttatttcgttccttttctcacaatgcagcaagacaaacacatttttagtcttatttcacaagatgggagaccaaggtttgatgaatttaagatttgccaaaagtcagccaatacgtacagagcagaatttactttcttatctcaataaatcactaggttgttttgtgttagatgaatatgttttcagtcacctagttgcaataataattgtcctgggtgagtggaatttttaaacatatgaatctttatagtatgctttttaaagttgcattaagattatgaaacatattgcttttaagataaacaaatagcaatcctcaatagaacatactatgtgtgaactgttgttaagtggtagtcactcagaagtgattgctcttaatgcttgttttcaaatcatttggaataaatgcaaaatgaaagcccatgaggatgagtaattattattctggatacatatacctggtttccactgtcagacagtgtttttagagggtcaataaggatattgctcttaacacttatgattaatgacttgatgtaagatcgaagatctgaaaaccattttgtaataataattaaaattaaaattattaaaattcctttaaagtaagtcagtgtatccttgtttactcatagagacaaattaatcttcctgcagcatgtcattttcaaaactgtcattttaccaatttacaattttcacaatctcactgctccaaagaaccaacttccctagctgccattcacagctcttcatgaatcttctcttctatctaattcaacacttattcctttactcaatgaatgtaaactactctcccctagagtgctccatgcattttcatctctgctctttggcttcatgctattctctcttcctgaagtgtctttgattcctttctctaaatctttaaacccaaaccttgtttcagtgtcaatctcaaatattccactttgccatggtccctcaatctgtccatctgaaatatttcactataccttttgtcatgggatttccagaattttctaagttttggactatttttattcagtagatcaatgtagagaatgctaaacaaaaccatactgagagccatgatgaggtgagtttctgtggctacgttgactgtagggctgtgtggtttaacaaattgagggaaaatgatgctaatctgtactaaacagacttctttactacagaacttctgaccaatgccttcaatatatggatgggcattctgagttttgtagaggagggtgtattgaacagaaattcccaagcttgtttgaccatggaactcttttctgagacatagtttcaggaatattggtgtagtgaaaggaataggaacattggattcagacacatgtggatataaatctttattttggtacttattggctatatgaacaattgtttagattctgatctgtgctctttacatatttattatagatttgacagtatgaatccccaaggattgttatgcagattaactgagatgcacagtagctgttcaaaaaatactagttacctttactcgtctaagctacaattaagtttattctatgcctgggattaaacactttattttctgttgtaactatatatatgtacagatcattcacttatttaacatatattaactggacaaatattatgtgccagttactgtactgatggatacagaatgcataggacagggcctatgctcaatgaacaactattttatctctagtcttagtatcttctgaagggaggattcataagcatttcatcagtgtggccacctaagaaactatcataatgaatgaaatatgtgcttaagaattatcttcatactggaatgtcacccacaggagaacagagaccttatctccttacgtgctttcttttctggttttggggttttttttgttttttgttgttgttgtttttgtttgtttgtttgttttttgagattggatttcactctgtcacccaagctagagtgcaatggtgcaatcatagctcaccataaggtcaaactcctaggctcaagcaatactcctgcctcagcctcctgagcagctagtactgtaggcatacaccaccgtgcctagctaattttctgatttttatttgtagagacagggtctctttatgttgcccaggctggtcttgaattcttggcctcaagcaatcctcttgcctaggcctcccaaagctctggaattataggcatgaaccagtgtgccaaggtgatatcttctttctttagcactgtatcctcagcacatggaaaagaaaagttcttgtcacatagtaaagtctcaagaaatatctattgaatgaatgactggacaagactaatagtgaggtctataattcacaagtgtatagttaactagatttccacgaacacattactatgccccactttcgttaacaggcatcattttgttaaattttattaaaattgtattaaaactactcatgaatgcctgaaacaaggaagcaaagacatgcatgtagtaagatttaggtcataattaggaattatattttccaagaaaaatgttggaatatacattcaaatatgtgtaatatattcggtgttttaggacaaatatttagaagaatgttgcatttgctaattcagtggaacatgctttgttcccttccaaattaaacaaagtgctgtcatgtattcacaaaattgttttttttatattccaaagaatattgacacacaaggcataagttaattacagaaagcattttagctgcccttttagtatcagaaagtcttctttgcacacatttgaaagatttttttttaatcaccaaagttaaaaagaattaaatgacagctagtgcttgtaaggttgatttctagcaattcgttgcaactttaaatgtaaaacagaaatattttgcacacccaccattcaagttatccctcagatatggactctaagtttgatgttagttggaaagtcaaatcaaaaatagaaggcctagttctcctgtaaaactcaaaacctgatgctcgcacaaaggaaagaggaaaactgtgttatgattgccagagtaagttttatttttcattctatgtaatattgtcttataattaaaatttcaagttttaaggcagaaaaccgtgcgttgatctatagttgtcatagagctttctagaagcactagaaatccccccccaacccagttacacaatccagtgaatattcttctcagttctagacaaaacaaaaatataacaaagcacagatcctcatttgacacaggctgccacacagagccaagttcctaaaaactatggccataaaaaggaattgagtcaatgacctagaaatgcttccaagcaaatcccttgaaccactcagtttcagtcatataaattatttaacttttgaataaatttagccttctacatttattaacagaattgtgtatatttatggtgaataacatgatgttttgaaatatatatcatggaatggctaaatcaagctaattaacatatacatcacctcatatatttctcattttttttgtaatgagaacacttaaaaatctactgtcttggcaaatttcaagtacacaacacattaccatcaactgtgttcatcatgttgcacatctcttgaacttactctccctgtctaactgaaatttaatatcctttgaccaacattttcccagtcacccatcttgggaccccctaccctctgtgaaccaccatttttgctctgcttctatggtttcaccttttttagaatccacatataagtgtgatcatgcagtatttgtcttcctgtgcctggctcatttcatttaacataatgttctccaggctcatccaagttgtggcaaatcaaaatatttcctttgtttttaaggttgaacgttttcccctgtgtatatgtaccacattttctaccaccactcatctattgatggacacttaggttaatcccatgtcttggctattgtgaatagccaagtgctgcagcgaatgtaggggagcagatatccctttcaaatactgattcatttactttgggtatacacctattagtggaactgctggatcatatggtagttttatttctgttttgttttgttttaaggaaacttcatacagtttttcatatggctgtattaatttacattcccaccaacagagtgcaagggttccctttgccccatatcctttgccaacacttgttatcttttgtctttttgatagtagccattcttccaggtgtgaggtgatatctcattgttttaacttgtatttccctgaggattagtgatgttggacatattttaatatacccttggccatttgtatgtcttcttttgaaacgtgtcttttgggatcctctgcccagttttttaattgggttctttttcttgctcttgagttgactgagttccttatatattttatctattgaccctttatcagatgtatggtttacaaatgttttctctcattccataagttgtctcttcactttgttgattatttccttgctgtgcagaagctttttagtttgatgtattcctatttgtctatttttgcttttgctgcctgtgtttttggggtcatattaaaaaaatcattgcccaaactaatgtcaaggagcttttcctctatgtttttttctagcggttttacagtttcagggtttatatttaaatttttaatctattttgagttggtttttgtatatggtatgagttaagggtctaatttcattcttctgcctagggatatccagttgtcccaacactatttattgaagagaccgtcctttccccattgtgtattcttggcatctctgtcaaaaatcaattgaccataaacatatggatttatttctgggcgagctattttgttccattggtctgtgtgtctgttttcatgctagcattatgctattttgatactgtaactttatagtagatgtggagatcaagtagtgtgatgcctccagctttgttctttttgctcaagattgcattagctattcagggtcttttgtgattctatatgaattttaagattgtttttctaatcctgtgaaaattgtcattggagttttgatatggatttcattaaatttgtagaccactttgggtaatatgaacattttaacaatattagtttttctaatccatgaacatatctttccattcatgtttttcttgttcttttttttttttttttttttttttttttttttgagacagagtctcactctgtcagccaggctggagtgcagtggcacaatctcgaatcactgaaacctccacctctcaggttcaagcaattctctgcctcagcctcccaagcagctgggattacaggggcctgccaccatgcccaacttatttttgtgtttttagtagagacagagtttcaccatcttggccaggctggtttcaaactcctgacctcaggtgatctgcccgcctcagcctcccaaagtgctgggattacaggcgtgagccaccgcacctggccttccattaatgtttttcttcttcaatttatttctttcatgttttattgtttgcagtgtacagctctttcatctctttggttaaatttatttctatgtattttattatttttatagctattatacatgggattattttctttgtttctttttgggaaagtttattattcatgtatagaatcattactgatatttatatgttgattttgtgtcctgcaactgtactgaattcatttattaattttaaccgttttgtttaatttataggattctccaaatgtaacagcacatcatctgcaagcagagacaatttccttcttcctttgtgatttagaatttttttcctcttgcataattgatccatctaagacagtactatgttgaatagaaatggcaagagtgggcatccttgtcttgttcctgatcttagaggaaaaactttcaacttttcactgttgaacgtaatgccaggtctgggcttgtcatatatagctttattgtgttgagcattcattttctatccaatttgttgagagtttttctcattaaaggatgttgaattttgtcaaatgttctttctacagctattaagatgatcgtatgatttttatccttcattttgttgatgtgatgtattacattgatcgatttgtaaatgttgaaacatccttgcatcccagggatatatcccacttgataagggtgcatgatccttttaatgtgctgttgcatttggtttgttagtattttgttgatgatttttgcatctttgtttatcagggttattggcctgtacttttcttttcttgtagtgtcctcagcaggttttggtaagaggataatgctggctttgtaacatgaatttggaagtagtctcttttctttaattttttggaagagtttgagaaaggttaagtttagttcttcttaaataaaagtgcaggtcctgggcctttatttgatgggaaactttttatttctgatttaatcatcttactgatcattgattggtctgttcaggttttctattccttcatgattcagtctctgtaagtgttgcgtttcttacattcatcttaatcacaaagatagtagctgtaactttaacaaaattatactcataataaagctaatacaccagcaagttgcaattcccacttgcatagaataattttagttaaattatatagtttgcttatatattaaacattatattaaaaatttaattaaaacatttcaaagagtaggtaaattttgtgtatacaatgtcttcctgctatagtagttaaagattgttaagtgacttcatgtaacacatgaagtcttgattctgaaattctgccttttaagttatcacactttaattactttaacgagagttataagatgctgaaataataatcagtttttatagtatgacatccttctaaataatgacagggtgttttgtgatttaattaatattaagacatctagaactgatatgtttcatattttaaataatactagtaaaagcttataatagaatgaagcactggaagaaagaaccaaaagatcacactaattcaataaaactttgtaatatattccagaacatcccaacctgcagctttgtatatttcttaccaacctgtgtcctaactgtgaatgtactataatgaaatttggtggagggagctctgcagttcttctccaattagagagattgctggagaaagccaaattgccaggcctgcacaacatgatatcttaaaacttccttttgccataagaaagataaagccatggagaggaatcaactcaggcatacataatacctaagtctaaagttgagttaggatacttttgaaagaaatatacatggagtatcagaaggcgcaaattcactatcatgaaaatgtgttttaagatgatgtgtgatttttttcagtgtcacctaataaacaagatatgtttataaaatacatgaagaggcaggcgtggtggctcatgcctgtaatcccatcactttgcgaggccgaggcgggtggatcacgaggtcactagatcaagaccatcctggctaacatggtgaaaccccatctctactaaaaatacaaaaaattagccaggcatggtggcaggcacctgtagtcccagctactccggaggctgaggcaggagaatggtgtgaacccgggaggcagagcttgcagtgagccaagatcgcgccactgcattccagcctgggtgacagagcaagactccgtctcaaaaaaataaataaataaaaataaaaataaataaaatatatggagagcttaaggctaagtaatgtttgattcatccttacatttctgcaacttagcataatatctgttattaatggactttaatacttactttatttgatagcactgtagattacattttggggaaatacagatattattttaagtaatcatttaattggattaagcatgtatttgtgctcactttatggtagtatcctagaaaaacagtatttgtggtgccttaccactattatgaaattaagcatatgctaaaaataagaaataaatgtcatgtcattatcaggtcttattgccatattcatgtatgacctcacaaagatccaatcagagggttgcatttgaatctgaatttctatattcatttgaaatgtattattaacaagtgcacactcatactcatcataagacttcttggaataacatgctaattactttcctgcactctggctcccaaactacaacaaatcctattataaaaacaaatcactgcaaacttcaaacagcatgcatccttgagatgccactattaaaggaagcagcatgatgggaaatctttgatgttatcagatgtgatggaaactacacatttgtatttgagtaagtcctgtagaccaaagcatttcccccacccttaaataacctgaaaccaatttcaggttcccaaatgctcttcaaagcaacccaccttagaagtaatgctgatggcatttcaaattcaaggtagtttgctttttccatctccagacttcaagcagatttgaaattataggttcaaagagaaaaaatattatctacttttacccaaaccactaggctctggtctgatgaacaaactctcataggtaataaacttacctatggttatgaaaatatggcatgtaaccaagtagctcagagtctgaataatgcagtcaattctacggaattcttctgagtcataagtatttagatacttcatgcttcagttctttcttattcttgtgttgttgaccaaaagttggaatgtaaactttgggctatgtaataggacaactgtacacaactcagctcctcctgaatgggacatctgtgaagctgaatacaaaaatcagtgtgtgcttgactccagtgcccacagggagcctgagccaaacaattcagagcattcagactatgaataactcctgtagcaggagggttggtctgtggcttttaaaaaggcttcagatttgtggtcagtagaaccatccatgagcctatttgagctaaaggatacagtggacctactgaattcctcaagcatttaattaggcttcctgtaattgctttaagtaaaagtgggggagaatgagacctgaagttatcatcttgggacaccaaatatttggatgtggttgtaatatcctgagcatattagttgctgctctgcatcgtataaagaaccattatagttctaaggaaacacatattgcaaatttatcagccctttggtgactgtaagttactacagtaatcttaaaggaagaggtttgtttccagtaactgaatttccccatgaagagggaatgtataaataagtaaagcagggaaaaaccatcaaacatcagagagtagggggaaaaaaagagagagagagaaagatatggggactggggaaagaggttgtgattccatcttcccatagatttccagaattggaataatgtgaaaaaatacaataagataagaaaatgagaggcctgagtagggaccaggaaagaggaggcaaagtggtgttatttgttaatggcctaggattgttgctgagaggattgttacattagttagacattggctaacataatctactaatcttctttccatagaagggtgatggattggaatatgccacttacttggaaattctttttaaactggttaatatataaacatacaaggattgctaattttcaaaacattgaaataattttgaatgtacttcataagcttttcacaatagagttgccccttaggatcctgtcacgccttgggattataaaacccaccgtcttgggcttcattaccatttagctagtcattaatgggcctatgagcttagtagtttctatgacacaagcctcatcagctcttgataggaaatattgtttgttcccccagtgggacagctcctactcccattgggtagttgttcatttccctgagtgtgtttagtcatttgaatattttctaggtgttaaggaaagttctaaaatacagtttttaaggagttccagaaaatataccctctcctgtcacctataatcaaacattttgagaaattataacttttatgaacttattaaactataaagaattgaatacacatacacatacacacagatatacacatgtacacatacacatacacacatatctattttatatatcatatatgtatatatttaattctcatctgatcatgtcatctacttgcttaaaacactttagtaatatccatggcttttaggaagaaactgaaaatctttgagacaaagtctcgctcattgcccaggctgaagtgcagtggtgcgatctcggctcactgcagactccatctccaaggttcaagcaattctcctgcctcagactcccgagtagctgggattacaggcgtgcgccaccatgcccagctaatttttgtatttttagtagagatagggtttcaccatgttggcaagactagtctcaaactccttacctcaagtgatccgcctgccttggcctcccaaagtgctgggattacaggcgtgagccacagtgcctgggggaaactgagaattataaacattgtagatgtgagtagttctgaaactcagcatgcattgggattacttggcaggctggtcaaaacacagattgctggaccccacctccagagattcctattcagtgagtttggcatggagcctgagaatgtgcatttgcagcaggttcccaggtgatactgatgaagctgctctgggggccacactttcagaaacactggtgtgcacaactatgtaaactagaccctttcttgtctctagcttcatctcatgccactattctctgtggttggtgctcagttgtcttctcctaaattctcaaactcctaattccctttcctgctctttcccatatgtcctgtccctcctgctcaccatatgattgaaccaagctaactcatactggatccttcacactagattgggttccctgattactcacactcattcctatgcccacctttgcagcattgaatgcaattgaacctaaataataagttgtataatgcattgttaacatgatacctcttcacaataacataagttcattgaggggaaggactatcttactgattactttcacaagtgctgatacattatcttttacataattgatactaaataaatatttattcaaagaataaatgaatagatggacatatgaatagtgcaaaacaatatatttaatcattcttactatacctatacttgacccaaagcaaattctcctcctccctaggggtgttctgctggttccctcaatggacactccatgctggaagtgtgtgagttcaagctctgggagaactggcagttgcccacatatgttgttcagataacccctcttgctcagggcaaagaggcacattgaagaatgaatgtctgaaacagccttgataattcaagataaatacctctaaaatgataatcccagatgcttagttcaattttttgttattcaagattacataatgctgtgaaataaattccaattatttgagcattttagcaggaggctactttacctttaacagggttttagtatattacaattacagagaaacattttgggctttcaaactattatgcatgaaaactttaaagttatatattcttcggatacgataccagaagcttgttaacaaaggttagtatctgtttcaagaaaaacgatgtgccatttaattgaaacacaactgctaaagtaatttagttattaaataatcacaatgactgttggttttagctttgtaaatctgtgtacatacgtttattttacccacaactatataattgaggtaaaaaccctagaagatgtgaaactcaagtttatatttcaatatagagaggaaggttaaaaaatagcaagctgtattgggaaaggaattactttgtggagtgatagagcccttctactttcatcctcagaataatccagaagatgtgaaatagcaaataagagaatgaaaaagttgttgagtaaaataactggaacgagaagaaagtcaaaagagatgagagacaatatctgggttgttgatctatggcatcaaaagggatgactgggggaaaaatatgatgtgatggtttatatttctttagtatgaatcttgtgttgacttaaatctttctttttctcttgtcaggtctcattgtccgggaagtgagcattgagatttcgcgccagcaagtggaagaactctttggacctgaagattactggtgccagtgtgtggcctggagctccgcgggtaccacaaagagccggaaggcgtatgtgcgcattgcatgtgagtcattgtacaataagcaccttgggtctcagaagttgatacacataagggaaagtttacactgtgactactccagcaccaaagaaaactggtcaaaaatcctggaaaggccaggcgcggtgactcacgcctgtaatcccagcactttgggaggccgaggtgggcggatcacaaggtcaggagatcgagaccatcctggctaacacggtgaaaccccgtttctactaaaaatacaaaaaattagccgggcatggtggcaggcgcctgtagtcccagttactcgggaggctgaggcaggagaatggcctgaacccaggaggcagagcttgcagtgagccgagattatgccactgcactccagcctgggctacagagcaagactgtctcaaaaaaaaaaaaaaaaaaaatcctggaaaaaaactgctcccagatttctgcatttgagccacatattcctcttaggtcgccaagatttcattttatttttaattttcttttttattttttaatttttgtgggtacatagtaggtgtatatatttacatggtatgtgagatgttttgatataggcatgcaatgcctaataatcacatcatggggaatgaggtatccacccctctggcatttatccttttgtgttacaaacaattcagttatactcttttagttattttaaaatgaacaattaagttattattgaccatagtcaccctgttgtactatcaaatagtaggtcttattcattccttctatttttctgtactcattaatcatccccacctccccgcaaaaccctgccactacccttcccagcctctagtaactatcttttattctctatgtctgtgagttcaatttttttccttttattttttgttttaaggcactgagtaatttttctttagggatgtgaaagaactgtgttactttccaaagattttgattttgtaaaaaatctagtaggaattagactgtaggaaaatcaatccttacaatggcatatatcattccttgaatgagttcattctaccactttaagacaaagttgagtcgttttcctgttcaaaatagagattaccaagataaagcttctctatttattttggaaccattctagtacattggaccacacacagcactgttttccaaattgtgttaatttctagagcatacatgttcaggaagaggttaaaaggtaccttgcaaaaaaggcttccataatcaaataaatgtaagaaatatattttttgacaaagttatagaagcttcattgcaaaacttctcagatgatttaatacactaatatgcatgttatcaccacgagggagaaggaggctgcagcttgcagagccctttcctcagtaaatattctgtctgtcttaagcaacatggatgccacgtaacctgtctcaaggtttcatattgagaaatgttctcatacatgagaaagcgctgaaatccatatattttcttttctgaaccctttacatctttgcattttactaattctattttgtgttggatgccaatatcacttagctctaagtcccatcaatcctgcttctaaagcattccccagttctatacttgtctctgactcccttgcttcttcatttagatgtggaccattgcagatcttccagttagtctccatggctcaagtctgttctctattccagcccttcctccctgttaccacaaacacagtctttctaaaacttaggtctcctcttgataaggtttggttctgtgtcccacccaaatctcaccttgaattgtaatcatccccatgtgttgtgggagttaactgaatcatgggggtggattttccctatgctgttctatgatggtgaataagtctcatgagatctgatgcttttataaaggggagttcccttgtacatgccctcttgcctgccaccatgtaagatgttccttgctcttccttcatcttccaccatgattatgaggcctccgcagccctgtggaactgtgagtccattaagcctctttcctttataaattacccaatctggggcatgtctttattagcagcatgagaacagatgaatacacctctcatcttgcctccattcctgcttcacattttatagtgacatgtgagataggcaaaattccttataatggcatatatcattgaattagttttctagggctcccataataaaacaccacggattggatggcttaaacaatagaaatttattttctcacagttctgaaggctggaagtgcaatctcaaggtgtcagcaggtttggtttctcctgaggccgctcttcttggcttgctggtggcctctttctcactgtgtcttcacatagtctttactctgtgtgtgtgcacatccctggtgtctctgtgtgtccaaatttcttcttcttataaggacaccagtcagattgggttggggcccaccctaacagcttcattttaacttgatcacctctttaaaagtcttatatcccaatatagtcacatcctgaggaactgagggttagggcttccccatcagaatttgggggaatgggatgtagttcagccaataacaactacattttgtggtttacatatccaacctatgtttctagctcggaagggtaaggatttctacattgtaatcacactagattaaaactactttgatttccatgcctttcagctattcttcatgctgaagcattgcacccttatcttactacctttcacaacatatatatgtatatgtttgtatgtatttgttcacttagacaaatactaagtgaagattcactctgttcttgggacaattgtgggtattggggttggtactagaaacaaaacatgcaaccatccttgccctcatggagctcatgttgtggtgaggaaaggcaaactctaaataaaatgaatgatcatcaggtctagagcagatggtaagtgccacgaagaaaaaatacagcaggaaaagggaatttgtagggctgggagggagtggtcaggaagctttgctgaggaagttgacagttgcgaagacctgaaggaggggcaagagggaatcaggcagaggggacagcggctggcacaaaaaccctgaggcaggagtgtgctggtgggtcccaaagacagcagtgaggccagagtggctagaatagtgagtgagaggacatccacagatgcagccagaaaggtaaggcctgggctaaagatgggagcagtgtgtgcagttggcatagggttctgtaggtgttgaaattatctttggttttgtttgtttgtttgtttgatttttgagatgggggtctcattctgtcaccaggctggagtgcagtggcgcaaacacagctcattgcagcctcagtctcgcaggctcaggtgattctaccaccccagcctcccaggtagctgggactacaggcatgtgccgccatgaccagctacttttttgcatttttttgtagggatgtagtttcaccatgtcaccgaggctggtctcaaactcctgggcacaagcgatttcgcccacttcagcctcccaaaatattgggattacaggcgttagccaccacactcggcccatatttggttttgaggataagttgggaacactttggaatcttttcagcagaggaactcatgacctgacatccattagcagagtcatcagagtcatctggctgctgtgttgagaatggaccatgctgggcaaggggagaagcaggaagaccagtgatgagactgcagctatgagagatgttaagctactgtagattggaagcagtggaggtggtgaggccaggatttcagatatatttaaaagtagagataacagcttttgttgagaccttggatgtgtgatgtgagagaaagaagagaaaggatgatttgaaagggctaagccttatcaaggatttctttcaaatgtctttagtgaagccattcctgcctcacagagggaggaggctgggcattcctttctcaatactttcagagcagtttgtccatactcctaatatagtgcttgtctcatttcaattatattcactcgtaaaatttgtgtttcatgccagtgagttccatgagatcaagaattctattgtacttaattttatatctctcctgcttagcacaatacctagagtatcacagatgtttaacaattttcttgaattaaaactgttataaagaattcccagtgaagtttgttcaaatgctcgacattaatctttcctctctgagaatgtctaaatagattttctctttgtcttaagtggaatctccatgaaatactgtgaaatggagtcatacatgcagccagtgtattgaggggtgcccttaggaacaatatgctaagggtactaggatatcaggtggaggaataaaggcaatggttgggcagagggagaaattgacctgcagagcaaatacaacacgtgatgactccataggaatctgaagctcacatggcccttcagagttatagcaccctgaggctgaaggggtgagcagacctgtattcccctacatagactagtcagtggatgaagaccctcctttactccctaccccaccagcatgtgtaaccagggccaagtcagctctgcaccactgagggtgattccaggagagagaagctgagactttcaccgtcaacacttccaacaggtgggaccaggcctgaaaggggatcctggtagcataccacaacatccactgccacaaattctgaagaattgattttttattaattataaagaaaaatacttttaatcatgtttaaaaagaacaaaaagcaaatgtttcagtcaaagatttaattgaattcaaaatcagtttcaaactgtaatcaaaggaggcacaaggaaagaaagctattcttttatctttcatttctatgtattcattaatagcaagcacaatatatacttaaaattgccagtctacattccacactacattgacttgctaaagctgaactttaagagctgcatagtttcaaataatgaatttttagttaataagccttcaattttcagtaatttgcagagaccattgttgtgccaatttcatatatatatataattatatgtgtttgagtagatatattctttttcagcacacaaacattaagtacatataggtataagacccctttctttgcagtatgttctataaactttgctatttacttcatggcttttcaatctattttcaaataaaaaaacaaactcttcttctaggtcaacattatttatccaaggtaccttttcaccctcatgtaataatattcaagagcagttcacctataattctgtagctaactgaactcatatgtgtgtaccgaaggaaccccacctaacttgtaaagattgactcataaagatatgcatcataatgagaacaaaaaaggttgaattttcaaattctctctgtacaggctgatccttatcattagaagccccttgctaatgttgcagaagtttgtggggtttttagtttttggtttttgttattttttgagagaaagtcttgccctgtcccagacgggagtgcaatagcacaatctcggctcattgcaacctgtctcctgggttcaggtgattttcctgcctcagcctcccccccatgtagctgggattactggcatgcaccaccatccctggctaatttttgtatttttagtagaaataggggtccctccatgttgcccaggctggtctcgaactggtgaactcaagcaatctgcctgtctcagcctcccaaagtgctgggattataggcgtgagccactgtgcccagccacttatgggttttctactctgtcctgtatcaagtgaactgtggtgctctgcccagtaatacttgaccgagggccatcacataaatggcaacttaagtttaaactcatcagaggtgaagatcaccacgatgctaaacttaaataagtatgattacctcttacctaattagatttatgctcatttgatgtactgtggaggggcccatagttctttcatgaaaaagctctattttcagtttataaaccataaatgaatattgactattaatttatgtatttaagcttgcttacaatatttcacacattcaaaccatgtaaaatgtaaaaataggtttgtgagacaatcaaggcagaggaaaaaatggaaatatgaaagttaggattcagccaggctgtgctgagaacataacacatctgctttaaaatcctgcacattaacaagacagcagtgccaaatttcctaggcgggtctggtagttttcattcagagaaaagtttattctgagagaattcaagttgccactacaatggtgtcctgtgcagaacccttactgtaatacagctcccagtgtcatcatggggttgtttcttccagtgtctcttgttacaggctgatgagtgaatcccaaagcttaaggttcaggcaaaatattaacatacaaggtctttcctcaggaacaatttgggtttcaatagtgccgctcttgatgttaccattgttgacaatgttgtgattgtgttgtgggggtaaggatatgatggaaaaagcagcataggagactggttaatagcacaagctgagggacagattgactcatgttcgaatcctagtgccatgacttcctactgtgaccttagtcaagttacttgacctctgggagccttagtttcatcaaccatagcatgaaaaagagttattttaagattaaatgagataaacttgtaaaacatatgacatagtgccagacacagtgcaaatgctcagcgaatgataataggtgttcataaaaatggatataaccattttaaacaactttatatgtttattttgaaacatcaatactgagcaaactttgaaaactgaaaagtctgtctttcctttaccatttcatgtcccagggctagactgtcaatcctagaggttgaaattctctgctgattcacataaaatttgactgtaatttccaaccccttctgcccatgcctgaggatggaagaacatgccatatggtcacccttatcctacagtcatgagctataatgggatttacatgcacccaagattcatcttccggggaacagcaggatggctcctccggatttcctctcgatcgtgtgtgcaaaccaataaatcacagccagcatcacaaagcctgctggccacaaagaggaataaggtagttcctagaaagaattaaggatgatcaaggtggcccctcctggcttcctctcacagctcactcatcattttcactgagagaataactacatttgtgacccacctgtggatttggatcaagtcttgttcatattcgtgagtctatagtatccagcacactgtctaaaacagcagcgtccaatagaaatatgccagccacaaatactgtttacacttttctagtagccacaatttaaaaagaaacagataaaattatttcggtcatgtatttcactgagtccagtatgtctaaactatcatttcaacagtattaccaatatcaacaagtatttatgaaatacttttctttctttttgtcatactggtttttcagagctagtgtgtgtacccttacaatagcttcagttatgaccagctacaggtcaagtgcttgaaagcctcatgtggtttgcattggacagataggctccagaataataatactgataataatggaagtgctgtttcaatcatgtattatgtattagatcattcagtctttgcaaggactctatgtgatgagtgttattattattcccattttatagacaaggaaattgagagcaacgggagattaaaaatcgcctgaggttatacaggtggtatatggagcagtgagtcaggccagcatccaagtccatgtgtttaaccagtacactgggtacaaagaagggaggaggagacaaggatttgtagatcagctggcaattcacaaaaacatcttattctctacatgcataatgtttataactggtgcaatgtcttacgttgtaatcccagcaccttgggaggccaaggtgggaggatcacttgcacataggggtttgagaccagcctgggcaacatagcaagaccttgtctctaataaaagccaaaaaaaattaaccaagtgtggtggtgtgcacctgtgatcccagctgggatactactgtcagcccagaaggctgaggcaggaggatcccttgagctcaggaggtcaaggctgcagtgagccatgatcacaccactgtactccagcctgggtgacagtgagatcctgtctcaaaaaaaaaaaaaaaaaaaaaaaaaaagctcactattatttataatacagaaacataaacagaccttggcttcctgcctctcttcttattgctttgtctgctctaaccacatccatttccttgtttccagaatgcaatagattcattccacatataggctgcttgcaagaactgtttcttctcacttgaaacattcttaccccaagtctaaaactggcttactttcttctttcattcagatttatactgagatgtcactcctatagaggggtctgtctatccgggcctcaaccctgtcacttgcctaatcctaatcctgctttattgttctccataacatttttcttcatcattatttgttttcttttgagttaaccatctgccataccagaatgtaagcttcacaaggacagagactttcttttcttccttgttgtctccagtgcctagaagacgtcccttgcctgtggctgctgataaataaattaaaacataaaaaaatgaaataaaattgaattaaattgaaagtacatgatggggaaaagtgaagatactattcaatgtgaatcatttgttcatttaataaaaatactttttttccccaaggaattcaagaacatcaggtagctggacgtaattgcctctacactcttgtacttattacgtttctgcatagcacttctcaccttctaaaccatcatacatttacttatttattagttaatggtttgtattctgtaccccctcacccccttagaaagtaaggtccacataggcaaagatttgggtttggttttttcactgattaattcaaaacgcctagggtgattcctgtcacaatgtagggactcaagaaatatcataaaggaatgaatgaattgacatttctgtatttaagtatctccagttaaatatatatgtaatctccgggaggctgaagcaggagaatggcgtgaacctgggaggcagagcttgcggtgagctgagatcgcactactgcactccagcctgggtgacagagcaagactccatctcaaaaaaaaacaaaaaaaatttatatatatatatatatatatatatatatatgtgtgtgtgtgtgtgtgtgtatatatatgtatatatatgtgtatatatatatgtaatctcatgaattattatattggttcacatgtacagaagtcctgatttgtggccttatgtgttacttttttattttctacctgtctactctacttggcataaaacaaaattaattatacaatttaacaaaaataatgcatttctttaaacaagcatcctgaaagatgaaggtcatactataaacagttctagtagcctaacaccaaatgtactggcaggattcagcaggctcccctgtacaccagaataaatggcatttttactaaggtacatttctgagttgtagtatgataccttgtataacaaccattaaagcccacattaatccaattataagtaacagaggccatattttgaattggataagattaaatatatactttagacatttttagataagggaaaaatatttaaacaataaattaattaatactcttgttttatataaatcttgacagttgtattatcaggttattcctatttcaagattaaatattataatgtatacctgattgtgtcagtctatattttttcaaacatatttgcttttgtagatggtcagaagttcccaagtttcatggatgccccacaaattcttaggcatttatagctcatatttattctgagaggtagacaacgaattcatagaacacagtctcataagtcatattttgggggaaatcatctatacgtatgttataggcagggctggtaacacactggacaaaaatgtgttattaaagtatgttttatgctgtatgaaaagtgaagtttatggctaaaatgcttatttgcaagaaaacagcttgtctgcaatcattgcattcttttttttgtactctgagaaaagagccttagctttttggtatgtcagtttcctcatccataaagttggcatatttcttattatttatccctaagacataccttaaaaaatactgtgatgacatataatcattttttttctgaaactaaagatgcattttgaatataaaagagtggcttgtatggattttttttcttcctcttttctgtagtggatgtcatttggagtgctagctgaaatatttatttttttaaaaaactctttaacaagactatctgaatacaaatgtgtttgtcctataaatgcccaaaagtcaagaaataacgaagaatggctgaaattgtcctcccttctaaagagtctttgttccctggaatttctctcatttaaatgatctcagtgcagtaagtgatagccagggcttggcacgactgaagaaattaccaagcttacctttctgctgacttgctgcagatcattctaaccgctcttcctggttatgagttatgatattatgaaagtgtttgtggtaaattcctaagagagaacgaaaactttaccccttacaaaagcaaaatgcggttataaaacaacaggaaaaaaatcaaagtcgattgtccttattctttcttctttagtctctgtcctagtagccaacatttattatatgcttactgtatgcctaactctgttataagacccttgttcatgttaactatcataatcttcatacgacatcctatgaagtaagttctgttatcttcattttgtaaataacaaaacagaatcatggaaatattagctaacttgcccatgtcacctgtttaggaaacactgaatctgaattttaaacaaacttttctctttgcagtccagttcattgcacacagttgcaaaaaacatacaaccattcttgacttttcaaactatagagggaactgcatatagttgatttttgtttgttttattgtttacaatatttgagaaggaaagataagttaaaaaaaaaaaaacaccaccaaactttttatttctttaatttgttttttcagagacagggtcttgcttgtcatccaaactggactgcagtggcatgagcatagttcactgcacccttaactttcttgggctcaagcgatcctcccacctcagcctccctagtatctgggactacagatacctactaccatactctgctagtttttctattttttgtagagatgggggttctcactttgttgctcaggttgattccaaactccctggcctcaagcgatccccaatcttggcctctcaaagttctgggattataggtatgagccactgcaccgagcttcaatttttaaaatattctataacctttatatttacaaaccacaataagagttgcttagcataataatatttttctttatttttaaaaattccagcaaaaatcagatactctattcctggaaaagaaaaccatagctaacatttcagggctctatggcattaagtcaggcatttttcacttttaataaatgcccaaagctctgaaggccaatctagttcttccaaaatatgcttcactgtttggttcacagcagttatttcctgttaacagccagatttggtgatttaagcataaattctagtctgctatgacaacataattagcactttccatcattattggaagaaagatacatttttttccctttaagaacacagtattattactttgagtgaccatgaaatcatttgctagaggagcactttgaaaatatattaaaacagctttttttaaaaaaatattagaatgtgttcaacaccattgttcagtgagtgtgtaaaaagaattaactgaaaagcacctgaaaatatgaaaatgtgaatcatagtacagcagctgtatttgcttaatgcagggtcaggcctaggtcagaaagtgagtaagctggccagcagcagataacaacatgaagctcttctaagtacagaatttccacagatcgagggcctttttgtcaagaccagttcaatttgggaagcaagaagcttatttctgatatttggagtttggcttcttagtaaaatttaaagaaataaatatcagtacaaccatcaactctgtgaacacttgacagcaatgctgatttaggggctggaggaagtgggtatgtaaatgagtacattgacagaggactctttatgtaactgcactgtcctaagtgtgctatttatattaccttttaaaatcatcacagtaatcctatacaatatgtaatagaattatcttcattttatggatgaagaaatgaaaacatagcaacctcagtaagtacagaactaggattaaactatggcagagcagatccaggctccatgcttgtaaccaccacagcaggatagataatgacccccaaaggcatcaggtcctaatctctggaatttgtaaatattaaccttatgtggaaaaaggatctttgcagatttggttaagaatcttgagatggagagattttctgacattgcccaggtgggctttaaaggtcatcacaaatgccttgtaagagaaagacaaagggagattgacacagattgaagaagagaatgcagtgtaaccacagaggtagagattagagggatgtagccacaagccaaggaatgccatcagccactggaatctgggagaggcaagtcatggtctctccctaagaaactccagagggagcgcataatcctgctgtccctttgattatggctcagtgaaactgatttcaattatttggcctttagaactacaagtgaatatatttctgttgttttaagccaggaagtttgtggaaatttccactggaaacaaatacagctgctacgcggcatccattttccagcaaattcacatcatggagtaatccacttctaaatagctggtgagcttgaatgagtgagttagcctctcacagttctagttatataatctgtaaagtgctgggcacggtggctcacgcctgtaatcccagcagtttgggaggctgaggcaggcggatcacaaggtcaggagatcaagaccatcctggctggcacggtgaaaccccgtctctactaaaaatacaaaaaaattagccaggcatggtggcgggtgcctgtagtcccagctactcgggaggctgaggcaggagaatggtgtgaaaccaggaggcagagttttcagtgagcagaggtcgcgccactgcactccagcctgggtgacagagcgagactccctctcaaaaaataaataaataaataaataaataaataaataatctgtaaagtgagggggttggactatgtgacttgtaagacattttatagttatatatcataagggaaattgtttccaggccttcagtaaagggaattgccagattattttgggaactgaatttaactcagcatttactaaggcactgctatatacccagcaccaagcaccaagatttatttgatctcaaagtattttttaaattttaatatgtagcattcaaggctgggattaagtttgttttttgaagtaaaactaagcagtgacatgatatcggataaaaacatggccataactgtgcaggcacattgcatatcaggagtttctgtgcagtgaactctaggctgaggatgcagattcattgcatcttgcctgttaatccctgctccgctgtggcctcccagagtcctgtgttggagcagatcctgaagctaaatccagactctggagaaaagaatatcgtggtcagttaggtatagacacacgagctggaagggaatgtagtggttccaaatatttgccattcctactctaaagaacaataattcagatcataaccactcttaactgtttcctgctatacctgaaagagcttcaggtttttcttcaaagcaattgtagaaatgacaacattggttccgaaaagaatgtagagacatttttattctaagtaatcatcaagaattacagaaatgactgcaaagtgtcttttcagccatcaagaagctttttcttttcctaactcaggtgctattggtttacatttattaaaaatgtcagctaatcttctgaagtgcccacatttatggcctaacattccttctgaaagtaggtaaaggagtataagtgaataattataaaatatgaatttatgaaatgttatgtatgcaatcctactaacaaaaacagctttactcaccaacatctcttgttggctttcttggttaagtgtctgacagtcagaagcaaaaggctctggggattttctcttgaggtgagagagaggccacaagaaacattaaggtaacttgacactttcagcattgaactatctggaccattggtctcaaagtagcagtccacaggtgcaatatggcatcccacttttttggtttagtcctcaaaatgttggcccacacaagtattttgataaagttttaagtagctgacaacatatacagttagaaaaaaaaatctcataaaactccatattaccaacttctgttagtcatcagatttggggtctgtggcccattgagcctgcattcctattggcaccatgcagccggagctaagtaacgagagtaaagaggaagctgattgattggttttgtacccacatctccattaaaagttagaaacaaaagacaacccaggtaggtgtcatgtttcaagaaaaaaaatcttatgcctagctttctcccatttgttacctgaatggcccctggagacatatgaaactcaagtcctgtgctagacaatgtcagccatcagctggtacaaaagtgagctctgggactctgtggacacaccaacacggacccagtaaagcaggcatttagagccaccgtgcagaagcagatctgcatggctccccacagcctcctacagtgcccacagtgccatgcgtaacttggtgttccataatcaacgaatcaattcatcaaccagtgcttctcagattttagtgttatgcagaaaacacacctgtggagtttgttaaaactgtagattcccagggcccaacctgagtgtggaatctgcagtttaatcaagcacagcagggtaatacctgcatatctctttatgaaacatcaccttcaattattagccctcccaattgctttgtctcacttggttatgtttattttgattagtagtgataacagtagatgtatagcctaataaaatttattaatacttcggggaaaaagtagagtgggggattattatcttttgggcacttactatatgctaggcatgtgcttagaattttataggtgacctttcctatataaccctgtgaaattatacccatttataagctgatgaaactaaggcaggaagaggttaagcaatgtgcttaaggtcaaatggatagtcaagtggtagggtcaggacctaaacccagggttttgtatgccaaaaccttgttctcagccacagtgttagcctacccagtggttttcagacctttttgacttacaataaaaaataggttgatatcatgatccactagacacatacccgcatccttacacacagaaacatatgagtgtatatacacaaacacatctataagactatgtatatcttgataacttctgttcattcagtttcacactttttaatgctgggttttaatccactgaatagatgttgtaaccctctcaagggtcataacactcagtttgaaaaacagcaataaacctgaaattccataagaacaataaggaatattagatactatagtttatggaccttatggccaaagtgtgtgtgagaattatgtgtacaaaatttatgcagatgagtaatcacctttcatttcagaactctctgagtaataataaatgtaattataataatttattacatacgttgtgctttataattttccaaacttttcagattcaatatctattttaatattcacaaaacctgatgaagtctaaaaaaagaacaacagtaataatgtaacatatcatttatgtcttatcattctgtggaatttaaggatttagatttccactagaatagtctattgaagtatacccattgaagaattacttgcttcataatatcagtctatcacatcaccaatattttgttttcttaaaaaaagttattatgtgcttaacgatggatagaaaaaaatattttattctaataaataaatctttctgcataatgaagtacctttggtgagataataaatatttaataaatgtaaatcatttttaaattagaataaaacatgcttatcttcttcaaggcaatagtatccacaacctgcctgcttagctaacacagggagatgcttttgctgatattttctcctagtcttctaaaatcagcagggctcaaaggtggagagatgttagtatgacccatgacaatagagcctccactttcctattataggtcacactcacccttttcagacagtgacaggcaaagttgctcaagagatggcactgggaagaggcaggatgttctgccccttttgtaaatacgcacattggcatgacaggctttcttccacactgttttggataggcattttcctcccctatcctctctgtcccatggagacagacaattagttttgtcaaaataattcttagtgcatttacaatcatcagggcctgaattttcatctgcttttgtggattacattatattactctccaggatttatacaaagaatttgctaatttttttaaataccaaatttctgtaacccacttctctccctagtttctaactcttactcacacctgtagatccaagtgtccaaaaagttctgtgaaagtcgttctgaggagaatattataagctgttgtcttcaaagatgcgtcaactccttgacttttgaaataatttcttctattatttctcttggacacataatggcaaccaagaagtaccttactccacaaaggataagcttttcccccctaaaatgtgtatttaaaatctcagtctgttcagtaataggtccttacagcaaaatcatccttcagaattatctagtaattcattttcatttcgtaaatatggaaactgaaggccagaaaatctgtctcccagtgagtcttcttttctgctaactgcatttttttgtcaaaaagcagagctaatgtttgcagaatgccatgaatcatgtattctgcatcacagctaatttgtagccacagtatattgtgcaaaaaaaaaatcactgaaagcatcaaaattctaccacccaaaaaatgagactttgtatgcacatgtgtgtgtccaaagggactttctttggttatgtataaatggaaaatagaaatctatattgtttcaggtctgattctacatctgctaattggatttcagtgtatggatttattaagccaatattcatgttcttaagtaaacatctctctgaaagcatacatatgacgatagcttttaattggcagaatcaatgactaaattagatgcatgccaagttgactttgcaaaagtaatctaggttattaatgaaaggacttcatacttaattttagtagcagtcttataactaatggaaagaaagcagaatgtagaatcctaaaggtcttccaagggcagaacttcgtcttttttttctgacaggaatggccacattattctgaaccattctgttttacatctaattcccagctgacaagtgttcgtttttcattcttattcattcgtcacccctgtgttcactctgcctgcaaggcaactggcctgccttctatcacatctctccagatgataaaagatatgcttaaaatcttatctaccctcccttcgcagagtagcgaggcagcatgctgaaatgagcggcttctgtgctgcacggccgcgatatatcctatgctcattacacaatctgaaagccagagaggaggttttacggcaggaattaaaagcgtttttcaggaagaagtattgccttgtagggggttaaatgtgagatcattctagaaattagataaaatttacatagagcttaaagccaaacccttaaaataattctgtggtattcagtgatggtttagttaaacctgtctctggaagtagatgcctgtagctgtcgccattctcaattaggaaataagggcctacataaaatgtgcctttatatggcaagaattagaaaactgtgccaaaaattgcaccatattctaagaagaattacagcatgctgcactcaaacccactgcccgttaatggtgctactaacttctgtcaccttaaaattttggaaaagagtagtagataccattgggacttagaaaacaataccccaaaatgaaggcctcagaagcaaaagttttctctgaccttctcctgccctcctgtctctcagtccattcttccccaagaccagccatggaaaagacaatccctcttcccccgaggcgagtcatagaaacccccttagtccaaaaccagccacaaaactgaaaaatattattctaaatttccatcctccattttgtgtaaaaagtgaccataaaaaatttatctaacctaccttgtgtgatcataggtcataagacccccattccagagagggtcctgcctgacacccagatgaaggaaggaatgaatgctcagagaggccaggaagaatctagacccacagtcttgctgggcctctccacttagtctgttaacattaggtcagattctttttgtccaatcatatttctacatggctgtccagactttgttgaacggaagcataaaaatggacaattatccctggatctttatgtcttcattccaaaggctcccatgtgtacatgttaaataaaatttgtctgtcttctctccaattaatctgccttttgtgacttagttgattttccagtgaaccttcagagggctaaggagaacttttccctccgcccctacagtacccagaatggtcatttccccacttcctggccactcctcatcacaacttggtttctgctcccggtcactcctaaacttcccagaccaatgacttctctcctatgagtacttctgagtccttcactgcatttctcctattgacctccccattttttaaaattttattttcctcttggctgctctgatgctaacttccttgggttttctcctaccgctttgttcactctatatcattggatgacagcttttcctcttgaatgtcactgtcctcttttttttatgctgcagtctctccctggtgatgccatctgtttccagtgcttcagcgattgcctagttggtgaagcacaagaaatcctaccaggccttcttttccaagccctagacctgtggttctcaactgggggtgacttttccccttaggggacatttggcattgtctgaaggcacttattttgttaaggttgggatggggttctaatggtctctagcaggtagagtccagggatgttgccaagtatcctgctatgcaaagaacaactgtaccgcaaagaattacccagtccccaaaattaaaagggttgaggtttaggaaccatgatctagactactatacttttcagtttgaatgtttcatagatatgccaaacctaacatgtaccaaaatgaatttatctttctctctgcttccctgcccatcttgatactatgccactcagtgtttgtaccaagttaacaatgcagtagctgagaatataacattatccttgccttctggcgctctccaaatacctacatcttcttcaaggtatgatatatttatttctagaattgcttcctcctcttcctgtcctctatcactagctgagttcaggaccccatcatccctcatggtttattcaaatgagtccctaactaacttcaggctcctcaccaccgcctcactccatcagtcactctgatggacacccttgttctctgatcttgctcctttgagggtttgcctttccatagcatgacagaaaggcttttcataagcacacctcagcttacctttctagtcttctttctgtgtcttgtacatcttcatcctaagtacctaataaaatgtctaccatatggagacaatgaataaatgttaaatgaaattgctctatttaaatacatatatgccttactttttcttgttcttagccctcattttgtgatatcttgattaatttaaatcagagtgagtcactatgttatttaatttgagaactcattccagttattatgtctttgcccaaccccacatcaggcagaagtttctcagaatcattttttacaaacaagatatactttgtcaagaacattgaagctcataaatgatattcactgctgctctttttattggtatctggtgtttcatcaaattttatctcagtgcagatcaaaaaaacaagagaagccaccacatcagaagagaaaattcttaatgtttccattggaagagtacaaattaaccaaaagagatgtcgggggatgtgtggggtggcaaaatgtagaaaatccgtatcagcaggttctaaggcagccattgattattatgctgtgaggctccaggtaatttggtcaacatgttttttggaagtaagataatgacatggtttagataactttaaagttatgataactctgtggattccaaatgttcatttcttgttgttgttgttgttgttgttgagatggggtctcactctttcacccaggctggagtacagtggtgcaatcttggctcgctgcaacctccgcctcctgggttcaagcaattcttatgcctcagcttcccgagtagctaggactacaggcccacgccaccatgccaagctaatttttgtatttttagtagagactgggtttcaccatgttggccaggctggtctcaaactcctgacctcaggtgattcacctgccttggcctcccaaagtactgggattacaggcataagccactgtgcctggccccaaatgttcatttctacaatatattcaatgtcttgacaatcaaattagaagcatttttctgatagaaattctatcacatttggaggtctcttgtcttgcctcagaccctcatagatctatgattttctcacaacctttataatcttgagggttttcttctgctgagaaattcaacaatatggcaaatgtgtaacaatgcagtcctttctcagtgcatttttttccaggtgctttctggtagagctctattagggatataccttgcgagcaggggtcacaacccctgggctgagaactggtactggtccgtggtctgttaggagctggtcgcacagcaggaggtgagcaggctagtgagcattaacacctgagctctgcctcctgtcagatcagtggtggcattagattctcacgggagcatgaaccctatgtgaactacagatgcgaaggatataggttgcacacttcttatgagaatcaaactaatgtctgatgatctgaggtggaacagtttcatcccaaagccatcccccccatgccccgccccagcagtcagtggaaaaattatctgccatgaaaccagtccctagtgtcaaaaaggttagggaccactgctctagagtcttcaggtttccactcgctagttcaatccactgcaatgctgctttcagattcttatgtctttatcagggacctgggataacagaacagaggcattaattttttattaaaattcactgggtaaaattctaataactctttaatggaaggaactgaactgtacatgcatgaaataaaatttttgtaggcattttaaaaaaatgctgcttcaaagttctatgattaaattaattttctaactttagaaattagactaaatgtatatagagtttaaagccaaaccattaaaacaaaataattatatggtattcagggatgatttagttaaacctatctcttgaagtatgtgcctctgatgtgtttaaaatgacaaactggcttctaacatttttgtgcccatctaacaacagtttgtaaaactcagctgcatactcctgtatcaactatatctatataaatacataattagatgcctgggatatgtgagcagaaatgactagtcttctaattaaagaatggccatatgattaaatgtagtgatatcttgggactgttctcaattctcttttctctgccttgtacttgagacacctgaagaagttatgtttcttccttatagattccagcattctgttttccactttgaaatggaaactcacttagagtattaatcaaaagattccagagttactggagcttcagtagtatccattgtgagaaaagaggaaaatatgtatatacataagggaatctgtaggcataagaatcaagagaatggggttcttttgatttaaaactgtgatcatcataattgatgatcaaaaaatcctaacaaaaagcaattaatgaactttattaattgttaaaataaggactgccaaaggcttccattgaagtttaaagtaggaacagttcataacctctgaatttcacaatttattccacataatatagtcaccagattatagtaaagtgctaacaacatgtggttaaacaaaaatgcaagtccaggcaccatggctcacacctgtagacccagcactttgggaggctgaggtgggaggatcacttgaagtcaggagtttgagaccagcctgggaaacatagtgagactctatctctacaaaaaatttttttaaaaaaatagccaagcatgctagcatgcacctgtagtcccagccactcagaaggctgaggcaggaggatcgcttgagcccaggagttcaaaactacagtgagctgtgatcacaccactgcactccagcctgggacacagagtgagaccctgtctcaaaaaaaaaaagaaaaaagaaagaaaaaaaagcacagataaaatactaagccagaaaattttttgtactctctgtaaatgagaaaatgttgtttaattttgacatgtattttgtcacttttacgttccagatctacggaagacatttgagcaggaacccctaggaaaggaagtgtctttggaacaggaagtcttactccagtgtcgaccacctgaagggatcccagtggctgaggtgaataacaacaattctttgcatttagcaattggcactaagttattctaacagaggcctaatccatggctaatggtgcagtgaattagggtatggcatgatgaatggttggtaatagagtcctaactgcctgctgctggcaaaatagattgattgggaactgattaatgacttgggagtcaattagaatgccccattggacaaagccacaggcagcttggtttagttttgtcattctctttcaagaaatcagaaatactgctttattttgtctggcacttatcatagagagatggtatgacttaacaatgtgccatcaattttattattgttcttgctgatatgcgaaaaatgtgagtgtaagaagagagtgtgtttttctgtgtctgtgagcctgtgcaccttacatatgtattttccattccatgatgaagtcatagacatacctaaaagccatgcccacacaccttgcataaaaacacattttaggagtaaaaggtgtcaattagtttcatcctataaactttccatcaagtcctacattttccactttttgtttctgctagaacaaagcctattggttgctaatgaagtattacaaatcagatgcataccatgacttttcattagcaacacacaataccatgtcctttgaaaatatctctctttggggaagaggactctgtgacccagaagagattgcaagcactcaccatcatcttagatcacactgttgaggaaaactaatactgtgtctttcatttgttaacaaataaatcctaaactctaaaaacaggttaccctttaaatgattattaggagacatccttatatgcatctgacactattgccctaattgaccccgtgtcctacaagtccaagcacacattaatttgacaagtggcatagctgccagtttggtggtggtccttgttggcctccaaactacactgagtcatttgaaagttttactctctattgcatgtgttgaaagaggcatatttcagttgttgcaattgggacctatatatgggttcaatgtatatgaatttttaaaaattaagccctgaagttgtgcctatctctgaaacggaaaaataatactaatgagactttcaacatagtccataaagcaattaataattaataatgtacttactattttacttctcatagttttccatttttttcaagaagtaaagatggggtcaggtagttagctggtcccctgacaacaagctcaaacatctgattgttcttttaatagtaataataataattaattgaaaatttaggcagagtccttatgaaataaccccatttttctatcacagccattcatatctctatgagtcaatgcaaagaactcaaaggaaattttaatgaaattcctttttttttactttgaaagagagttatttttttgccttaatttggcatctcatgccaattgtatcagagattttgcttgatagtagctatttcattcaacagcatcaaaaccttatctcgcagcactaagacacagtatgatttaatacgactaggaaggagaaaactcttctctattcaatatttcattttgataatgacaatagtgcatatgtcttcttaatggtatttctaaaatattaatgcacacctcctccatgaaaccaccttaaaacccaaaacagatcatgagcaacatgggtatccatggcatcatttttgctcagggcttctaaaaggtaactgatccttgcaaagactttaggtggggggagatcttagtaatttcttcatttttttcagtctccttgacaaagtagttcactttgtcaaggagtaaagattcatgactgcaaactaattggctgtgaattctatttgtatcatcactagggaagagaccaattaaaacttggcaagctcaaaaatcatatacccatttgacattcaaagaactatatttaatatgcatttctttttcattttttaaagtcagaagagagatcaaacatacatgctcaagagcaggctaataaattcctgtgtagattcttttcaacactattaaaatcaccaagatcagaaaactaatgaataccttaacatgacatattacaactgccatttgctcaagaggagcagatacgttaaaaaagaaagggatgaaaggtaacttagtgagttaaaggattatacgaccattttccttctaatataaatgcattcattatttaatatttcatttatttgtttaaagaatctttaagcataaaaataggataaagtgaaatattgatcttaaaggaaaaccagcaggtaaaactcatgtgttttgtaataattagatcagtcgttgggagatgaggccagactggatttgtgctccttttgtctccaaggcaaatgattccaagaaagagtcaggcaaaatatgttcaatgaacatatggctgattgtttcaattgatctttgttgtataagcatatggctagttctattgaggaagtagtcaggtacattctttgcagaatgtcaggaagcagtaattccttttctctccaaatcaataagtttttcaagaactctagtcttagttttgatataccactttggctacaaataatggcataggcatttctaaggtaataatattttacttcttccctattttggcatcctatagtctccaccatagaatgttttctaattttcttacagaattccaggttcaaacccaaacatcaccattttttactttggccaaagtatttaaatactgtgaaccaaagtatcctcaactataaaggggagataataatagtgtctttgcagaatgtggttgtgaggtttaaatgagataatatatgcaaatcacttagaacatgtcaaaagcactcaagaaacattggtactattgttatattataattttttaattcacacaagaccaaactcaacctcttaaattcaaaattcttactgagtaccttgcccctcttcttggcactgtggggtatgcagaggggaagcttctgtcaccaagattctctcctatgttctctagtcagttgctttggctggagtccacacacgctacaaatgaagacaatattgtgagctttaaaataaggaaatgctctttcaacaacactaccaaataattggttaatgaaactatttatagcaagtcatggtgtactgctgcccttaccctgatgttttgttttgttttgttttgtttgacacggagtcttgctctgtcatccagactggagtgcagtggcgtgatcttggctcactgcaacctccacctcccgggttcaagcaattctcatgcctcagccttctgggtagctggaattacaggcgcacatcaccacgcatggctagtttttgtatttttagtagagacggggtttcactatgttggccaggccgatctcaaactccatgccttaagtgatctgcttgcctcagcctctcaaagtgctgggattacaggtgtgagctaccacgcctggccccttaccctgatctttaaagctactattgttcattcagtccttatcaactcaggacactagaccagcccttatattttctcccaaagaggaaatttagcctgaggctactctttgtaggtcttcttttcagggcccagggaaagagtgtgacaaagtaagtctcagaggaggaagaggccaaccgaggactccttatacttctttaagccctttccaataagaaaacaggggaccctagggctgaagcacaagagtttcagaactctagacttgcctgctccttcgtctgttctccctaaagtcctttctttatatctggggactttattccaaagatttaataactgcatggcttccttagcacgagagcagactcttgggggcctagcgctctatcagatataaccctttagccaccgggtcacagggtatccagaaatcccagggagccagccagggcctgcgggtgagggacactcagtaatttagcaacagatacagaactgtttccacatcgaatacctggcatggatgaaccagtgtacctggctaaattgcagcccccacatgccacaattttatatagctctgcctaccgattgtattgaaatttatctgtttactcttcttcttgcctgacaagctcatgatgaaataagaagcaaaaagttttttgttcatgttttatctctaatgccagcaggttataagtcacttagcagattctctaagtatatttaactaaatgacagaaagaggccctgctggatgtgacatggaggcagcacctcaggagatggaaagctctagaaaaagggtgtttctcgtccctgaagatgcaatcctattgagagatcttggtgtgggatgacagactccatcagtctgaaccctgagggcaaggttccaaaccactaggaccaggaaccaaggccactgggagtgggagacacttgagttccaggactataagggaggtgtcaataataatatataaattttcaagtaaaccaggtgaaagaaagaaaaacaaatcccaggaatactctaaaatgatatagctcagtgtttcctttaataacacttttgttaggatcaagccaaaaatgtgattgttttcttccatttctggtgaggcatttgcctttctttcaacagataaaccttccccccatctccctgaagaagcaagaaaattaatacacccatggaactggtgctgggttattccactagcataatagcagcactctatgaaattaatcctctttgctcattttattttatgcctagaaaatgttactgtcacatggagagccagaaatatattccgagatgctttatcagattatctcttttggagagtactaggatcaaaacatcaatggatacaagatttgttggcatggcagaaggagcaaagctgaatttttctctaaaacctgtgatttctttcacctttaacaaggggataattgcttctctaattataattgagctatttctcataggagtttaattggaggaacagggcacaatgttcaacttattgacccagttgtgcttagaaactgtcatcttatttatcaacatttgcatctctaattagcaagtaggaaaatatggggtgaggtgcaaaagaatagattattttactgagtatagtcgtgataaacagggaacagatttttttaagctgatactgacagggcagaaaactggtggcagctggaggctccgccaaatgtgcagcatcaggtggctctccatctaattgattattcatatggctgctgaacactttgtttcatgagtccttcacgtttccttgccattcttccataataggaacttcatattgatgaatttccatgcagctatattgtctccagagtggtgctttacactcttttcaggcaaaagagtttagagaggaaagaagaatctgaatactggtttggagggagatgttgctttcagtgcccagtaattacccattggaattttctgctaccacgtgtgtagctacaagacagagttttggttatgatatgattctcagccttgaagacgggttttcaaaagtattaggttcccttactagcagtcagccttcaagctttgctttggtccaatcaacattcgccaaagtcacctccttattatgatcatcccatactttttggggtgaaaaagtatgggaaaaatcccatatttttttctgatatctgcctctaatagttacacacagagatcaccacaagcccagaaacactgtaagccaaattaaaattgcaataagtttaagcaacataaacatgcattttaaagcaaaagaaataacagattttatctgacttattatacatctgtggcttgatttttgcatgtacttagtggttgctttaagcctatagtataaaatgcagatttctaaaaatcatcaattcacttatataagaaagatttactgcagatgcatggtatgccagacatttttctggttgtaggaaatacgagtcagttaagtccctcgaggagaaaaacaataagcaagaatgtaagaaaaatgagtgagatattttcagataattacaagttaaaggaaattacacaaggtcatatgagagagggtgatggttgttggggattgcggatgactttagaattcaaggaaagtctattgaagagacagtaatggagctgagatctgaaggtaaggaaggagctagtcttgaaaagatctgagtaagaaagctccaggtgatgggagcaacaaggacaagtaccctcaggaggaggtgattggttacagggttaaaaaggaggccagtgtgtctgagacccagtgagcaaggaggaaggcaggacgacattcagtcaggaaagagggaacgagggcgcagacttgcagagacggtaagtgatttggagttttctttaaatgcctgaaaagccaatggagacattaaggaattgtcgagacctgacattcacctttaaaagatcattctggttgctgcatggaaaatagattttagaagtgcaagaatggatttagggacacctttatgggtttatttaatgatgaaaatctagaaaatatttagtctttcagaagaaactgaaatgttccatgtggaagttcagcagacccaccagaatgagctttattcagatgacctaagatcaatggttaataaacctcagctgtggccgggcgcggtggctcacgcctgtaatcccagcactttggtaggccgaggcgggcggatcacgaggtcaggagatcgagaccatcctggctaacacagtgaaaccccgtctctactaaaaaacacaaaaaaattagccgggcgtggtggcgggcgcctgtagtcccagctacgcgggaggctgaggcaggagaatggcgtgaacccaggaggcggagcttgcagtgagccgagatcgcgccactgcactccagcctgggcgacagagcgagactccgtctcaaaaaaaaaaaaataaataaaaaataaacctcagctgtgttcgagcacggtctctatctcagtagagattcagcagcaggcaaagacctaacctgtgcccatagtcacagagcaggagggttttcaaaaatttttgttggccttcatttgttcaaaaaaggtttttcttcaataagttcccttgctttgggatttcttccaataatttttatatgcctacacacactatcataaactcattatggagtcagagagagcaaaaagcatgtatttttctacagatggtcagacttagctatagacctgaacacttttaactggtaaataagaagaaaggctgagagttacttatcctgaaaggcaagtttatagtaaaaactggttaggaactagctacagattagtcaatttgttgcccttttgccctgtaaaagttagccttttacggacacttcaatgacattttgttcccttggatggtgttattacatatagtcattttactttaggttttggttattttattttatttggttgttgttggtattagttcatttgtcatcatgcttttatctcctcatagttgaacttaggttttagaagttttcagatttcaagacaagttcacctctgcaatatggcctatgtatgttcaaccctcaaaagcaataagctagacatatgtgcaattaagagagtgtttccccagcaggaaaacaaattccctttcttggcaaatgcctttcctttacagaagtaacaacaactgagcaaaatgccactagtttccacttggtatttttatcctttggctatattttttaccattgtctaaagatataatttcagcttgcttaaagaccaacattttttttaaagcacaaaaatacccagacttgcacaaacctactgaaaggtgcaaagtatatttcacagtggtcaacacagaagtgaatggatacttgtttttttccaaaactgagaagcaaaaatctacaaagtagcctctggtttttagcaagagagaacatccagcataattatccacagtagagaacttttttgattgtttaaagcacctacaagggaaggtgagatacctttcaccagtgggagaaataagaaaataatagtaggacttcaaactccggagcaattagagccaaacctacctgtgaaagtctacagaagagtattagctatcaatgtcttttagaattgtcaaggctttggccaggtacgggggctcacacctgtaatcccagcactttgggagcctgaggcaggtggatcacctgagatcaaaagtttgagaccagcctgaccaacatggtgaaatctcatctctactaaaaaaaatacaaaattagccgggcgtggtggtgcatgcctgtaatcctagctacttgggaggctgaggcaggagaatcacttgaacccaggaggcagaggttgcagtgagctgagattgcaccattgtactccagcctgggcaacaagagtgaaactcggtctcatttaaaaaaaaaaaaaattgtcaaggccttgctattctaactgtggtacatagattatctacatcaacacgatctaggagcttagaatctcagacccagaactcttaatgaaaatcttagcaagatcatcaaaccagtcttcaccaggcacagtggctcataactgtaatctcagcagtttgggaggccaaggcagtaggatcactcgagcctaggagttcaagaccagcctgggcaatgtaagagaaccccaactctacaaaaaataaaaaaataaaaattagccaggcatggcggtgtgtgctactccaggaactgaggtggcaggatcactcgagcctgggaggtcgaagccacagctgcagtgagccgtcatcacaccactgcactccagctggggtaacagagcaagaccctgtctcagaaaacaaacaaacaaacaaaaccactctgcagtactggttctcagaagtggaggcacagtggaatcacctgggaattgttagaatctaccaatgcttatatcccacccagagattctgatttaatagacatgatatatagccaggttatcgagattttttaaagctctccatgtgattctaaaatgcagtttgaaaagctctggtgtaaaggacaaagttaaaacaaacaaatacacaaaaacgtcagatttgtcacttccaaaccagtcagtaaaacttggcagattcccagctactagctaatgctccttggagaagcttggcttggctgagtgtacatttgataatagccccataattgcttttcccatttgtttgattaatgtacctatagacaaggattctaggctaaatctccattcttttaggtgtgcacacagttctcaactctgctatatcattttcaacctgtgctctgacttgatgggcctcagtatgagtttaacagagtaacctttctgatagacgtggagttttctagctaatgcttgctggactcacttttcatgttgggtggcatgtggcagtttccctctgttaattagaacaaatgtgccaattatgttaacgtttctcccgataccaatcagtgaataattagacacaacacatctgtctttcacaggagagtataataagaaaactgcaagatgttttgctctctattattgacatatatgattagacaattccttaaccaatcatagggttaacaagtttgtgtatcagaagggcaaaggatgccaaaagtggtttttggagctgagaacctctcattgttagcatggtcctgaccaaagtccacctatctctgaagtatctctgcaaagaatttaattggtctttccttcctttttaacaacaacaaaacattacattgcccttttggtaaaatgcagggatgttgtttatttatcctgaactaaagaaataaacaagttcttaggtatttgaaacccttaaaaagtcaactttatgtaaaaggttacactaaaagaaatcacaggccgggcgcggtggctcacgcctgtaatcccagcaccttgggaggccgagcgggtggatcacgaggtcaggagatcgagaccacggtgaaaccccgtctctactaaaaaaaatgcaaaaaattaaccgggcgcggtggcgggcgcctgtagtcccagctactccggaggctgaggcagaagaatggcgtgaacctgggaggcggagcttgcagtgagccgagatcgcgccactgcactccagcctgggttacagagcagaactccgtctcaaaaaaaaaaaaaaaaaatcacaaaattcagcctacaggatcatattgaaggtgttataaacatgtaaatcagaatcagattataatttgttataatttctacttatatgtttccatgatatatgaactttggagcattctgattgatggggaaaaaatgattttttttttgtattgttatttactggcatttgcatcccatacttggcaaggctttagaaagagatggggttatagtccaattatttcataatataagcagtgcctgcttgtattgattctaaaagtataaggaagacacttataaaatcaacacattagtcttcttgaagatagtcaaagtgtatcagaagataaagctttttgtttcatttggaattaaaagtctataccttctgccgactatggctcacattcctaaatgcttaatgatattcagctatgtatttgtatcatctaaaggtgcaacatcatcctttcttatcataatgtctatattattgtgattacaaatatattctccctcttgttagaaacagaaaataagacttgaatgtcagattataaatttttttcttactgtgacactaatttgcttattttaaaaaggaacaactcagaaaatacattaaatatattggaaaatagctatgattactactcctagtgtcagacattccaggaaacccccaaatatatgaatcaccctgggacacattccttctgcccagggcattgtgaagaatgcagcactgagggagaggccatagttgtccttttttaaaattatatcactttgccccagatatttgtcttctgttttttaatagtaaaacatgagcatagttataattctaaaacttttgatagcaaaccatgagaaaaattattggaaataagtattgtttggaaaataactgtcttatctaaatggggtcccattatatacactctaaatacaagaacattggaatctgtctttggtagcttcatttttatcatgtttaataataaagatgagaggggagtgaatggaagtgagaaaatgactacggaaagtcaagataaaactggattataacttatcccatatttagtgaccagctataaatggataatccactggaaaatttaatccatatttctctgtctttgctgatactgtaaataaataaaaatttaaactgaagaataaagtatttaggaaagaggtaacagagcatttttgaaatgtgagggttgctgaatgctggagttgctactcaaaagaaattatggaagcctgagccattgaaaaatgatctccttgttttgctacaaaacttctctttccctgacaggacttaggcagccaatggttctgactattataaaatagcagtaacagcgaaactataaaaccatgagtctaggagctataaaaagttgctccttaaatcacactgcacacaagtagggatggcagttttatacaccttttctgggaacataccatatactgtcaatatgctctagtcctaaaaattgtaatcaaattaggaatcattcatattcgttaataaaatcatgttagtattttgagaacactgtaccagactgaaggcgtcagtagaattgaatgacctcactgttggagggatttctaaacactttctccttctactgcaagagctggaattggtccccatgtagaaaggctagagatatgacatctcttctgtacatacactagcagggattgaggctgtaaataagacgacactttcctcactgggagtgttttatgtatgaagactcataaaccactacctatagtcctgtgcagtggtaaattgaaagtcagatttctttcaggtgtttttttggaagatattattaatttggtattatgaatttgaagatatgtacatgtacttcttaatagagacactaagaggcactgaatcatcattgtttaaaatacatttaggtaggtatagctttgtgtagggtcaagttagttctagggaagaggcaattaaattacacttattgactgtctcctaattccaggtgctttcttttcgtatctcatttaaatccccctacaaccccaggagggatgcaccctccatttgtacaggtgaagattatgattctgggagcttatagcctgcgcaaggctgcaagctcaattagtgggagggctgggattcaaagccaactctgcctgactccaaagcactgttttccttataacaaaaaaaagtttttttgactgtatgttttcaaaatttggttcattataatgacacaaattgtctgtgtgatctcatttgataattttcataagctaatcagataaaccccaggcaaatatgtatttggggagaagtcattcatttaaaaagtgtcacatccatctcatcaattttctaaaagtagagaaagcacatttcattgtgttgtgtgttattatttatacacacttcataaataatgaaaatttttagaaatttttgaatggaaaagagaaattcaactccagcatccattaatgattttattattgaagaagaataagactggaggacaaagtttatagagagaaggccaatgtgaggagatattgtgatggattcacacctattgcagtgtgaatcgatcacatcatattcagcacttattatgttttttttgtatttgttgagcatccagatggaattatctaaaaagtaattggaagtatgaatagagcttaagaaaagttgggactgaagataacgatttgtgagttgtcagccttgagagtgaataaagtcactcaaccagtgcatatctcattctcaaacctggctgcacattgaggtcacctgaggagtttttacactgattcttgggccctttgtctgcccaattaaataagaaccattgaaggtggggccccaggcatcaggatggcttaagcgctccccaggtgattctgatgcaggacaaaggaccatgatataaagtagaaggaggagaaaatgagagagagggagatccttgagaaggactatatgaaaatgctggatgttataaaaggaccagtgaaagaggtttgcaaaagaacagataatcaagtggcaggaaagacagcagagggaggcttttcagagggacagtggagctgtttgccatagagaagagaagatgcctttggatttagcaacgagaaaggccactgatcacctttgaaagtgaagtttgagtagagtggggatcaggaatccagacatggctaaatggaagagtgaatgagcaggtgcatagagagggattgggaatatttcactctttcaaggagtttagccactaagggaaagagaagtctgaagcatagctggggagggtgggtgtgtcaggcttaattttgttgttggtttgtttttaggttagaagagatgcaggcatgtttctgtattacttgagactcaaagaaagagcattgggggagttgatatcttttggactattcagtttgttgaaacagacatatgccatctgctcagattaaggaaaattacaaaaatattgagtactttgttggtgacccagggtctcaacaagcctacgaggacaaatattagaaagttaccagtgagtgaatttctgagtgcaagatttcaattgggcatggtcttcagagtggcatgtaaaccttcaagttcatgtcttctgaataaactttctcctttttcctagttgctaacacgtttcagctgaagtaggatgaccctatttttgttggtctttcattgattgttgaataaagactcacaatgtgaagattgttccttacagaattatatcacactgttgctcagcatcctcaccccagagcatattgcctgagaaagaaacaaaccacagtgttcagttatgctgaacactgtgagttctagcatctggaaatgtataaatagatggtgtctttaggacagaatttaatggaaaatgtatccattgaaaatatttttaagtatctcttattttatgctagatatcattcttccctgtttactaaacttttatcttagtttgtaagttatttaaagtaataaggacatgttgtagaataaattatttactatgtgaagaaatcaccataacaccagctcagagttatacagaagtcatcaaaagtgctttgacatatagtatccttttcaaacctcacaagaaccttatgaggaagttaggacagatattacttttcttgttgtagaagtagaaaaataaggttgagtgattttatgtgacttgctgaagagcatagactcagtgaatggcacagctgggtcctatctctaggcttttggccttgagacttgagtgtcttttggcaaaatctcactgggcttctgtgaaagtgcagcataaacacaactgcagaggcatccaggagacatatttggagagttccattcactgacctccaactcccactcctattaccctgttctttagtcttcccagttctcagccttcctcattctcccctggtagaatttcttgcttggtaacagaaccactatcctctcatgcctttgtgaagtgctctttaaaatttttgctagcatatccctaaaagacttaaaaaatacatatctccttgcacattttatgttggtatctaaaaaatattatcaaaaaaattaaatagtgggaaaagatgccatgtctgtgtatattataaacatttgacatctttaaaaagaattgttgacttaaagttatccaatggaatgcagacaccataatgatgtcttactcaacattaccgattaagaaaatgtaagaacaaactcttctttaatagtaggaaaacttgccaggcacaatggctcacacctgtaatcccagcactttgggaggccgaggcaggtggatcaactgaggtcaggagttcgagaccagcctgaccaacatggaggaacccccgtctctactaaaaatacaaaattagccaggcatgatggcacatgcctgtaatcccagctacttgggaggctgaggcaggagaattgcttgaacccgggaagcagaggttgcggtgggccaagatcacgccattgcactccagcctgggcgacagagtgaaactccatctcaaaaaaaaaaaaaatagggaaacttacagtattcctttttctattttaacttatatttctatgccatttcccccataggtttttactctaatagaataaattttaggcataaaaatttccattggtcatcatatttctctgtaataaaaatttgcgtataaactttatctcctttgaccatagggatcaaattgttaattttttttaaaaaacccaaatgtactacaagttttgataaataattacttggcataaagactgaatttttattggaaatacagcttttaataggagaaatgaggttttcatccctgctcgcctgtctaggtagctcatttagcctagtttgaatgctactgctgaaatgaaacaggatgaaatcaattacatttctatctgtcatttataatgaattcaaatactgagaaccttctcatacataagtaagtagaaatacgtggacttatgttgtaacagtgtccctcaactctgcacgtcttccaagttacaggtcaaaaattacatagcgatctgtcatcaaaatttatgttcagtgacccatcatttgacatattaggccctccttcagttttgatgaaagcaaagaatttaaaccacctgatttgcaaaaaggatttgtcgcccagttattacagtcccttattttctcaactacaacactaatattcccaattattcccttatctggtgccctagaggtttttacactctcatgtaatatatgatggcaagattttcatgcaaaagatgtctttcttctgaaaagcagagggcaagttcttagagatattagttataagaaggaatgcagactgggcgcagtggctaatgcctgtaatccagcactttgggaggctgaggccggcagatcatgaagtcaggcaatcgagaccatcctggctaacacggtgaaaccccatctctagtaaaaatagaaaaaattagctgggcatcgtggcatgcccctgtagtctcagctactcaggaggctgaggtaggagaattgcttgaacccaggaggcagttgttgcagtgagctgagatcgcgccaccgcactccagcctgggcgacagagcgagacaccgtttcaaaaaaaaaaaaaggaattcatatggaagttaaagatatactgtgattcccttaaaaatatttttgtttgtatatctcttagaaatttttgcatagtgctggatacttgaatccagccctatcttgaaatcctagcaccctgaactcctctttatctgcagtgttcccttagttatttatatgccatgttttaggaaactttatatgatttagtttgttatttctccaggtcatttacatgtgaagagatccttctaatagtggaatttaaaattggtctctcttaatgacatttcaagtcattgtcaaaaatttgggggagcaattttggagggtaaggaggctttcctgatgcccctaaaatcaaagcacacccaattctactgctagttctgaaagtaaacctgtattggtcctatgagtgacagggtcatgttgataacagaaagtgtgtccaatgcttcttttctaaggacctctctgcttccctggggacaccagcctgaggacagcctcaacccaagtcctggagtagctaaaatgtatgtgtcttggtgtcccagctttttccagcccctatctcgtaatctgcagcccactctgtcaaggctgaagtctgtagcactgtagttggctcctcctggttcttggttttatggacagaaaagagtccagagctcaggcggtcctgaatttggatctctgctcctttctgagcttataaacctgtgcaagctcttctctgtgagcatcattcttctcatctgaaaattgggaatgcaactacttctttcacaggctgctgtgaggaggaatcactaagtacaaagcacctcgctggggacctggaatgcaccatacaagcttcttgtttttctccttttttacccttgggcaacttctctccattcctcccaactgcttctctgtcgtcccaatttcagcacaaggaaaatgttcttcttttgaactctctctgctccctaaagccaggtcaggattctcatgatttgcattagggagtacaaggtgccctcttcccctcaaggtcacatcccctacttttcctaccctaaagaatggtcattattctttaacacagaatgtgtcccataattttcacttctcctttcccattagaccagcccatctgccccagaatcctttctgtggggagagagaaaagcaaagaagagagctcagggacaactattccatgtgtgtcatcaaagccatggatcgaaggctgctggaggtggcaaggtcaccaagtctgcccagaaagctcagaaggctaaatgaatgtcatccctaatacctgccaccccagtcttaatcagtggtgggagaatgggctcagaactgtttgtttcaattggctgtttaagtttaatggtaaaagactggttaatgataacaatgcatcgtaaaaccttcagaaggaaaggaggctgttttgtggactactttggggtttttttgtttcgttttgcatgtggcaattattcgtttttaaaatctatagtttttaatggaaacaacttgaccaaaaatctgtcacagaattttgagtcccatgaaaacaaagtttaatgaggaaaaagatgggggacagtccctttttggggaccagtgcagtcataggaccaacataggtgtactttcagggtggtagggaaagcagaggtggctggaagaaaattccatctcttagggacatggataagggtgttgaagctaatgatgtgtatgccatggtatggggctgagagactgatgtcattaaaagaacaagtagactggcttgaagtactaggagaaaagaaatggaaaacccataaaagtaaattaaaaattataaaaatatagatggtctaggtaaaaataatagtaatataaattgcctatcatttatgcctcattaccaagtatgatagtgaatatttcttttattttaataacctgtgtttcattaaaaatcttttctacttatttttttaaaactgataatgttttcttatactttagaattagaaaataatttttatgaagattaattaaaatgttaatacctataaagcaaatgcatgctaatgacatctctagaattataaactcatagagtttaaaggaaaatatgtatttagggttagcatacaaacaatattggccaatttaatactcaattacttacatatttgtagtgcaatcttgaagagttataacctaatattgagtggactttgccccacagaaatgccagcgaaggctgaaaggactcaggtgttaaatatttttcttctagtttttagattaacaccatttctcttttattttttagggttgtttggggtttgtctcaccgcttttagtatatccttaactaaatgttaataattattttcaaatacttaactgtatgccagacagtaggtgtcttgtgtattaattcatttagtttttaagaaccttataatgggttctaaaattatcctcattttgtaaatgaggactctaaggcatacagaagataagacacttgcccacgggagacataaacattagctccaaaatcgcagagttcagttttgggcccaagcagttgaaagcagccctcttagctggtactttaggaactgctccttagaataagatggtcgaggccgggcgcggtggctcacgcctgtaatcccagcactttgggaggccgaggcgggtggatcatgaggtcaggagatcgagaccatcctggctaacaaggtgaaaccccgtctctactaaaaatacaaaaaattagccgggcgcagtggcgggcgcctgtagtcccagctactcgggaggctgaggcaggagaatggcgtgaacccgggaagcggagcttgcagtgagccgagattgcgccactgcagtccgcagtccggcctgggcgacagagcgagactccgtctcaaaaaaaaaaaaaaaaaaaaaaaaaagaataagatggtcgattacacatagtgggactaataacaccaaacaacagcagaataggcaaacaggtcattctaatattgccgtgtaactgtttttagtacctgttaataaaatcccatgcctttataaacacttgagtaaattagttcaaatatgccccaaatcattgaaaggactatagttactgaaccacaaggacagaaattgtttgaacattattttgcatcattgcaaccatgacaacaagtcatggtttatggttgaagtcttttattgttttctgaactccaacctgtttttctttctcttggaatatttttatgtaactaaaaataatttctaactcagaaagactactttcttgtataaatcagtttgttcaatggaaggagtagagaaaagagaagcctcaggttgaaatcaacaaaaagcattgaaatgaccaaaatatgaacagaattcagtggccagaccagagtactgactcctggttaaccaagattagcttacaaataaatagctttgcaacaatataattaactacatactattcaatgcaataaatttctaacacaacaaaagattctgtattgtttcttggaattttatatacagtgtatataaggagactcattgtggaattgtttcacatggaagaatgttagtttagtagtgtgtgttctggaaatactgcatgaaaaggttatatgttttaaattgtatgttatggctcttatattgatttgctgattcagacaatcctttacatgataaacagaattattctcacacactgttttcctttccattcatcttctaagttttattaacgctttatcatttttatctaagccacaatggtaataaatgttgttgcagccatgctggccctgcaaatatcctttttatcaatatccatgttcagttcttaatgctaagataaagctgatccaaaagaagcagaagtcctcagggttatttttaaaaattatttcaaaactttaagagaaaaactcactttgttcatggaaataatgggaatttttagcaacttacctgttgtcaaaatcatgctgtgctagctggattccttgtgagatcagccaaatctgaatcattatcctttctaccctcaattactttctgcctcctgtatccctgctccgtaaatgggtccttaagccagaaatggaagatgagtgccccttgcacccccctttccacataccgtcaactcatatgtcctgtcctctgtcccttccaattattgtctgaatccattttttttttctccctgtctcctatccctatgccacttttttcttttcttttctgttttttggagacagtgtcttgctgtgtcacccaggctggagtgcagtggtgcactcatagctctctatatccttgacctcccaggctaaagccatcctcctgccttagcctcccaagtagctgcaaatacaagcacatgccccatgctctactaatttttgcatgtttcttatagaggtgtggtctcactatgttgtccaggctggttgtaaggacttcagcgctgacactgagtaagagaaggagccattaggagggtttgagatgaggtatagtgtgatggttgatagtgagtgtcaacttgattggattgaaagatacaaagtattgatcctgggtgtgtctgtgagggtgttgccaaaggaaattaacatttgagtcagtgggctgggaaaggcagactcactcttaatctgggtgagcaccatctatctaatcagctgccagcacagccaggataaagcaggcacagaaacataaaaagtctagactggcctagcctcccagcctacatctttctccctcagcagcacatttagcaagcgtcccatgctggacccttcctgacctcaaacatcagactccaaactctttagttttgggacttggattggctctccttgctccttagcttgcagaaggcctatcgtgggactttgtaatcatgtgagttaatacttaataaactcatatatatatatatatatatatttatttagttctgtccctctagacaactctgactcatacatatagtatgctctgacttacagtttatggatcactctaactacagtcttgaaaatagacagttgagttttcagaggaaaagcagaagataagacaaacagtgtttgcaataattcaggaaggaaacgatagtgacttggaccaggaagaggtgggagtgagggaatgagaagtggtccaattcctaatgtgtgctgctctaacattgaatgggctaagaaagaggaaaaaagtggtcaacactaagtcaggcttttgtctaagtaattggaaggctacagttggcattaagtgaggtgcataagactgtgagaggagcaggtttggaaaggcggttcaggaggtcattatcagacaaccaagtggagttgcatgaagacagttggatatacgagtctggagatcagcggtggggtctgggctggagataaatttaggagtcatctgtgtgagactggatgagctcaccaaggaagtgaatatggatagaaaatagaaagcagcagaattccaaggaccgagccacagggacacaaatgttagcctaaggaagctgtgaggcatgaagcaatgtaggacaaaacccaggaaagtgtgctgtccagagaaagcaagtcaggaggaggaagggagtaaccggatcacgtgctgctgtgagtcaagtaagatgagcactaagacctcagcagcacatttagcaaagagaaaggagcagctatggtgaagcagtggaagtgaacacagattagagcgggctcagtggggaattgaagacagcaaatgtaaacaactattccaaggagttttgtaaggcagggcaagcagagaaatataggtggtgggcggggggtgagtagaggcagaaacgggtgagaagggtttttgttctaagttttgaaagctaacagcacatctgcaggctggtggaaatgattcagtatcaagggaaattgaataatttaggagagaaagaagagaattgctgggacttgcccttgaatagaagagcgagactaagatacggagtacaaatccgaggtgacagataggaacacagagagctcccccagtgataagagacagggtgcagatgggggtgaggacacagatagtgggagagccctggaagatgtcttgtgattgtcagttttctcagtgacatagaaatcttggtcatcagctgaaagtgaggctagaaggggaggtagtggagaggagtgtgaaatagttatctaggagaaggagaaagtgaacaatgaaaacataatgtgctttcttggcagaaataaaggcccacttgtgatctgttatgaattttaagatgagcccactctccatggctatttacacccatgttccacctcaagaacacagagcggggtgccgggcatggtggctcacacctgtaatcccagcactttgagaggccaaggcaggcagatcacttgaggtcaggagttcgaaactagcctggccaacatggtgaaaccctatttctactaaaaatacaaaaattagcctggcatggtggtgggcacctgtaatcccagctactcatgaggctaaggcacaggaatcgcttgaactcaggaggtggaggctggctgcagtgagctgagattgtaccactgcacacggtgagactttgtcttaaaaaaaaaaaacaaaaaacaacacacagtggtgttgtaggcaaatagtggccaagtgaatatcttgaagtgacaaagggatgagagcattgacagtataatgcaagaatcatatataaagctagacattggaatttatacttgaaagtctgagaaacaaattggtaaattcaatagattgtaggtgctggtgaaggattattgaattcagtatcttagagtgaataggaaagacagaaaagggtaaaggaaaggataattggaactaagtttatggaggagttgtaattgatgataaggacaagagctaaatcatgcttctcaaactttagtgtggatataaccccctgaagttcttactaggatgcatattttgatttggtaataggtgggcagagccttagattctatatgtctatcaagctcccagtgacactgatgctattgatccagggattgcatttttaagggcaatgatctagactggtatttctcaaccctaacagtaaattacaacccttggggagcttaaaacacactgatgctagaccagtgaattggagtttttgtgggttggatttagcttctctgggttgaatttagaattaatatattacaaatgttttccacattattctattgtgaagcggagttgaaaacctttggcctagaatgtgtgaccttagaggataaggtcattgcaggatggagggtcatggaactgaagggccaagacgttggaagcgtcacctttgtggttattaaactcttcagaaattatgctttagataaagtgactataagcccagaggtctgtaaataactacaaacaaaaaaagagtcaaaattgggtgatataatctggtgacatgagattcaaggcaaagatgtttagagagaacagtctgaaagacacaatgctgagcaagcacagcacttacccatccccagacccagtggcacattggatttgggaaatcaacatccaccccttcagaggacttcagaagaaacaatggcatcagaaagacctagactttagtatgagaaaaacgtaaaggaaacaatctaaaaagagaccaaaatgttagaagattttcatgctgtcttccaggcggtatggaagagtgtcaggacttctggagttggtgatgtgtagcccctggtattacagcacaggaggtgaggggcggcctgcagtcctcactgagcctttcatggagatgattgtctcaaagcagagtgctgtgatatggctggcagcactggggtgttggggactgtggggtcttgtcagaagctggaggagtcctgggcccccctcttcattcccgcagctattttctagctgtaggaccctttgcttcttgaaacaaaggcgtgaaagcaaatccagtatggaaaacagataaaagcagagtttctgtgattcaagtgggagttaagggaggagagcagtgtcccccacaggggtcgtcaaacactgctggggcttctcaggggtcctgaggttcaggtcagaaccactgctccaacacaggcaagagacacccaaggcaaatgtgtaattatgtataatcgagtgaagatcatatacccagcaatcatgtctcttcaaatcttttgtcaaccatgcagattgaacactttcttccatgtaataaactcttcatacaaacaagtggtttctaatatcccttgggacttctttatgttgtttatgattaggataacatcactgttaaactgacatcatttacataggaggaaccgtagttttgaatagctatgggttctccagaggcaaaccatgaaccaaaggtatgaatgtgagtagttttttaagaaagtgcttccaggagaaccctgtaagtgggtgagcaagcaggagaggaaagaagcctagtacaggttgaatgttccttatacagaatgtgtgagaccagaattgttttggacttcaggttttggagtactggcatatacataatgagatatgttgggaatgggacccaagttcaaacatgaaattcatttgtttcatatgcatgttatgcacatagcctgaaggtaactttatataatatgttaaacaattttgtgcctgaaacaaagtttgtgcacactgaaccatcagaaagcaaagggatcactatgtgagtcactcatgtggacaatctatggttgtttggtgtcaccgtcattcccttggggatgctgaataaactgtgtgttacgcacctgcattttgactgcaaccggtcatgaggtcatgtgtgggattttctacttgtggtgtcacgttggtgctcaaaagtttcagattttggagcatttcagattccagatttttggattaggtatgctccatttataatagtgtcaattcaggtccagtctcaaggatgtagctgcagcctcatccctgcaagggacttctggaaagttacagctcagattctgacccaatgagacagaagtcatatttctgcacccattagtcaatggctaatggggctaatggggaagttataaaaaatccttggcaaaaacaatccgtgagcctgagggctgctcttcagagaagagggccaggtatgagtacttgaaagagaagcacactgagcacaaaaattgtagaagggatgcaagaacaactgagactaagggagcctgtccatgctttgtgtgataggaggctttctttagaagggcatagataacctaggtaaagattccactcaaaaactattaatttcaacttttaattatcatcaaagagatttttaacagtataaattgtgccaccttctcccgtgcacttccagcaggatcgtatttccacacatagggtgaaacgttgagaaaatccaggtcaagtgaatatgagtatatatctcagagatactcaggcatatctctgactgaatgtagagtctgtatttggaaacaaaatacatatttaaaacacccactgttgtaaatagattctattctttttctcactaccctgagtgcaaatatcaagaatgtttagctttttcagcatttacatcattacaaatagtttctctactctacaacctcatatgtttctatatttcaggattgttgttgatttttatttttctctataaatgttggcttctcttctaaggattagaggagcattatttgagagtccctgccttaagtgtaatttagagttgtgcaatgtcaaacccactgacagatttagagattaatttctagacgtcttgtggtgctagagtagctccttaaggttttgaaaatggcaacaatattgactccctaccactaaaggttacctgtatccacattcaccctaatgcaaaaggagagtttaagtgtggtaaatatcaacgttgtttgttgttttgctttatggaaaaaactgtgcatagaaaaacaaaaggcaactgccagaataagaagtagtttacctccagaagaacagcttatacaggtatgtttcctctttttattcagcaagtataacatcactattactacattaatattattcacatagaaaaaaatagttcagtagttttaaatggtcatgtcttaaggtcaggttccccaaaagcacaccctgagccaaagatttgaatgttagcattatacaaaaggagggatttgagtatgatttgtaagctattcagattgtattaagaattggtagaaaaacttaaaaaaaaatttggcttagatacatctccaactatgtgttttgctacattttgaaaggtattttcagggatatttaatccatacgtttcagtgaggctacacgtaaaccatccaaatgttattttattacagctatgtgatgtctaaaatgccttttgtgcttttaaaaatagtctttctattcttttctgaaaagcagcaggtaagttgccaagagtaaacaaatcaaatagtgaaaggtttgagttcagtttgaaacgcttatcctattattttttattgggttctgaacttggcagcacacattccccattcgtgcctgcagggcaaagtgaaaacaatttgaacactgtatttcccaactggttcactgacatttgagaataatgtagtacagacagaatcagcatgtttggcaggtgagtgatacttaacatgaccttggaaagttacttcccaccagtttgcagaagttcatggcctggaacaacattgtacatattacaaaacacaggtatcgcttctcggccttttggctaagatcaagtgtacaaaatgcaggttaggacagacagccatcaggggatccatgctgaggatttatctacttttctcatttatctttaggtggaatggttgaaaaatgaagacataattgatcccgttgaagatcggaatttttatattactattgatcacaacctcatcataaagcaggcccgactctctgatactgcaaattacacctgtgttgccaaaaacattgttgccaagaggaaaagtacaactgccactgtcatagtctatggtgagtggcccttcagggtctcaatctagttcatgtttaactgcagtttctcgttggcatcggtaaagctagaagccctttttttaaaatttcatattatttgagacagggtcttgctctgtcacccaggctggcgtgcaatggcatgaccgtagctcactctagcctcaacctcctaggctcaagggatactcccacctcagcatcctctggagtagctggtattacaggcatgtaccaccatgcccggttctagaagctccttttcaatctccatcgctgcttgcttgctgcttttcacaggggcaatgaggtttaattgctttcctcgtactgatatgaaaggataggctcagacaacctcagccctttctcagtcagcttctaggaaagcgaaggaagcctacctgagtgcctgctgcttctataagccctcttctctccagaacctgcaccaccaagatctagattgagttctaaagatgaatatgcttctgtcagcctgctgatgtttctgtggacctaacacctcagtcttatcattgcaaaccctcagaaagcgggagctgacctattcccaaaatacattagagcaattttagcttcttataactcattctactcactccatcagaggtgtgcagagtgaagataagggctgccttatctggccaagtggccctaatcctaacgatatgctaaagtccaacgaagcaacttcttaggaagattcctcccacaccctggtcctttctaagccagctcatctctaaacctatcaattctctggaagtactaagcaatttcataccccattctgatgtggcacatatgcttttatctccctgtgtggtttagcactcagttattttctagtcatttcatgagtagattcatctccccagctaaagttaagctccttgatagactgagagactggtctatatatttacatatttctcacaatgttagacctctaatagttcctcatattattgatgttttactgtctcagaggaaattgaacaacctgggaagtatttagaggttatgctacctccagaatgatgtccccatgcctcaccacctcttagaacataatgaagatttttatcactgttttagtgttaaactccgtgggccttggagtcttactgactgaaggagggggagacccactggcaagtatgtggctcatagtacagtcagtcatgtgtcacttaatgatggggacacattctgagaattgcatcattaggtgatttcatcactgggcaaacatcatagagtgtattcacacaaacctagatggtatagcctactgcacacataggatagatggtatagcctattactcctaggctacaaacctgtatactgtgttactgtacagaatactgtaggaaactgtaacaaaatggtaagcatttatatatctaaacatagaaaaggtgctataaaaataagatatcaaagataaaaaaaaagataaacctgtatagggcacttactatgaatgaagcttgcaggcctggaagttgctctgggtgagtcaatgagggagtagtgagtgaatgggaaggcagaggacattactctacactgctgtagactttatgaacactacacttaggctatagcacatttgtagaaaaagtaaagtaatacaccacaatgttacaacaactatgaggttattaggtgataggaatttctcagctttgttataaccttatggaacagaccattatggtatatgaagtctgtccttgactgaaatgttatggggtacatgataggactgaaggagttaagaatttgtcaccccaaaatatgccacttggcatattgactattttctgcattaaaggtccttgagaaacagcgggctcaagatcactctgctagtcctgtctcttaaaagcaggagaggagattttcagctgaaagatggcttccctataccagaaggaaagtaacattcttatcctcaaggacaggaagttgagaccacggggaagttacgatccagataattctgtatcgatcttattaaaataactcttaatcttcttttagccttaacacataattgactttttcataacttgctactctttgtccaattcaatatataagcattcaactataactgcatctttgggtcttcattttcttaggccatgtaaaagttatattaagtaaatttacatgtttttctcctgttgatttgtgttacaccaatttaattcttaggcccagccaaaaaaaaaatcctaaaagagtggaagtaaaatattgcctaccccacagtaccattcagatggatgtgtgtttatgagaagagaaaccactatgctgttccaaaggatgaatgtagtgctgctttaaaaatgtcattttaattacaggaaaaatggcacaaaaattttttgatcctctgattaccctgaggtttaatttcctagtccagataatggctgtgttgaattgtatgcaattgcctttcttaaatcacaataaaatgttttcttcttcttatctctttttaaactgcctgaaagacttgattaacaacatttgaaatgcaagaaagaaatggggcacaatcacagcatgtgccagtcataaataactaatgaaggcagactatatatagttgtattatatagatgtttaatgcacatgcaaatctcttcctatgtatattatgctttcaatatccataaatacaatgaatgtgttgtctttaggaaggatcaaacgcaagtaacttagtatttagaattaaggaaatagctttggactggggtcaggaatattgggtcataggagtatttctgtcactacctgatcttcagagggtcttttaaccaggattctctgagcccttgcctccttctctgtaaatgaagggataaacctacgatcttcaaagactttttcatctctgaaaatttctgattattcatttctcattaaaatcccagcagaacagtacatatatcctaaaccccaaatatcagcttgccagtatgctagtaagcagtttatacagacaattccatggcagggaattttgtaaacttgagcaggttaagttgctttttggaacactcactgaaaccctacctatctaccatctgcttgtcctttacattaactcctaaaataacttgtccaagcctcataggttggactcaccagaactccatagaaaacatatatatctaaccagtatttcatatttagcaactgttttatatattttttgttaatgtaatttttagattgcaaatatacatccattaaagaaaatttggaatacagaaaaggtcaaagaagaaaatacctatacctataattctgccacccagagatagcatttaaacaaaaattatatgtatactacttgaattttctttcttttttttttatttttttatttgagacagggtttcactgtcgcccaggctagggtgcagtggcgcaatcttggctcctgtaacttctgtctcctgagttcaaatgatcctccctcctcagcctcccaagtacctgggactacaggcatgtgccatcacacctggttaatttttgtattttctgtagagatgaaggctagtctcaaactcctagactcaagcaatctgcccatcttggcctcccaaagtactgggattataggcatgagccactgcacctggcatatactaccagtactttatatgtatacataagatttaaaaataagcattatacattgttatattatacatcttttataatttaaaatgtataaatacatattaagtattgtatacatattatataaaattatatacatatacattatgcataatgtatccataaacattacttttatttaaaacatactgaaacattcatgtattatttatttatttggagagagggtctcactctgttgcccaggctggagtgtagtgatgtgatcatagctcactgcagcctctactcctgggctcaagggatccttctgccccagcctcctgagtaactgggtctatatacacatgctgacatgacctgctaatttttttttttaatttttgtggagctagggtgttgctatgttgcccaggctggtcttgaactcttggtctcaagcaatactctctccttggcttcccaaagtgcttgggttacaagcatgagccactgcacccagcctcatgaattattaaatagccttctacagtatcacttttaatggctgtccaggagtccattacatgaacatatgtggctggctttgccattgtcttgtttttgaacattacagttgtttccaattattcatctttatattaaataaagttgctgtaaaaaatgtttctgtctgtaaatataacattcatgattattccctattgtataggtttctagaaaacaaaatattgggcaaatgctgtgcacatataaggtttgtgttacttgaatggctaatacacttctttagtatcaggaaacagatgcatatactagttgtattatattttagctacaaggaaataattttgttagaaattgtttaattacaatattgtacagactcacattattgaagtattaaaaatatatatcaaagtattttctaaagagaggtctgcagaactgaatagtgtgcagtcttacggtgtaggttttacaatcacatatgctgacagctccatcagacatcataattggcctttatacacaaagtaagtgtttatttcaatatcaactaatcgccaagtaactcaaatagccagtcaatttgtttataaccccagtactgtaagattttattttttaaccaggttcactggtttgtgcaagtgaataaaaatccttaaaacgttgtaaagtttacatatgcttaaaaaatcaatcttttttttaaggctaaattattttattctgttcccatgctatagattgacttgcaggcttttcatagagatgtaaacatttattatttgagacgagctgtcaaaagtaattttggagcttgactaggtgaggagataggtgtattttttaagaacactggccaaagaaaagagaacacatacagtcctatttatttttctgagtaggtgagtaaatcttgacaaacttttttttttctctgtctatacaataaaactttggataaaatgaggtccatggtctcttctggctttgaaattttggatttttataatggtcgcttggaaaataactctttgtttacatattgtgtctgttttgtgtgtccatgtgtgttgtgcatgcacacatgtttaatccactttttactgtttgcctcctttcagtcaacggtggctggtccacctggacggagtggtctgtgtgtaacagccgctgtggacgagggtatcagaaacgtacaaggacttgtaccaacccggcaccactcaatgggggtgccttctgtgaagggcagagtgtgcagaaaatagcctgtactacgttatgcccaggtaaataaaccagtcctctcattccaagtatctcctattattcaagaaacatgcttttagagaatagatacacagactttattcttgatctgaatgtgtgatgaacgttatttaaatccatcctactcactgtttacattgctgggaaatcaagtattttcctccaaaagaatacttaactttgttaccaaaacatgcaaaattgtacaaaacaggagattaaacactactggatataatccctttatattattcaacaaaactgctggggccaagattgcagattttataattcaaaggatttgaatggcactggaagccacacattttaggaataacaatccttgatcttcagaaaaccgtagaaattaattggaactgaaatttagaaaatgttttagatggaaatattttatatttggtgtcagtttctggtgaagggcaaatacaacatttgaaatgaattataaggaatgcaaagttttttggtacttgggataatggattctgaaactacaatgcagtcagttctttgttatctgtaaatgttggtcatctatttttttgttatttgctgtagtacctacagcaagagtgcatgcatctctccacctcttagcatctttctgtactatctcatattgctaccagctcttatccctaggtaaatcgaagataatatttgccaaaagcaaaaacaaaaccctttaaaatgcctcgttatacaatatattccaaagctaagctaaaattttgaaataatccataaatttactgcactcattggagtagctattgtgttttcaattttattgttcagatacacagcctccttacttctcctttttgcctaatttggtcatgtttatcctttaacctttatcttttaacctttctcagagatgggctggacaaatgaactggagagatatacataatctacactttacattcccaagtgttgatttccaaatgtcagagcagtctcccacagtgagccctttgagagcttttatttatgaaacaaattttgacacttagctagcttaaaatttcagattttgttttataggagctgactcccacaattaaaaatgcactgatcaattagagttgaaatagaaatgtgtgtgtgtgtgtgtcagtgttttggtacactggattggtgcaggtcaaagcaaatgtttttgctctaagtagttgggacttgcttatacagccagttctgtatgactgaaatattaatgcttttctcatttttcatgtgggtatgtttataaccatatccacattatacacaatatatttacataataatttgaatatgaaatcacttagatttctcaaactatgtagactattaaaatgatataatttttactaatatgtagatataaaaggttaaggtgttcaagaaatgatgtttagcattgttttacattgaatccttgatcatcataattatatatttcagggaaaattaatattttaaagctcttatttcaatatttttatcctatttttgtgagaagcttaagctgcattttgaagtgtgattgaaatttactatatcttttttcaaactgagacttaagttgtgtgcttttaaaatagagatatctaagttcattatctttgaagttgctgacaagccagccaccaaaattaggaagaaagtaagtcagttctaaatgactgaatcacaagaaatattagggacttacctaaaattttttaataaaaatagaaacagaaacatcatcaaataataaatgaaaaataatagtgttttcatgaaaacattacaggtttcagcagaatcaagcaggccagatgaaaaaagtaaaataaaaagactatataaaatgcagttgaaagagaagagataaatagatatataccaactggatgaatgaatggaaggttggatagatttcttctccaccgtaccaacctcttctctgaattctcacatgagcttactttcactgtccacatggccctaggaatgaaggaatcctggatccaaagagagccctcctaattttcaatacaaaacccagaagctcccccattaataggaaaagggaaaccatcatggcctacttttacatagctcctggtgacaactttggattttgtatgtctcagtcagcctcccttggcttggtcaatgagaaagcactcacacactctataggaaaagctcaccaaacccaaatgatgtagaacatgcagttcccagcaattgaaatgaatacagtgcttctcagtagggcatgcttgttcttgttttgttttgttgtattatatttgagctctgctccatcccttaagcagctgcctctccctctgacctcctgctgcattttttccatggcagtggatggcaggtggacgccatggagcaagtggtctacttgtggaactgagtgcacccactggcgcaggagggagtgcacggcgccagcccccaagaatggaggcaaggactgcgacggcctcgtcttgcaatccaagaactgcactgatgggctttgcatgcagagtaagtcaatttaagcaaactgcagacattgagggggctggagattgaaccatttggagttttttaaggaaacattagaaataaagaattctttcaacaacaataaaatgcaataacatagcaatattctagcttgctctcaaaattggaaaaagcgaattttccaggaaccagaataaaaagtaactatgtccggctaacaaatggcatgcaatattgctttttcatgagcaagggttgattctatcacttatatggaagggaaccattacttagttttatcagaaagcacaaaagagcactctaaactcctcacagagtcaaaacaagacttctaaaatgtaagccgtttattcttaattcatggcaggtacctaacgaaaatgtccatggagtgtaaaatagatgtaaagatgacaaacatttctgtaggtagatttaccttagaacgaatgtttagtgagaacatctctgcaacctcttgaaaattctgggtttgtattagaaattataatgcgggtatgatttagtttatttaaaggaaataaatattgataaagcatacatttttaaaatgagtgccgaagattggctcaggaatgtaatgggtgctataagctagatattctccatttttttcacgtctttgttctttagattttcttaattaagtggtagtttgatttcatacttgcaaactctgacccctttattgaggagccctcagatgtacacagtttactatctcttttcatgaccataaattgaggtattaagaattattctgaaatcatacctattcagattaatggatcaaaaaatgtgctgtctttggatctgaactaatggttgtctagtgttgacatttctcataatacattacacattgctagcagaatacaagcagctgaaggtgtttgtgcaaaggtatttgtacttgtcatttaagaataaaatattttgtttttaccacacttatgaaatcctgtttacttttcagagtctatacacacaggaacctttagaaagatatcttacttaaaatacaaataaacaattatgttgctcacacagaataaaaatccaataggcctcttatttttatgttcagggtacactgcattccccaagaacgggctgctgctgagtgtataaagcacagcttctggtaatgatgtggggcctgccactgtgaacctcacaagtttgtactagaaatgcataaatgaaaatcggctttgctaaccatttatctagaggtacagagtttgtttgggttgaggattaaaatagcaacataccacatacaagttagtctttttaacattttcatcacttagtatttttcctttactctagaacaaactgattcatgcgattgcaaagtagaaatagttggactttttctatctttctgcctttcacgttctttctctctcaatgtactatttcaatcttgggtgatttaatgcctactacttccattgtgcatatttacaaatcctcagaacaacctctttaacaaggaatacaatgccacgagacagaaccttttattagtcatagaaaatgtcacattttaaattatgacaaatacaaacatgatatattcaaactaagactttcatgacatagcaaccccttagcttctagatcatttcttaggcattcatagaattttttccttatgattggatatttgccagtaatgatggcatgaagtgtgtgtctattgacagggaagaggaatgaggctataggaggagattttttagttgtttgtttgtttgtgtttgtgtttgtttttgtttgtatttttatcacgtctcttgtttgatggaaacattttgctgttcgggttaaaatcattccatttaaagctatttatttctgcagctctgatttgctatagtaacaatccctactaagtcaataaactctttcatctgccctcctgtatccactccagtccaacagagaattgtagtctatatcactattgatttcctcagtgataaaaccacagagatattctgcactgtgtaattacagtattttacagtgaaagctatagtttctgtttaccagttagtttagtgtatctgggacagcattactgccaaagtcttgtaaaaaaataatattgtttggccattattttggaaaacaaaggcttctaacagtgaaagtgcaaagttcgcaagagggacaaggtcagtattaagaaaaagaatgggagtagaaaagatagccagaaagttgtaatcagcaattaggaattatcatttaatatttatttcctttgggagaattagtgtctggaatgcattaataaatagtccttcaatgatatcacaatttatctcaaaataaagctagtctactttcagtgaaccaggtaagaactacaacctctgaatctattcaaaattgtatacaaataattctgatataaatgtaggtgtactgctagataggagaaattcagagttcataatggatgttagtaggattcagagttacctagataatgtagcataatattttttcaaaagctaacttggtacttaagaggaatacaatgtgaaatatatagaaaatattactgttgatatttatttgttaatttgttcaaaacgaattcagatatatttccttgttaagcgcttaatacaaacacctttgactgaaaatatattaaaatgttggataaaatattgcaaacttagtagagacatacatgtgcatgcagaaagagagagagagaaaatacgtggtccaaaagaaagaaattagagaaatcctcaaatgccaaaaatgaagctgcaactccaagctagagaggtaacggtgtgagtggacaccaatataaccaggagcggggagctggatatggacatgggtcccggggactggaaatcagggtttcagttttggcacagagaagaagtcctggctttgtgagacctagacttggaaataagaaccctaaagaaagctgaaactcacaaatgcctgacctacccacaagaaacaactataacatttttgcccaccagccaagggaagacatagaaaaaagtggtaggaaaagggaaatgaagacttcatttaaataaaacccatagtaaaaccataacctcaccctagctctggtatggaatctaagatacagtgctagaagcaaaacacgaaagatgtataattaagcttctaggacaccagcagagcaaacagcaagccactatctaagtttcctttcataactaagttcattagtctaagacaaaaataagccacacctgtcaataagcttacaatacaaagttcccaatcacccaagaaaattgtccactgtaagggagagtcagcaataataaatgagttagcagtctactaacatgaactcatagagcaatctgaaggaaactatagagtaaagtagatgtaaaaagacaaaccatatttttaaaaggaacataagcacaaatgaaataacagaatattgttaaaaagacagatttggagaaaaaaacaaatggaatgtctagagaggaaggcataatgattgaaatttaaaactcattggaagatgaaaaatcagatacagctttagataaagctgaagagaaaatttataaactggaatgtagatcttatgaaacttctcacaatacagggaagttttgttaatacataagtgaatatgtaaaagagagaataaaactaatggaggatagaatgagaaaatccaacatttactgaataaaagaacaaaatttaaaagattttcaggtaatcaagatagagaggatttattactcataaaccttactgagtaaactactgaaaatgaaaaacaacaattggttccttaaaataagatgagaccaattgaggagaagctgaaaataagatggagctaaatggtagacaatattaacatggaatatgggaaggtgcaaactaagttaaaaatttccattttctatatattgctcaggaaaagaatagtaatggtatttacattagacttccttgattccactgttatagctaaaatgttaagacttgagtacacacataaaaattgaatgcataaattcaaaataaaaattttaagggtaggaaattggcaaaaggaaaactagtaaattaaaacaataaatgagatggtggaaataaagctacatatatcagggatcataatgtaaatgaattaaactcacctgtaaaaggaaatccaaaattgtagaaaaaaactcagttttattctgtttatgagtcacatacttaaatcataattataggaaaagattgaaagttaagaaatggaacttacagtattgttgagtatgtaggtatgtatgtatgtatgtatgtatttatttagagacggagtcttgctctgtcgccaggctggagtgcagttgcactcggctcactgcaacctctgacttcctggttcaagtgattctcctgcctcagcctcctgagtagctgggattacaggcacacaccaccacacccagctaatttttgtatttttagtagagacagggttttaccatgttggccaggatggtctagatctcctgatctcgtcatctgccgcgtcggcttcccaaagcaggattacaggcgtgagccactgcgccgggtctgttcagtatttattttaacatgtccaattaatggcttttactatctgattgggctattctttattcaattccatttcccattatacctaagtaatatatattagagatcatttttgactcatagtttgaatatagagttttattatgggctttatagtttttagaatgcttaatttcaactgaaaaattaatcaaaagttttctaaattgtttaccagtttgatagtgtttggataagacatgttagaaatctatttctttcctcaaatttgacaccaattgaaatttttcataaaaaggctttgaaggttacttataaaactaatgaatactttaaagatataataatgctaaatgttaaacaaatgtgtagttaagtggaaacttttgtactttgctaatgggaataaaaatttttatggggaagcaatttgacaatataagtcaagagttttaaagttatcataccctttgacccaataattctacttgaatgcataagttttaagtaattagtatgaatagctaaaaatatatacagtcagccctctgtatcagtgagttgcacatctgtggattcaaccaagtgcaggtcaaaaatatttttaaaaacaataaaaaaatacaacaattaaaaataaaatgttaaaatacagtataacaatttatttaacatttaaattgtattaggtattataaccaacctagagatggtttaaagtatacatgaggatgtgcataggttacatgcaaatactatgccattttacataagggacttgagcaatctctgattttggtgtcgatggtcaggggtggttctggaatcaatcctccttggatactgaggagcagctgtatgccaactatgtctatattctttgttattgtaaaaaatgtaaaacccaaaagtctaatattaggatgatggttaagtaacacatagtacttccattaaatggaacatcatttatgatgtccgctaaaatatttatgaggttttaacatggaaaagcagaatatggatttatatatgtatttagtgataagcgtgtaaaggtatgcttagtaaaagatgaatgaaacttatgaattttctgggataatgagattacaagtattttttttctttttctatatgctttctattcttttttttcttttatttatttattttttattattatactttaagttctagggcacatgttcacaacatgcaggtttgttacacatgtatacatgtgccacgttcgtgtgctgcacccattaactcgtcatttacattaggtatatctcctaatgctatccctcccccctcccccaactgctcaacaggccccggtgtgtgatgtcccccttcctgtgtccaagtgttctcatcgttcaattcccacctgtgagtgagaacatgcgatgtttggttttttgtccttgcgatagtttgctgagaatgatggtttccagcttcatccatgtccctacaaaggacatgaactcatcctttttatggctgcatagtattccatggtgtatatgtgccacattttcttaatccagtctatcattgttggacatttgggttggttccagttctttgctattgtgaatagtgctgcaataaacatatatgtgcatgtgtctttatagcagcatgatttataatcctttgggtatatacccagtaatgggatggttgggtcaaatggtatttctagttctagatccctgaggaatcgccacactgtcttccacaatggttgaaccagtttacagtcctaccaacactgtaaaagtgttcctatttctccacatcctctccagcacctgttgtttcctgactttttaatgatcaccattctaactggtgtgagatgatatctcattgtggttttgatttgcatttctctgatggccagtgatgatcattttttcatgtgtcttttggctgcataaatgtcttcttttgagaagtgtctgttcatatcctttgcccactcaaaaacaagaaacggggaaaggattcccgatttaacaaatggtgctgggaaaactggctagccatatgtagaaagctgaaactggatcccttccttacaccttatacaaaaattaattcaagatggattaaagactgcaatgttagacctaaaaccataaaaaccctagaagaaaacctaggcaataccattcaggacataggcatgggcaaggacttcatgactaaaacaccaaaagcaatggcaacaaaagccaaaattgacaaatgggatctaattaaactaaagagcttctgcacagcaaaagaaactaccatcagagtgaacaggtaacctacagaatgggagaaaatttttgcaatccactcatctgacaaagggctaatatccagaatctacaatgaactcaaacaaatttacaagaaaaaaacaaacaaccctatatgctttctattctatacattatttatgcttagtattccattatgtttataataataaatgacattttttaaaaagaactgttgaggataggccacagcatggtcttggaagcatggctctctgaatttaagaactagcaatgtcactgactttggtcacattgattcaaattagattaccaaaaaagtatttgcataaaatacttgtataaaaccctagttgtatgaaaccctagggtgcaagacttatagccagtaacacaagtattttgaagacatggggatttggaactgaattatagttttacattatttcccagttgcctatcacatacagatatatagacacatatctgtccttgcaatcataatttaaactcttatactgtgtgataacttggattcattatgtgatattgtgtaatttcatttgtgaaatataatcgtggtcttaaacaatttcagaagctctattacatttttataccactcatacatagtagttcatattgtaagtactgtgtaacatataatatatatgtattacactggataaagtctcactggcctgaaaaagtagttcctacgctggagataatcaatgccttggtgccttcaaattaagacctttacaaaattgatgttatttcaccagaatgcattactaaagagtaattagaagccatcagaatcacttaaggtgccagaaataacttggacattttgggttcataagcacatacttaattgttttcaaaactacattttaaaaagtggagttctgtggtacactaaatgacatggattgcattgaataagaaaggtaagttaaatgacgagttaattgggtgcagcacacgaacgtggcacatgtatacatatgtaactaacctgcaagttgtgcacatgtaacctaaaacttaaagtataataaaaaaaaggtaagcgatttggcgtgtttgttgctattgaaaataattgaaaatatatgtctgatctaaaaaaacttaacattaataacaaatatcagtttttacttaataatactacagaatcagtattggaagaccagttgtactgtgtacatattaaaatacttaggtttctttatatcatccctaaactgatgtgaaagcagccaccccccacattttacaatatatttttgaaataggctttacattaaatggttatgacaagagagagagacacagagaacaggacacatagaaagatacagaagaagcagaaaacacttaagaaatctcaaaaaatgctaagacaataagcatattatatttaccttttaagttgaaatacaattgtattactgagacctgataacttttaacttttataatcttttctttccttttttttttaaatgtgatggagtctcattctgttgcccaggctggagtgcagtggcgccattctggctcactgcaaccttctgcctcctgggtttaagcaattctcctgcctcagcctcctgagtagttgggattacaggcattcgccaccctacccacctaatttttgtatttttaatagagatggggtttcaccatttggccaggctggtctcgaactcctgacctcaagtgatctgcccacctcagcctcccaaagtgctgagattacaggcctgagccaccacatggggcctaacttttataatctttataatgaatttttagtaagatctatttgtcatggatagcatataatatgaatagtttaatcactgcttacttcttccttttgaaaatagcaattcaatactatatatatggcctagtccagaaatgcaaatttatatatatatttatcaatacagtagattggattattaagttactgcaaccattcctatagattttagtttttattctctttgtaagtttggagtttctcatagggatttttaacagttcaaatctgaacttagaattactccttgctgaagacggttcatgccacagtagacaaatttaaaattgtaatttactaacaagaactgcttggaattgtgtctgcatcagtgaacttcctgactttgggaaattaaaatgttaggcattctgcaaagttagcactttcaactcattaaaaaaattacacgtcacacagctcttctattaattctcagaagtacagaggaagtggcagagctctccatgtgtaaactgtggtgtggacacactgcataccagggcccccagaagcccaggtggatttaatgtggggaagtaatttaccttacaaatactcatttcttgactttagaatgatacgtttataaccgcctgtggtaggcatttgagaaggtgctagtcatttcccagtgaaattcttgtcaacacagcagtttgataggaaagcataattgtgagtggtagacagtgagagcttttatccatagttggaagaagttgatgtcatagctgtgtttgtgtagttcttgatatgtgtagcgtcccagctggcaaataaatattctgtacatggcctgcctgcccaacacaatgctacacagtgtccggtataataagtgtggtttgcttttgttttcctttctggtaaaacattttcctggttttgaaagcagggatgtggttagaaactttagcctacagaagcctaatgaacacctacggagcaccaaacaggttagaaaacaaatgcaaggtctttagattctaggtggaaagggacctctgaggggatcaagaaaggtgccaccaagccagcaactacagcaaagcatgggctccttcgagatcacgggggtgcaggtccagggctgcaagctcaattttcttcttgctagaaatctagcagataggttcatgtattctagaagtcagtcaccttatacatcaggactcttcatcattttactttttctatcaggtgtctttactaccatggaggggttctggtatcattgcttttggatttataatttatttttcttttctaagaagcattgacggggatagagtccattatataatataacacttatataaaacatatataatatgttttataatatagtttacataatatagtttatgtaatatattatagtttatataacacttatataaaacataatatagtttatataacacatataaaaacacttgagtagctgatctatgagtttgatattaatgaacttagtttaaatttcaggcatttatgcttcacctactgtgaatcatgagataagacatttacatcctgggatgttaattatctactattcattttcagaagggtgtggctggtcactgtaaggaacagggctatgaaccagcttagtgaggtgtggccattgtcctcagcaggctggagcagtaaattaccatggcaatttagataactgacatcagtgataagcaaatgttctttttaattgttgttgtcatgtcctaggatttatgtattcatttatttggagttccttaagccctatcaataaataaaccctcagaagagtggtaaattataataaatgaccctgggtgtctttgacagacctgacctttgacatcattagtgcagccctgatgggtttgctagataagagctgaccttaaaggataaaagaaaatctggacatgtttattttgaatggcccttgaggttttaataagaacatttgcatcagaacaaatgtaattggggtgaaaaaattgcccatgttttggcttagtgtaaagtaactggcaaaaaagaagaccaagcggccaggtcaaggagaggggattcttctaaggataggatcagaaaatgaggaacaatcttatcaagtagcctagtggacttagagtagataaatattactaaaactaaccaagacctttgtgacctaaaaatagctacttttttagaatatgtttaatgcttttataaatgacattatgtcatatgcataacttgcatcctagccacccccataagatatgaatctatcatctattgtgcttaatccccacagtatcctaaaatctatttacgggtattaaggtcatagaagcagctccatattgaaatgtaatgagtaaacctcaaaggcaagcaggacacctcctaaaactctacctatctcttttttggccaagtatctgatactaatgtaaagacaaggttttaatgcccagacacctacatatagactttagagggcataaaaagtaccatatcttatatggtagtttaaagatatttcagatttcattttaattctgtttgctgtccacctaatacattgattttaggccctggcattagttgcttctgaccccagtctactgtgtcagacatgaccaagttaagaaaaaattgaattgagctcaatttaattaatactcaaaaggtagaaaaaaaaccttacaaacagaacttttgttaatcccctaacaatagttctcttttacaaaggaagaaactgaggcatataattgaaacagccctcccaacatccacagatgagtgctggagccaatgtgtgaaggcagatctgtctcatttttaagcctgttctcatgcaggatcttggatgccagaagcaagtggttgtcagcttttattgctttaaaataggcaaaggatgccctatttaatgaatggtgttgggaaaactggccatatgcagaaaactaaaactggaccccttccttacaccttatacaaaaattaactcaagatggattaaagacttaaatgtaagacataaaaccataaaaaccctagaagaaaacctaggcaataccattcaggacataggcatgggcaaagacttcatgactaaaacatcaaaagcaatggcaacaaaagccaaaattgacaaatgggatctaattaaactaaagagcttctgcacagcaaaagaaactatcatcagagtgaacaggcaacctacagaatgggagaaaatttttgcaatctatccatctgacaaagggctaatatccacaatcaacaaggaacttaaacaaatttataagaaaaaaacaaccccatcaaaaagtgggcaaacaataagaacagacatttctcaaaagaagacatttatgcagccaacaaacatgaaaaaaagctcatcatcactggtcattagagaaatgcaaatcgaaaccacaatgagataccatctcacaccagttagaatggtgatcattaaaaagtcagtaaacaggctgggcacagtggctcacacctgtaatcccagcactttgggaggctgaggcaggtggatcacctgaggtcaggagttcgagaccagcctggccaacatggtgaaatccatttctactaaaaatacaaaaaattagttggccatggtggcagacgactgtaatcccagctactcgggaggctgaggcaggagaatcgcttgaacccaggaggtgcaggttgcagtgagccaagatcgtgccactgcactccagcctgggcaatgagagtgaaactccgtctcaaaaaaaaaaaaaaaaaaaaaaaaaaaaaaggaaacaacagattctggggaggatatggagaaataggaatgcttttatactgttggtgggagtgtaaattagttcaaccattgtggaagacagtgtggtgattcctcaaggatctagaaccagaaataccatttgacccaacaatcccattactgggtgtatacacaaaggattataaatcgttctactataaagacacatgcgcacatatgtttattgcagcactgttcacaataacaaagacttggaatcaacccaaatgcccatcaatgatagactgcttaaagaaaatgtggcacatatacaccatgaaatactatgcagccataaaaaaaggatgagttcatgttttattgcagggacatgaatgaagccggaaaccatcattctcagcaaactaactcaggaacagaaaaccaaacactgcatgttctcactcataagtgggagttgaacaatgagaacacaccaacacagggaggggaacatggaacatcggggcctgtcggggtggggggctaggggagggatagcattaggagaaaacctaatgtagatgacaggttgatgggtgcagcaaaccaccatggcatgtgtatacctatgtaacaaacctgcacattctgcacatgtatctcagaacttgaagtataattaaaaaaaatggaattttcttctgatgtgtagagctcctccaattattgatgtttattccttttttccacatggcatcatttttgagggaaatgatgtttctcctttaaatatttacttatagggttttatgccaaatgcaatgtgattatcatgcattaacaactacatcactctagcaaggctccccagtcacattagagtggaaatgctgaggtttggtacacctctttgcttgccccacacttgtaacagaagacactgtttggaaatttttttcatgtaaaggagacaacctctctatgctatttttggctttataagtgtcatgactataaatgataatatttcaaatggagagatattttacagtccaaatcagcagggttatctcatgcaatcaccaaattacaaattaagccaggtgcctaccaagccctcttctgttatttccttgtctctcctcattcgaatctactaattattgctcacatagtacttaagaaggacggtggaggtgtagcctgagggctgggatccaaccctggctctgctgtttcaccagctttataatgttagacaaatccctttaccactctatactcaaagggttaaattagggagttccaatcaatgatctattttcactccaacatcctgggggtttgcaagtttgtgagaacatagacttggttttgaggatttaaacctggctaatgatgttcagaagttatgacatttctcacatcagaatatttgcttgataattatttatatgaaagtatgtagtatggcataaaaacagtttgaattatttttttaaaaagtagtaataaaaccatgatcattttttgctatctatccatatggcttggaaagaaaaaatttgaaaaggctagaaaaataaaagtagttgctgtttattggggaaatgaagatttacattttgtttctggcattattcttgagactctcaaatataaacccaccagacaggctacatttaggtatattgttgctcagttactgggtcttggctgtgtacttagggataatttgatattacttccttcagtgtaaacaccaaggaaagctctcttgctctctttctttttttacaatacttggacatgggctctgatcttttacaatggttggacatcactaaaaagttcgggcaacctcacctctagtctaaatgatgaccttgtgcaaattagaaaaaagtcattcgttccctaagtcactttactaccagcagccaggaaatggttctatgattaatccaaatctacagtaaacacaaatatgaatgctgccacccagagctggacaatgcaaaattatacattgtcagttttattgacccaaattttagttggtagaatatcaacactttgggtaactttgcaaacatcctttctcacctttgagactctgtctcctcatatgaaaaagattgaatgagacaatctcctgagataatgttttgagcaattatgagatggtcttcaagtaaaaggagcattgcatggactgtttaagacatagcctgctcttgctccagttttcaaatattttttcttcacttaaaggttttctccatatcgaatctcctttagtctgtattcctgcaagtcaggaaaatctatgctttaaaaaataaattttctttaaaaatacaagttacagctgggtgcgatggctcacacctgtaatcccagcactttgggaagccaaggtgggaggattgcttgagcccaggagttcaaaaccagcctgggcaacatagcgagaccccatctctacaaaaaaaattttttaaatagcctgggtgtggtggtgcagatatgtggtcccagctacttgagaggctgagatgggaggattgcttgatcccaagaggtggaggctgcagtgagctatgatcacaccactgcactccagccagcatgacagagcaagaccctatctcgaaataaatatttaaaaaaaaaaaaaaacattgttttaaagtggatataggttataagcagttacccttgaaaaagcactgctcttgaaaaagcagttgctgaggccacactgtacccagggataacaagcctcatacctttccctgaacgccatgcctgttcttgccttctcagtcaaaaagaggtgattttgaaagttgttatcaagggaggtggattttgttctgggccatcctttcatggcaagattgtttctttcattgcaggacattcaatatccttggcctccactcaccaaatgccaaaaaacaaccacctaatccttatgacaaccaaaaaaaaacaccatccctaccccatttccaaacaccctcttgagaaattgcatcactcttggttgagatacctttttaccatcaatttgcactctggccttgaaaatgtgctttggaaacataccaccatatcttttgccagaagccacaaaggacaggcataagcctttttacatgaagagagtgcaagagtccttagaagagagcattgcatacggcttctctgaaaaactgggctccctgtctatgtaataactggggaaacaaattcaaacgagtttcctaagatcactcattagataataggctatgttgactctacagataaaatcccttaaggacccagcatcttagtataccttagtaacgtgcatcataattatatcaatgtcattgttggtcatttcttgattactggcaatgtaccagcaccttacaaatctcatttatcctttccacagctctagatgtaagtattcatatccccttacacagattagaaaactgatacttagaaaagtgaagtagttcggcaaagctctcccagctaagtggcagagctaggattcaagctgatgttcatgacactgaaaagcagtgtactggcccatggcctggtgcttttcttagcccaccttactttgaagtagcaggaaagttaactgaaatccctaacttttgaaccaggctgtcggtagcaaccgaaaaacaattattttgcactgtgttccgccggagatgttatttttcattattgctaggactactctcagcagggtcacctcattagctgaagaaaatgttccctgttgttccgtgagagacggatcagatggagaagcataaaaacaaactccagaaagtgattctgtgttcccctcatttaggggatggaacagtaatccccttcttctctgattcccagcctgctaagtgatgttttacttctgtagttgcagaagtgttttgaaaatgatggaaaaagttttacagggatgccttacataactttttatcagtgtttccataacagagtaaattggagtgtcaaacctttggtgagtacacttaatactggtctgttttaaattttcccatgtaggaaaataagagtttggctagattggtcctaattgcctgtgaggaataactaaagtaagtgagactttgtaaaatatttttaaaattttttaaatattaaatattttaatattttagagtgaggcgatatttaatttttttaatattttattttcattcagaacaacctcaaatgcaaacacttcatcagttatattatacacctattgacagatatctcccaagccatgtgttatagaagccatctgtaaaaccctatcaccttgctccatttgacaatccatatctatagaaaccaaagtgatttttttcaaaatgacattcgatcacaggatatgcatttcacttagaataaaatcaaaactcactgtggaggccaggtgcagtgactcgggcctgtaatcccagcattttgggaggctaaggtgggcagatagcttgagcccaggatttcgagaccagtctagccaacatggtgaaaccccgcgtctagtaaaaataccaaaattagccggacatggtggtgcacacctgtaatcccagccactcgggaggctgagacaggagaatcgcttgaacccgggaggcggaggttgcagtgagccgagatcgtgccattgcactccagcctgggtgacagagcaagactcctcatcctggcccaccaggacgtgacctggtgctgcctgtcctctgaccccacctcctccctttcctttcttgcttgctccccaccctctaaccattctgtctttctgtcaggactttcgtatttattgtcgtttctcatcaagcacttgcctcctgatcttaacttggcagattctttctttttttcaagctccaggtcaaatttcatctcaattaaaaaaaaaaaattcttccttaattccctaagttggccatcctgatatctccaaacacattatgttcttttggtttatttttaaaagaacttttttactatttgaaatgatcttattattttgtttacttgcttattttctgttaaacttcagtaaaaacaggaaagtatccccatgtctacaacagaacccagaatataataaggttcaagagtatttgctaaacggatgatgaatgaatgaatgaatgaatgaatgaattccaattctgtgcctggaatgagattgcagtttcagataaataccataaggcacaaaacatttattgagtagtttaaatctacataatatttgtgaaagttgacattcaaatcgaagttacgaagttatattctctattcttggtctgcctatcaagaacaggaattctggtgggaagcagggacaaaaaactcagaactgctttacagggagaaatttcggaccacgtgatacctagctggagataggctttccttttgcaagacgcagctcttctgcttattcaagcaggaccacgctgattcttttctttttattttttgagacagatctcgctctatcacccaggctggagtgcagtggcgcaatctctgctcactgcaatctccgcctcccagtctcaagtgatgctcccacctcagcctcctgagtagccgggatcacaggcacgcgccaccatgcctagctaattttttgtattttgggtagagatgggctttcaccatgttgcccagattgtctcgtactcatgagctcaggcgatccacctgcctcagcatcttaaagttctgggattacagatgtgagccaccatgcccggctgccaggctgattcttaccaaaagtttcaggatgagcatcatagcatttgtaaacatgccttttatactcatttccttgcctcttacctgcaaaaataagtcttttgacattcttctacttaacatcatcacttccaggaagatggcattgtgatctggtctcctctactagcagtgaacttgttttgtgttaagtctttgggttttgaaaatagagcctgtgtatgtcccagatgtccttttattgagttcacagaatacaaatggaaaaattttattaccaggcagtggtgtttaaaaatgaaaatcaaacctaatacatggactcagacaactagaataaggaatataatatttataaaactgagtaggaggttgcaatcattgctctaaaataaggcattaaaaatgaattcagagcaaacctatctgtgctacagcaaagctctctttcattaaggtagcactgcatgtttctccagaattagttcccccaaataggtaaatagcttgtaagaactgagtgttcggcaaactacggaagtgctacctgaggcacgatttagagttgcttttagtattacagctttatagacctttcattttgaaccagttaattgtgaaacttgttttcctctgttttttgcccttgagtattactaggaaggtttaattcacaggcttcttagtcatcttcattttattaatccaaatggtgctgtatcatttgattaattcatatgtagcagaatagtaaatcttggagaactgtggttaccagtataagatatactttaaaactttccataggtttttcatttcaaaaagtttgtgttgcacatattttaagtgacttttccctatcttattccacttcacattattatcattatccatattgcattattattgttagtttccaccttcagaatacactaaaaaggaagagaaataaaatgctagtgctatttctgcatttttctattgagatgaaagtttttatttttcccaatatacaccatttctctgaagccctaaaataaatacccttataacctctaggccctattgattttctaatgatttcaaataaaaagcatccagtttccattgcattgacaaactgttcagtccctaggcaaaacctatcgaactcctattaaatgaagggggcaagaaacaacagaaaatccaaaaagtagatttgagatggagcgggggagaggtggtctcagcttagctcagtaaatgggtacttaacctttgaccaatgatgacaggtcttctttagttctcttagaccaagcacaagctgttatgattaaataaaaaagaaaaaaaaactgtttagagccttactgaatatgtcctgggaattaaagcatatggcagggataaggaaaaaagattttccttatgctaatgacccctgatgtctgaaataaattagatccattagagtttatgctcaataaaagaaagactttaagcactccaaagttagtgactcgagaccagtttttgctctaaaattcaatctgcctgcttattaattcttagtgaggctccagagcagacaggagatgcaaaatcataattttatactgaatcagaattttaaaagaccacaggtttcttttccttttaattaaaccatttttcatgcttcctattttctttccctcattaatttgattttgttcccatttttgtttcatttttttttcttttcaaggtttcatttatcccatttcaactgaacagagaacccagaatgaatatggattttcttgtaagtttgatgtttggattttatgttgctgaataatcatttaacgttattgcccctagttcaagtttacctttcttcggattacagatgtgcacacaggaaataggagcctaatatattctaacatgaaaaataaattagatttttgctgctgaagagaagaaagggtcatttcaagactctgccaactttaaaatctatcagtctaccattcaaagcttgagtcccagtagctgacaaaacatatcatgaaatgtgctgatataagtaaagggcagggttcaaataccaaaacagaaagggttgaaaaaagacagatgggttgagctagaaatcatgaatgttgaataagtaactatgacctggtaaagtaaaacaataagaatttagatataatattctgaccagagttcagaatcctgcagcagtgcctcaaataaaacccaacagagaagtgaagtaagtactttgaaagcagcactcacccaatcacgagtatttgtgatatcactggttttctgaagaaaatttgctaacattgacttgattgatgggaaagtgaatattctggaaatgttgggaagaaaattatttttaaaagaaagcaaaatccttttggatacattacatttaaacacaaaatgccaaaagagatagagcaattcccaataaagaattcatttacactgctaatatgtgaaagattccatgacattagagtgtgggttgtctcatgagccactggcaaatgaaatgatgagttatttcaccatgtaaaccatgtggctgtgagcgttaggagagggccgtggttcctcacattttaggaggtcatgggacctacaaattggaaagttctctctccctgaaaaatgtacatgtatataaaattgaccataaaattctaggttgttctcgactacctgaagtaccaatttaacaacctcttttacagtgagtggagcagctttgattaattttgctgaacatgtttttgtgcatcacagaatactaaaaacagagacttaaaaatgtcaaaggggtccacaaaggtttcatttcatttgtttgttttaattatcagcttctatcaccttttccagttagatgcaagcatgttctgtgccaccaaggcaacatgcaacatttataggaattctgttccagaaaaaagacctcagttgactgacacactgtgttggtcaaatgcttatttgccttctggggtagtctgaactttctgatcactgaaccaggcctttgtcttccttagtgcacaagagagctatattttattctagtaatgagtagctcaaatgtaaatctctgacaggggaccgtgagaagctcagggttctcagagataatactgcatctgtatcaaagcctggacttagagaaggttatcagcattaacctctgtcccccagatctgggccctctgaaagcacacctttcaaatttaatatgtttgctcctagtatttgctttgcttagttacaccattcccacccacctctccattgatttaggggaaagtgagaagagtgctatggaaagtcattttatgacttggagtgatacttaggaaaatattctggttcaataaatatgcagatttaaaacatgccagatatttctaacagtgtttatgtttatgtttttaaagaactatcagtgaattcaaaaacccttccaaacttttccacctgaaatgagtaataaacttttttttcctgtgggttgggatggttttagttccagtttctttatatgcctagtaataaacagtctgttatgctgcccaattataagatagattagtgggtggatagatgcagagtgagaaaggaaaagaaatcagagacaattttccactgaaaggccacagccattttatatagcttttgaaatagatttgaaattaacctataaaaaaggcagtaaatgtctgaaaaaattatagcaatacatatgtgtactgtgggaaatttctataagcagctggttcaatgtttcactctcctctctagctgctcctgattcagatgatgttgctctctatgttgggattgtgatagcagtgatcgtttgcctggcgatctctgtagttgtggccttgtttgtgtatcggaagaatcatcgtgactttgagtcagatattattgactcttcggcactcaatgggggctttcagcctgtgaacatcaaggcagcaagacaaggtcagttgacattccacttcacaccctgttacttatgcatgtaagcagtttcaaaatcaatgactttagagtcatctcattcagctagaatgtaagctccatgaagacagcaatttgagttaattttgttcattactgtattgatgtcatttacataacaaattagagttaacaagataaatcctctttttttcttttctgacagattgctctgtcactttttaacttctaatcgaaaagagtaccctgattggttgactgatttcttgagtctctttttttaacttcctttgacaagatatcttgtattgctatgaatagaatgatttaccaatgaacccaaatccagtatagaccagggaaaccatagctaatcgtcacctagtgaggctcgttgttcaatccaatctgttgaaatagccaaataccttgggcataatgagtagacatcaaagcaaattatagaatgagcttgaccacttacttacagccaataataaaagagctggtagttatctgattgccctgttttcagtagagcctgtctatctatctccgatattagctgagctgctttactttcggctcagaaagtgtgagggggagtctgactaatgtaggttggcctgaatggagaatgccaatgggattattttctctttctgactcagatctgctggctgtacccccagacctcacgtcagctgcagccatgtacagaggacctgtctatgccctgcatgacgtctcagacaaaatcccaatgaccaactctccaattctggatccactgcccaacctgaaaatcaaagtgtacaacacctcaggtgctgtcaccccccaagatgacctctctgagtttacgtccaagctgtcccctcagatgacccagtcgttgttggagaatgaagccctcagcctgaagaaccagagtctagcaaggcagactgatccatcctgtaccgcatttggcagcttcaactcgctgggaggtcaccttattgttcccaattcaggtaattcctagaggtttaaattgcaaagaggcagcttgaaacatatttttccataccaaaatcttttttgttcgtgggatgttttcattaggcctgaaatgttaaatgtgacctatccagcccaaatctactttcaatgtaaacagaacattacttcagacaaatcagcaaaaccatttctcttcctccaactaattctgaaaacacttcctctagaaattctatactcacaactttctgctgaggtgtaatttagaaccatcattgacctcctttttactagaacttcagaaggcaacatcaagccacaagtcctaatgttgtcattatactttaaaaggacgaattaattattaaatatatcatttgattaagttccaatttactacatgaagcaataatacagaaaacaaattttttgatcatcagaggtatcataatagacatcaaatcttcatttattaacctaacttgatcacacagtctttcacctcacagtattgatagtgtacactgtactcactcctacctctgatatttgtatccagaatcaccagattcatcaggtgtgcttttgtactattacttggtttcagtttattatgtagtttctctgcatctagacaataagcctcataaaggtctttcatggtgaatgaaggttaatgcctgatactgttggattaaaaatcgatattcattaatcaatattagtaatgagcttggaaccatgggtcataaaagggttaatggcttcctctctaaatctatctaattcttttgggcaaggctgtgagtattttgtaaatacagtaatacctaaaatgtaaatacctaaagtgttgtcacattgaaaaaacataatatgtgtatactcaaggaatatacagaccaaagagtcttcaggcctgaatatgaaattttatttgattcttcctgtcattcactctttcatttcaatgccttggcaacttttaccctaaacctttaaaagtatattttaacaaaatcaaaacatttaataaaatatttttttcttcacagtttacatagctgagatcatgtattatataatgttttccacccttttctcattaatcctcatgctattgcatgctctttaaaatcatgattttaaatatctttataacagtccattattgaatgaatcaaaacatactttaaggttcttccattgtttaaacattacaattgttctcaaaatagttcttttccctctgaaatgtattggattctgccttttcttcccatttctacctaccactttttcatatgtgcattattataaaggcctcttaagtggaagggagtgagctagcatgttttaaattcttcctatgtattaggcaatggtgatcaacatatgatattttatttaatggacaaacaatagttacctattactttatattcataatgctgtttcatccctataacaaagattaaggtatgttttatgttttcaatgaaaaaaataaaagcactgaggcttggtagcctcatgtgtgatcttcctgctgtgtcctccacaaatcattctgtacattgacagtccacttcctacaacaccagggctctcacattactctccttctcaagaggtctgtggctcaacatcttcaaccagttacatgaaggcctactacctcttaactctccattcttttttcttgagactttccagtgtggtcaggcaagttttcatattgccccacgctcatttggcatattccatttcctcgctaattaaattatgaattactcaaagacaggaagactatcttttcctttttgaaattcacaacagtgtcaaacactgtactcacaaggatgcttcataaatttgtatggagctgaaggaagctggattttaggggaatcaaatgatggagccaaacatctttggagtgctgtccacactgaatcactctttgtgatgatgagcagtggtgtgggccccagaccatcaccatgggcatcacctggcaactggttgaactaaaaaatctaccccacaccccatatctctgaatcagaaactcggggtagggaccagtaatctgtggtttaacaagctttccaggtggttctgacctgagctcaaatttgcaagccactgccacagcagacacagttagcttagaacacagcccaatctaatagttctgccaaagggcaccgattagcaactaactagaaacgctttgacctgctgtgactaaactaggagttagtgttcactttctagagttatgtataataaaaggtcttcaccaattcttataccattgtggaattacattgatgctaaccggatatttaaaaaatacatgttgtttttttttttatgttgaagttggcatttccctgactttgaatcttgtggggattttaaaaaaaaatggaaatgatgcatcattacagctgtttgaaattttgagcagttgttggttttccccttgtcttgcaaggaaaacaacagtggaaccatctgtctgttcctcaaataaaacaagagtttaaaaagttacatcattcctttaagtaattgcataagagttcagagggagccgtggtaaggaggccaatgaggaaggaaaatggagcaactcggaatatttacatgtctttagagaaaatgaagcaggcttatggctgcgcggtcacaaaatctcctcattcccttttacgtgctgcaaaagtcttaaatgactgcttttctcttttgctattcaggagtcagcttgctgattcccgctggggccattccccaagggagagtctacgaaatgtatgtgactgtacacaggaaagaaactatgaggtaaatatgctttttctggtgcactgactttaccaatgtctaacttggaggagaattgtacaatagacacaataaacccaacatatttttgtctcaagtgccttgcttctggcatacattctttttcccttgacctacaaaaggtcaggttttacttctctttgtctttgaggctccagacgcttttgcagatcttgaatatgggtagaaggctagagatcttttcccaagtggacacgttgccatatttcctggaaaaatgtccagaaatgtgatccctagattgtccagagagacaagtgggtagacacagagacgtcgacttcatggcatctggctcaggaatccagcctgttcccattacagagtcaaaggtcacaaaggattggacaactcctccaatccctaccgctcccactcagcctagcccttaattctgacccacgattcttccttttgtgactgtcttctagcttaagtattactaatttccttcttatgtttaacacttataaattccacattaggctgttcagaatgggtctaggattgattaaaactagattgaattaaaaggttttgtttagaatgtttcataatcataaagaagaagttattttaagtaaaaataacaagaggcattgagaagtcctaaattcaattttcagtttggcctctaacaaatcgtattgggtatttcttgattagtttccatgtaaaatgcgtgtgttaaatagtgctttagaagcctgattaatgcttctgaagtacaccaagatcttaaaatgaaagatgttgttaaaatggagatcctcatcatgtaattatcattgtttttcccaaggggaagagcatcggctcctcagccctgagctctgaatataaagcatgagtgacaatgcagaactaggttatcattataacacattataccttttcttttcccagctctcatcctcagaaaaacgtccatttttagccttgttcttcactagccataaagcttttgtattatgctctcaggtggagatactggcatttataattggtgtgacccagaacatttttttcctcgggtggtgtacttccacctacataaatactagcctgtctaagaaaataatacaattcttgagcattattcatgccttaaatttgagcaacagaaaaatcactaaaaggcttgtatttacccacatcaaatattcatttttttcattcccaatgcaaagcaacattcacaggccctcaaagctcccttcttttgcatcaggagaaaagaagatcagcaaactccaagatctctttattttattttatttttctttctctcttccagagtcaaggttagcattaagtacatctatccatcaaggcctttgtcagcgtggacattttgtttaaatagaaataagtattggcttgtgctttatggtgagaaacagtaagatgcctgagctctcctattttccatcagattatcattatctgcagctgaagatcaagccttaaggggctgctgcaggcacgggctgaagctgaaagaggtgtgcactcacgtgcctgctctccccatactttccttggcagccgaaccaggataattgtacattttagatgaaagaaagagaaaacagaaaattgataaagctagacacttttctgctgttagggttctctgcctttgactataatgaaacggaaactataaatcactccttgctatgcctaccatctgaagttaggtgcagagggaattactctgttgaatttggtgtgcataaaagaagttctgtttataaaaatgaagctaggaaaacctcaagatctcaaaagaaaatatgcactacagaccatgaaccaagaaacaaacacaggaggataacagtttcagataaatgagaagtcttctcttcactagttttctgttatgaaccagatgcatttttattgtaaaacacaatggcaagaatgtgctttaggatatagtcataaaacaaagcatccctgcccttcatccagcaaactcttaatttcatttacttctcactacgttctgcaagctgtgatgagctccactttaaagatgaagaaactgaggcacaggggaattgggttccaaagccaaggtttcagttagtaccttagcaaggcagaattcagactcaggcttttctgatcacaaagcactttctgcttcctaatgtgccatcctcctccattgcaccaatgcacaaaccaaacctctgcctatgtattacggtgcatttttggatacactttctattgctcactaaagatcctttctatccacacatgatacaagacagaacttctttggaagaagactctgtgaggacatcaggagctgtgatgttactatgcattcgtaggaaaattctgagcatttttctccattttccttctctctgattacttttattgcatcccaaactgggtatgtttccagctggatggtatccagctggtcatctgcggatgtgaattgtctgaagggaggcgtgaacttaattacatgtggcatagtgaatgtgacaagaggggtcttatcattgctgaatatgctctaagcgaaagtgcaggctggcagctgaacagcctgaatgagccacagagatgggacaagcggtctctgaccaaagagggtgcagagctgcaaggctgtgctcaggatttctacctctcctgctttacagatctctggaaaggcggcgacgcctttgttttcctggtggatacaatttccacaattaatgctgctaacatgggcctttttgccttgtttctagtagcagtttgcacaaatgaacccgacctagactgaaattttgttctttattgattcttgttggaaaacaattggaattgaagatatgaaagttgattttcccttttctctgcattctgtactcacctagcagttttatcaaagggtgaagaaatcaatttagaaattgcaaatacaaaggtaaatagaacaccctttctgtaaaccgcagggagccatggaaagtttctgagcagctgagtgacgcaggaatagcagcgctttttaaagattgatccggtgacagtgcatggaatgcatcggtggagggaacagaaggactcgcccagaaggcttggtgcctgggtgggccctggcagtaatgcaggtgtgaggagagaggaggaggaggaaccgggccggagggtgagccaggtcccagtctgagagaatggagagggtatggagagaatctatttcagaagagaaagtatttcacagctggctagaagtgttgcaaaggaggggcagaacacacagaatagattcaagaatcaagcctggggcactgtgacaattgtgagaaaggtgagaagcagcagtggctccaggggagaggacagattccagtttggatgcgttcagtgtgagtggggatgtggattcctgctagggacgtggaagtgaagtcacggcaaggaaggaacctccagccgagaaaatgcagaagcagaaagaactggggaaagaactttaagaaatactcctgtgaaggtttgggtgtgatgagagaaactagatagaacatgtaaggataaggcaaatgaagagtttgcatctagcacagtacttaacatattactgtgttaggagtagtggctcctcaatgaatatttcctaatgaaagtacgaaggtttgtaagggtagacagacaaaccgcggtataaataggatctcaaaaatcaaaggtaaaaagggctccaagatggagcctcaacacgaggtgtcattaaagtaaaaatgtaaagaaagaggaagaacaacaaaaagattattagatttgtcaactgtggggcattagtggtgttcagaacttttttttttaattggtggaatccccttagcaatggtttaagatgtgagatagtagtgtggcaactgacactatcatatacatctattaaatataaataataaagcaatgtgtgaggataaaggtccaaaattccctatgtaggtaattgtatagagatagatttgcttatcatgttattttttggaattttgtaaaatagtagttgacattattctgtctcaaggaaacacagtgatctttctccttttagtagagtcctttctcattcatgagcctcaagttcctcagtttgaaggaagagccataaaaaggctaacagtgggagttagtgagtccaggtatattgaaatcttatcctcatactgttcttgacaatgttcatttattgaaatcctacttagagagaaatgcttcaagatagtttacgaaaacacttctcaataagagaaataaatttaaataagtggataaaaaaggtaagaaaatggggaaaataaagttataaaagataagataaagtaggcgagcggttagaatataaaatagttggtgtaattcccagcacatttgctagtaccaggtcgtgaatttactatttctaagcctttcaagaagggaatgtgttaagttacaagatccgcatgtccatgaggaaaaaaatatgctcagaagaaacccaattatttttcctttggttcctcataaagaagacattttgctaatgcagtgaacagcatccttaaagaaaaacagcaatgagtttcaagggctgcttctatcagtgtccctcaatggaggtagataagcataatgcttatcagttctggcttaatccagggatagattttggcctgtctagggaaatggtggcacgcccttcggagtggctttcataaatattatttttgcacaattgagcttttgatagcaagtgagttagatattccctgtcaggtacctagagtgcaaatatttcaagttgccagttatgtgtgaaggcctgtgctttaaaaggcagctgagcctagggtgggattatcatcctgagggaccagataaaagacatgtccactactagaaggcatctcctgttcccacagaggtggatggagacagattctttccttgagcctgctctaggaaacagacaagaatagtttcgcaaggacttaaacccactctaagcaacccaaaatacagcatcgtgtgaaagaaattaaatgatttgtgtttgaaacctacctagctttgcatccttaggcaagtgtgttaatatctgtagatttcagtttcctcttctggaaaagaggtaatagacatacactgccatacaggtgtaccatgagcagcaaatgcaatggcttatgtgaaagttttgtaaattatgcactcttgattagaagttctcctcactgataatgacaagcaaaggatgagaaaatatttctgacaggaaactgaaatttctctctgtgggctttgtcctagaggactcagcacccatccagcatttactggaatattatccttgttggactttggaaaacatttaaaattttaatcattgttctttgctgaaatttctacttaattgatgcttctgaagctaatttttgctctatgttcatttccatatcatctgcaattaatatttacagactgcttgaattgcttagaaaacacatgagacatagagaagtccttctctgcaaaaacaagaatctgagatatttttattttctgctattttcttctatgtgatttaatagcttcctttgtataaaggaaatgtgttacacactctgaccttagttttcacatagttaaatcttatcctgcgtaactccttacatatatgctcagatatttgcaatttcaatgctatttatgtcatcttgaaagcctataagagaatcttatcattatttcttctttgtttttcattccctgttaagaattccacttcaccacttccctattcattacattcttgcacctcactgggttaataaattcttttgacacctactgcccctccttcctccctccttcccttgctatccctcctccaagaatggtgcccatcaatattgcatgccaggggtgtacttggagagtacaggtctgacagctccccagcccagcagggagccttctcccttctgttccaagtcagtgatgagaaggacccctcctccttcctgcctcaagcaccggctgctaacaccagactgagagatagatgtctccaatccccaactatattgcaaagaccacttgaaatacattccactctagtctccttccttaaaagtttaatgttcacttctcaaggtacacttgtaactagaaggtaagagttctgctcagaaaaatgcaatcattggttttttccccctccaggagaggaaaaaatagaattaagcaataataaagtcactccttaaggcagatagtatagtattaactatgacacggtgaaagcagaacttgacttgtgttctaagagaatgaatttcagactggaagaaggacaaattgggttaagagaaaatgaaaaccaaggtggtaatggggatagtaatgaggtctcaagttgctcccaataaccttatagttccaaatttaagtacattcccaagtacctaaataactttagctataatggaggaaagggtattgttatttaaagagaacggaaatgctattaaaagactaaaagtaggtaaaatttgtgttggttttctaaataggaagaaagaaaagccataggttggtgagatcctggtgcaatttcagaataagtgaggaagcactgatagccaagagttattaaggggaacatataccaaattttaattgtgttcttagaattaatagtcaactgtggaagctctaagatacaaacttacttgtgagctaccaagttagctgctacagttttatgcgtgctgataaaacacacaagtcttgtggatcaaagacaacagacagcttattacccacagcgatagcattatacagagtaccatcatgtttgtgccaattttgtgagccccattttagaaatggtgatgcaaaaatgttcagatgaagtctacacactcaatggttgcattccagaaaaggatctatgagcttagggaacctgagtcttttataatgaggagtagacaggcctgccatttgctccagaagtagacattgtctttatctttcaaggtaattgctatacaaacatccatgcataaacatgagaaatccatggataattgtcttccaacaatattaacaataataacaactgctaccattcattgagtgttcaacgagggtacccatagataaaagctaacttctggaatatgtaataaataatacgtaaaccatagacaaaaactagagaaaaatccatttcaagtgaccattgcaattataaaggaatttgatgtgtcccttgtcatatatatgtgaattccatcaaaagatgtgaaccaaacaatgtccattttaatgggtttatatttggtggaactaaatagctcaaagtattgatatcagactggaaagaggttccaaatggtgtccttgaaaaggtctctgcccttgccctgttcttgtgttgcaaagttatcaatggttagaatgagaacataaatggcaagcatatcagatttagggaggagaaaagaccggaagagatagccaatgtttggagggaagatagagcatgaagaaatagatgacccaaaatttaccttgaaactattaagttcaaatgaaaagctaaatgtaaatttctgtacataggtttaaaagccatcattacaatcatggaaccagacttagcctaagagcctttcatgttgggaatacttagagtggttagtttaacaaatttcttaacttccttggagcttcactgcttcattttataaaggaaatgcttaaccatactatctctatcttcccatgtaactggagcctgctaaataatatttgtaagtaattccttgattgggaataatcaacagcaacaattttgtgaggcatgaatacaaacacagatggcaaatcaaagaaaatactctctcatactatttgagtgttgagttcaaggtgccaccactttaacgaggacctggaaaacaatgacaagcatccatatgaaaatgaagatagaaacccgaggagagatctggaaaccatgctattccagctgagggtggaaacattgaggttgtttggtctgtaataaagaagactgtagagacatcataatgatctccaaatatatgaaacagtgtagcatcaaaagcaaatcaaggatacatacagagaaatttcaggaagtcaggttgtgctcattctaagtaagaatattttgtaaatttgagtttatagtaaacgaggtgaccttttagcagtaatggaacaattctggatgtgtctatagcactaactatacgtcagccatgttttagaggggttctggctggatggaaggtgctgccgaatgacttccaagggcccttctaaaattctgtgagtccatgatttcaaaagctatgctcttctgattgagtgagtagtttgactgttgtcgttgagagggcatttattttcatctcagcactaactagcacttagttgtgagacttggggcaatccactcaatacctttggaactatatcttcacaaatttactgataggctaggttaatttatccatttgcttgttgattacagtcctgttagggaaaagattaaaggcaatttttatatataagaataaagaatctgcatattttaggttctttctgcccagattctctgagcatgaactatacaagagatctcattttaagttgctgtataaatacagttctatattatttctagtcatatttgaaagaatgaatctgctgtactagcctaaattattcctgaaagtcatttggactaagtttagttctagagtgtcctcattctgaaatgattttttaaaactatttttcaagtcaggtcctgaaaccacaaaagtatttaaaaccctgtgagaccagtggcaagaattatcagaaaatctgcttatgtaacttcatagggactctgttcattctcattccatcttgaaagtgtctgtacataaatttggaggaagctaccatagaaagaccagtgtcggagggaaggggatcaaagagatgctggcaagtttattgttatcataaagacttccagtcctgcaagatcaaggtcttggtatagagagcatttaattctgtatcacctatttcctctccccaaccccccagaaaaaaaaaaaaaaaaagaattccaggagaaaactacttgacctgtttgccttcagaacccaagtgcatagttcatgaatacaatggaaatgtcactgaagccattctctgctctcctcctaggccacccatggatgactctcagacacttttgacccctgtggtgagctgtgggcccccaggagctctgctcacccgcccagtcgtcctcactatgcatcactgcgcagaccccaataccgaggactggaaaatactgctcaagaaccaggcagcacagggacagtgggaggtgagctgctgtcgggataaagatgctatgcaagaataatccatgcagataagcaggagcaattatgggaggccttttatttataaagcaaaacatgagtggaattttagctcaccctcaaaatgagagagaaacaggcaggcagactagttcctgagtgttatatcttctgattgacaggcacacagaaaatgatggtcactcattagataactcataggaaaggtgcacataagagttgtagacatgttccttttggaatatagattatatatatgtctatgtatatatattgtgtatatgtgtgtatatataatatatacatatatatgtatatggggtggctcatgcctgtaatcccagcactttgggaggccaatgcaggcggatcatgaggtcaggagtttgagaccagcctggccaacatggagaaatcctgtctctactaaaaatagaaaaattagccgggcgcagtggcatgtgcctataatcccaggtactcgggaggctgaggcaggagaaccgcttgaacccgggaggcggaggttgcagtgagctgagatcgcaccactgcactccagcttgggcaacagagtaagattccatctcaaaaaaaaaaaaaaagtatatgtatatatacgtatataatttgcaggtcagaaacattgcaactggatcagaaaatgttaggcacttacttgcagacatgtacctgggatacagttcttgtgaacttaaccttggaaaacagaaagggtgtgtctccaaagctccactagaaggaagaaaatctgcagcattctggctgtctgcagctgctgtcatcagaacttcttaaggacaatgctttaaacaagcctagttctttatattagaaccctccacttagcacctatatttcagtaatatgtttatccaaaaatactcaataattttaaaactatactatacatttatacttgtataaaatgtaaaacatataaaataggaagttataatatgcaaagtatatattatatgctttgtgattacttatgataattttttaggaaaaaattcttagaaaaaatacacatgaagattccagctcctaatattttaagaaaatatagtattagatgtagacgagtaccagagtatccctgggattcactgggatttccttcctatgggcatgttctactcttgaccatatcaggggatcactgcttgccgaagcgtacataataaataaataaatacactttatgttgagttaggaccagatttaaccagatctaactttcattctgtttaagctttaaatgatgtatctgaaaaacatcccgtcttaatccgaagtgatcctaaattattcgcatgattctcttcctattaccctatccatttctgggtttgagtagttacaataacaacgacattaacaataaactgagcagatgagggaagtagaagaggacagtcctcatgaaagcccccttgtacttgtgagtgactgggacgtgggcatcgttactctttggccatgtcttctaggaagctttctgcaccatgtcaccactaggggataccggaggctttcctttgtcctggagaaagcagctgctttccaggtgtcctttgggactggaataaacctggaggttctgagcttctctcttttcctttttaggggcttcctctgggggcataggttcagtagaagaaattatttcactgatgctattaaaacacagctcttattatagctcagatcatgttgcaaggcctaataaataataacctaggtggcaacctttcacatctttgtgtagccctctgaactaaatgtataactaagtgttcattcactgtttcagcaaatggttgtgggacacacaccctgagccaggcccactggaatacagtgggaagcaaagtcgacatgattcctgcccctgcagagagactgactgactcttgtctctgacagtgcagagactgactcatgctcacgcgtggatttctcctgcctgagattttcttttaaattcgagttaattaaaagttggaagatttcacattaaaatctgaacttccagcctgtcttggaacatgtgaggctttgtccatacttggcctgcattcctgcatagcaaccgtaggccgaagcccagcagaggctgagctctttagacaggcatgcactctggttcgccacagtctccatcattcctccttgtctgtggccctgcctacttcacatgcctctgttacctggttgccccaggatgcattcggaatcccaacccttggtttttgcatcccatacatggtctttcagctgatatattctgtggcctgaaccatatagatgaatcaaaacttggttgaattagtaactattttttaaaataaaaatcatcacttccatttatttttatttcttgctaaatgttttcagtgtctgaaagagtagactgtttaatgacacataaaaacccatctctttagactgaaaatttcactgacttgtctccttcaatttagcttccagctttactgccagctgctgcctttagaatttccctgagctccttcttgtgagctcacacaccatcccagcccaccctgccctcatcccagctccctgacaccaagtaccatgtccttggcccctggtcatctaggacttgggacagctgcctgcttggccaatcctctgctcagccatcagtcatcagatgacgactcaggaacaactgctcacatgatctaggttgagtgttttccgtttaaacctttttgcagcaaaatcctgctttcacatacacacacacacacaatatgaaatcctaaatatataaaacatgttaaaaagttgtggctgggcgtggtggctcacacctgtaatcccagcgctttgggaggccaaggcaagtgggtcgcttcagctcaggagtttgaggccagcctggcaacatagtgaaaccccatctctatcaaaaaaaattagccaggtgtggttgcacacacctgtggtcccagctacttgggaggctgaggttgggggatcacttgggcctaggggacggaggttgcagtgggctgagatcttgccactgaactccagcctgggcagtagagtgagactcctgtttcaattaataaattaaataaataaataaataaaagaagtatactgacccaacaacaacaaaaaaagtaacagagaaatgtatcttacgtgtcatggaatttgtcaggtcttgcttttcttagaatctgacggccaagattacttagaaaaagcagtgtatttctttaggaagaaactgtcaggtgagttttgaaagaacatagtagaattgcatattaatatattattgcccagttccttaatttatctaattcttttcacacgtacagatttttagggaaaatgtagattcttagaagatcaaaaaatgcaaactgaaagacatctaaataaatattctcagtgtaaagacaatggtagaaagagacagaatgatgaactcaagtagacagattataaactctgagagagaaaaaagaccaagtaaaggataggtcctgctctactcaccattcaccaccatccctggtggccggcatgcgtcctgggtgacttagccatggcccttccctcttgtcccccaggatgtggtggtggtcggggaggaaaacttcaccaccccctgctacattcagctggatgcagaggcctgccacatcctcacagagaacctcagcacctacgccctggtaggacattccaccaccaaagcggctgcgaagcgcctcaagctggccatctttgggcccctgtgctgctcctcgctggagtacagcatccgagtctactgtctggatgacacccaggatgccctgaaggtaagtgcctcccacctagcctgccctcttcacctccacctggaagccaaggttttgcacggctgtgcacacttggagatgtggctgtgtgtgtgcacccaagtgtgtggacacgtgtttggcccaaaaggatgcacttaaaaaagatagacatttctctgaggccatgctgatatatgagctgtttacactgattcctcccaagggctactttgtttaccttccttgatttcttttaatgaaaaatttagaagaatttggcaacgagacccgtggatggtaaataatctgcttccatgtttatctcagctgcgttcttcctataaaaggaattggcataattgctcacactgtatgttcctctggtgtgctgcttcatttatatgctttcctattctttttatgagggctgtgaaggagcgggttagcatttgacaacaggctgctgctttgcagaataaatgagcttaattcctggtgtgattattgccattcattttatcccattcgaagctttaagggatatagtaagtgcctttgaagaacttatgatatagaaggaggaataaaagaagtatgccaaggttgaggaggtaagtcagagggtgagaaatgccacagtggctgacatgcaaagtgctatatgggagctcaggagacggaggcatcattactttgaggaaatctgaaaaggagctaatatttgatgattggccctaatggaggattgggttttgaccagcaatagtagagggaaaaatacaagatttctaggtggagggaacagcgtgaataaacacagaagcaaacaataaataaagaccctcggccgggtgtggtggctcacgcctgtaatcctagcactttgggaggctaaggcgggtggatcacgaggtcaggagatcaagaccatcctggctaacacggtgaaaccccgtctctactaaaaatacaaaaaaattagccgggcatgatggcaggcatctgtagtcccagctactcaggaggctgaggcaggagaatggcgtgaactggggaggcagaggttgcagtgagccgaaatcgcctcactgcattccagcctaggcgacagagtgaaactctgtctgaaaaaaaaaaaagaagactctctgcaggcatattatttctggtaagcctagaataatagataggaattttgtctagatggacctttacggccagagagaggagctgagattcagttcttgagttaatggagattggagaggtttaaacagaaaaaagacatgattgaaaatacatattagaaatatcagcctgacttcagtgaaaaggtgagtcaaagtatgcaggaacgtgtgatggagctgaatgatgacaggggagtgagatggagagaacaagcctaaaaagtcctgttcaagtggcctttcgagaatcccatgacgagcgctcaatggatggggcggaaggtcaagttcctgcctctgagtcatagaagcaaactcaggggtcaggatgccttggggtgtagagattgtgcctgtcttagacagtttgggcagctctgacaaagtaccacggactgggtggcataaacaacaaacttatttctcacagttccaacccagacttccagtgtggaggctgaaaatctgagatcaagatgccagcatgggtgggctctgatgaggaactgctgacattttgctgtgtcctcacgtggtggagagctggggagagagctctctgggatctctcttacaaggctactaatcccattcctaagggcaccacctttatgacctaatcacctcccaaaggcctcacctcctaatactatcacactgggggttaggattacaacgtatgaatttggggggggcacagatatcactccataacagtgactgtgccttttcttttggaatactgaattagaggtataaaagatgcccaaggcacggttagaaatacggatatggttctctgaacagagagcagattttgaaacagagattcagaaaccaactacgttatgttgataattgttatccacagtggtcaggaagaatatcaagagagagtagagggagaagataatcataaaaataatcaagatgactgagagcttctatatttttggcaaaattctaaatattttatattaactcatttaatcttcattttatctataaggcaccattaactccactttatagatgtatcatccaaggcacagaaagtttaagtaagttgccctaggtcacacagctgttaagtggagaaagcaggcttcatgcccaggcaactggctgcagcctggctgctctgcccctaagcaaagttgcttgaagacctataccctagagcctggggaccagggaaagccctggctttgcaaggaaggaggaagggcagccagcaaaggagctaaagaaggataagcagccagattaggaatagaaatggaagaaaaatgaatcaaggaagccaaggaaagaaagtttttctgaatatcagggtatttccatctggagcttccgttcagagagtagtacttggttatgaacactgagcgttccaggataagtccactgggaagcaggctccaggggaaaagactgtagagggcacgagtggaaacaggaaggtgagctagaagcctgttgccatcatctgttcaccatggtagatttgaccagcatggtcttggggaagggatgagacctcttgggtcagcgcatataattttgatagtcaagcctgtaagattttctgatgtcgaataaaagttgtgaacacacagctctaatgtaaagcttaaggttatttcttttatattccttgcaaatgtgatacatccaaagcactgtcaggataggaatcatgctgggtttgaattagggaaaatggtatctgtaggggagccatggggtctgattaaggcaaatcttttcaacagttccaagaaaatcgttgcaaaagcgtaccatagaagacctacatcatatttgaagtgtttgatttacatattttatattcacacacatagttctctcctcagccaccttgttttcccaataaacacacacaaatacatgcaaaaatagaatattttataaaaataattctgattattataattagtgaacccaagacgcaaatggtcaatagtgagaaagagtgatgaacaggtttaagcagcaaaaacaactcaagagcagtttgtatcatggtcaatgctttctaaatagacatttataaattctcagcatctggggatctagcacttagcctgaaacaaacatgaataatggatgaggctttcttgcacctcatggccttttaataatgcagaaataccaaaatcctagttataggcaaatggcctctccaacataccgaagagacaattatttcagtcacgccatctcttcctcacacccacgcttgaattggaaatttggggctgattagctcaaaaagccctttattactaaaactctgccttcttggcgccctgctaatgttcccaacatactctctcccatctcgctacttctctaaccactgttgcccagaaatacttcctcttgcaacacacctcctgaaggcctccttctccttcaggcctgcccccatcctgactcacgctcatgctcttccaaaatcaggaattctcagcgcacagaggaagcaggtggaagcttttataaaaacccactccagggcctcactcccacaggttctgatctaattggtctaggtattggggcattttattttcttaatactccctgggttattctattgtgccaccaaagttaagagctattatcctaaacactttcccaaatctttttggaactttaattctactaagaacaaactttcctacaacctcacgtcattccctttcccattgctccacctgctctcattaactgccagtggatcttcctggtaacacctcacaatgcctccagcgaagactgtacccctaacaaaccccaaggccaagaggaaatgtgccagtacttctcataccccatgaccctttctggggcatctcttcactgcccaggctggatggttctacttctactcatgcccacttcagttcctttgcacagagctctgtggatcctgccctaccagtacttgccttgtggtctgtctttccatccattttattcccatcattccctcaaattcagtgtcatgacttaaatcacagtctctctgcccaaacttattctagtagcattcacatcatcttacattatctattcactggcatagatgtgctctggatttcatcttcattagcaattgctccactgccaagatctccacctgtcagactccccctttctgactacaaccatctgaccttccatctctctctcccacaagatgcgtggaagctaccctttgttcttaaggagaggctccctcactgggcacggtgactcacgcctgtaatcccagcactttgggaggccaaggcgggtggatcacctgaggtcaggagttcaagaccagcctggccaacatggtgaaaccccgtctctactgaaaatgtaaaaattagctgggcgtggtggtgtgcccctgtaaatcccagctactgaggaggctgaggtgggagagttgcttgaacctgggaggcggaggctgcagtgagcagagatcgcaccacggcactccagcctgggtggcagagcgagaccccatctcttaaaaaaaaaaaaaaaaaaaaaaagggagaggctccctcaacctgctgcagtttcccagtccaaaaaccctcccctggtcttacccgtatgggcagcaaactcgcttccacactgaactctctcgtcattatgagctgctgcagccttttctaatttataaccaaggataccctccactgaataagcccactacttctacttccaggttgatgagttgctatgaaaaatcatacatttctgattgggtctattatactctcaagatacctgttctaagggatgccttccctgcttctccgtaatccttttatttagctcttcttgacttacccgattcccacggcagttcttccatgtatcttctgctctcaggaagtccctggctgttttaaagcccgcatcttgcctagcagtgacctaaccactcaatgaaagctcccccagctgcggtcctctaccctccaaaccttttacttcagcctcttctcacttcatctgactctgatgaaaaggatctctgcttccttgtttgtgctttaatccaattcctgaccacctccatcttcagcatagcaaatgatgcctgaggctgcatttaccagcatttgatattttcgtatagtaactgctatgtgctggggattctttacaaattgcagaaaaatccacagaaatgctggactagggcagagatagaagcccagtggagtacttattctcagggaatgagtccaggagagctattgcaaaaagactgccccaatgtctggagctgtgtatttcaagaatgtgaattatcactttttattattattatatgtggttatattatccatgtggatagataatacatttatttatataagtatatatcctatagatatataattacatatataatatataaatattatatattacataaatataatataaaaatatatattatatattacataaatataatatataaatatatattatatattacataaatataatatataaatatatattatatattacataaatataatatataaatatatattatatattacataaatataatatataaatatatattatatattacataaatataatatataaatatatattatatattacataaatataatatataaatatatattatatattacataaatataatatataaatatatattatatattacataaatataatatatatattatatattacataaatataatatatatattatatattacataaatataatatatatttgtacatttatttatattatccatatggatggataacacactcagtcttaagcaactgtgatgcattttttcttctccctactcacctctttgagcttggcagcttttgtaacaattttccagggttttgttaagccttggggcaaaaatggtcacctgaaacttaaaagctgtgtttagcaatttgaaagcactgatacagaattagcatgttggcagtgactaccagagcaaaagtcaaggctgatgggcaacagtggaattattttatacctttcaggagggctttttcctgtgcatgtgcttgaaggaccactgggagcaatgctctagttgtgttcacataaaaggataaagatgctaagaattgtgagaatagtttggaatcaattcaaatagagaggtcaagtctattgaaaaggttgagtttggtatatcagagcttttctttttcccccgtcttcaggtgattaatgaaaaaggtgttttcctttcattatttgcaatgacttaaatcctagtataaatagaccagaaattaaccaagagcaaggttatatttggagtaagtttaaaaacacctaggagaaacatacgtctatgtggaaataagtcatttctgtcccagtatccaaagggtacaatacctgacagtctctttttggaataaagggttttatactaaactctgagattcagaacctaaaaaaggagttattttcatacattatgggcagtgtatgatatttattgaatttctgacaaatgtatttgtgatataaatcaaataatgtgtattaacataacctggcttttttttttttgatggactcattgggcatggagaagaccttccttggataaatttcatgtgccctaatcccaactgtaatagagtaactctgtgaaagcttgtattatgtgaaaagagaagagaagaatgaaagaaacactggaaggtgaagagagagaaaggaggttggcggaagtctagttgagaattgtgtgatgctcacgttcttgggccacagtcatggacagtcagacgtggcttgttacagggagaaggtagttatatttttatcctgctacctgtcacattcctcactgatgtcctcctggcatttcctcggcaagctgtgaccttaccgaactctgaactcctcacgcttgcttcttctaggtcttctaaggctgatcttccctggaattatcctagtatccatacctactcttatagttcccacaaacaacctcaaaaatagccttacctgtatactttcaggatcctggcctctggagttaaactaatatattcacatgtgcaacatgtgaattagagaccaacaacaaaacgtgtgttaaaggttcctagtgcatcattgctgctgtgtgtatgggagggagcgtggtacagcagcaaagctcgagtcaggctggctgccgtgactggctgtgccacttatcagcctggtggccctggtcactgaatttgacctcttaggacagtaatttggtctgcatcaaggactctttgaagttctaaggacatcaaagttattaaatctcctggcacaaaatagacaccagacactgtttgccatgcgtatgtgggcatttagacttcagtggcattttgaagataatggcttaaggaagatattaaatctaactggaatctaactgtggggtgagtttcaggtttggtagcggtctggttgattagacatttagtcacagggatatttttggtgcctctaaatttaccccatttttatcatcttctgatgaaatctggccctgggtctatcacctatcttagaaatgacttgccatgttgaacttactttttgaaagagagagaaaacagaaagaaaacagaagttgtggtatgcagaataacacccctgcccccacccaaggatgtttacaggttaatattcaaaacctgtgagtattttaccctacatggcaaaacagtctttgcagatatgattgtgtgatttcaggagattatccgggaccatctgggtgagtccagtctaattacatggttttgaaggtggagaactttttccagctatggtcagaaagggatatgactgcagaaaaaggctcagagaaatctgtcattgttggatttgaagacagcggaaggggaccgtgagccaaagaatgtgagaaacctctggaaggtggagaagacccagtacagattctcctctcggggctctggagaggagggcagccccactgacacaccttgattttaactcaacgagaactgtgttactcccaccctccagaactgtgagataatcagtttgtgttattttttaagtcactatgttagtggtgatttcttatggcaacagtagaaaactaatatagaagtttaaaaataatgtgttaacaggagaaaagaaacacaagatgacttcaaaagtcctagaaaaacctacaaagtcctgttcctaatacatagatgtgagagagaactgttgtcctaagagcacgcccagaggtagacaagtgacacgctgcttgcctgagcaccacccgttggcatttggctttaaaagtgtcacaaactgccctgactgtgcaggctggaagtggcagctcagaccaagcatccgtggccacagcagctgtgggaacagcaggcagagccctagaaacgaagcaacttgacggggagatgtttgcagatgggcaccagagtccagccttgttattattagggaagaagtaaggcagacaaactcagggggagagcagagcaccctggcgtgaacacaggaagggaaaggagcaaagccaggccgggcgccagggatggcgacccgagcaggtgggagaggccgggctgacagtcagatgttctccactgcctggctcagcagtctgaggcctgcaagccggagaggaggggacagagcatggggggctgacagcagcgtcgccgaaaagctggcagagaacaggagagaagggcggccgctctttttggcctctgcttcggtggagtgcaggcccccacagctgtgacagagacagcagtgacagccaccatcgcaaaggcacagatttctcagccccaaatgacaagggcaggttttcgacacatgataatgaacagaagaaaggcaggttccatgaaatctgatggcagatgtgattttttttaaacaccagccagcacagtcattgagggctggccttttgaagtttcatatgagtggcatgctgcacatttgctggtctgttctttgtgtctgtgtcccagaatcaaggtgaaggtggggcaccgctgcagtacaactcagcctcctgtgccggctccagcacggagagcggttctatctccaggagccagaaagccgaaccaaagcaaaaaacagccagagtgccaggctggccactgcttcgcttcctgccttctgtgctgtcctctccatgtagcgatctcagcgactttccctcagtagctacctccacctgctcatgcttctgctgctgatgcctggcctcgtggcagcagtaaatccagccaatgcatggttctgtgtttctctcaaacatgaagactgcctggagaaataacatccagaaacaatataaagaaagaagctagcagagtgaaacacatcctggatttcatcgccttccagccttcccttcaagagagatttcagtgggttatatgagacttaactttaatcatttctttcatcctttctttagcctgtatggtttctaaaaagggaaagaaaagaaagacagaaaagtagttggagagagaacaagagagaggcagagagggagagaaagaagctatggatcatataatccacaaatagcataactgccccttgaaaaactggaaggcataacacatgccttgaggaagaaggtggtgcaattttggggcactggagtgagagaggggcaagttgttatgcagggcaagggtgagcagaggaagaggtgagcagagaagtagggtgagcaggggaggaagtgagcaggggaggagggtgaacagaggaggtgagcaggggaagaggtgagcagaagaggtgagcaggagaggagggtgagcaggggagaaggtgagcagggaaggaggtgagaaggtgaggaggtgagcaggggaagaggtaagcagaagaggcgaccaggagaggaagatgagcaggggaggaggtgagcaggggaggagaggtgagaaggggaagaggtgagaaggggaggaggtgaacagggaaggagatgagaaggggaggaggtgaacaggggaggaggtgagaaggggggaggaggtgggcagaagaggtgagcaggagaggaggatgagcaagggaggagtgagcaggggagaaggtgagcaggggaggaggtgagcaggggaggaggtgagaaggggaggaggtgagaagaggtgggcagaagaggtgagcaggaaaggagggtgaacaggggaggagggtgagcagaggagggcgagcaaaagaggtgagtagaggaggatatgagaaagggaggaggtgagcaggggaagaaggtgagcagaagaggtgagcatgggaggaggatgagcaggggaggaggggaggaagtgagcaggggaggaaggtgagcaaaggaggaggtgagcaggggaagagggtgagcagaggaagtgagcagaggaggaaggtgaacagaagaggtgagcaggagaggaggattagcaggggggaggggaggaggtgagcaggggaggaaggtgagcagaagaggtgagcaggggaggaggtgggcagggggaagggtgaacagaggaggggagaaagggaggagggtgagtggggaggaggtgagcatgggaggaggctgagcagaggagaaaggtgagcagaagaggtgagcaggggagaaggtgagaagggaggaaggtgggcagaagaggtgagcaggggaggagggtaagcagaggaggatgtgagaaagggaggaggtgagcagggaaggagggtaagcaggggaggaggtgattggggaggagagtgaacagaggaggcggcgaacagaggagcaggtgagcatgggagcaggagaggagtgcgagcagggaaggagggagagcaggggagaaaggtgaatagaggaggagggtgagcacaaagtggggttggtggggagggtgagcagagggtgtaggcaacaaagccagggtccggagcactagcccaccagatccgctgtgggaccctagcacctcacaatttttggcacaaaatcaccactgtgcagggctctgtaacccagcttcagcctggaccctgggggcagacttgtcatactctaatagatatacttcaaagcatccaagtatatgccactctgttgcctgggggctcccagtgagcaatagctgtaagcctgatacttaatggaaatttgcccaagcatggaaggaacaggcagagagacaacaagagaagcagatgaggcagatgaaatctaacccggacataatgcagagtgggaaactcgggggctggacagaccagagtggaggagtggcttggctcgcagatgtatcctccctcctgcctctctgtcaagccttaacgaggggagatcctctcatctaagagcctgggagcattctgggtagaggccagaggtgcctcctttgtgcacacaagcctttaaaacagcctggatttattgtggctcttaagtggcccaggctaatggcttggcatggataatgtcttggtttaattggttattgtgaaagctgcttgtttctactgtggaatctcttgtcctgcctttggagcaatccctcacaggctccctgaatcaatatagccctcactctgggccggccagtctgctttggaggcagcgcccgcagtggggaaagaggccctcccacaggattgctcagatccctggcggacgctgggctctgaggcaggtggcctgcttctggtgactgatggttcgcgtgtgtagatgtgcatgggctacagacacatttattgatgacctactcttgagggtgtctttgcaaggaaaagttagaggggtgcagatagaactgtacaaggggggctgggcgcagtggctcatgcctgtaatcccagcactttgggaagctgaagtgggaagtttacttgagtgcaagagttcaaggagcaacaaggcaagactttgtcccgacaaaaaaaaaatttttttattctactttaagttctcgggtacatgtgcacaatgtgcaggtttgttacatatgtatacatgtgccatgttggtgtgctgcacccattaactcctcatttacattaggtatatctcctaatgctatccctcccgcctccccccaccccacaacagtccccggtgtgtgatgttccccttcctgtgtccctgtgttctcattgttcaattcccacctatgagtgagaacatgtggtgtttggttttttgttcttgtgatagtttactgagaatgatggtttccagcttcatccatgtccctacaaaggacatgaactcatcattttttatggctgcatagtatttcgtgtgtatatgtgccacattttctttattcagtctatcattgatgggcatttgggttggttccaagtctttgctattgtgaatagtgccgcaataaacatacatgtgcatgtgtctttatagcagcatgatttatagtcctttgggtatatacccagtaatgggatggctgggtcaaatggtatttctagttctagatccctgaggaatcgccacactgacttccacaatggctgaactagtttacagttccaccaacagtgtaaaagtgttcctatttctccacatcctctccagcacctgttgtttcctgactttttaaagatcaccattctaactggtgtgagatgatatctcattgtggttttgatttgcatttctctgatggccagtgatggtgagcattttttcatgtgtctgttgactgcataaatgtcttcttttgagaagtgtctgttcatatccttcgcccactttttgatggggttgtttgtttctttctcgtaaatttgtttgagttcattgtagattctggatattagccctttgtcagatgagtagattgcaaaaattttctcccattctgtaggttgcctgttcactcagatggtagtttcttttgctgtgcagaagctctttagtttaattagatcccattgtcaattttggcttctgttgccattgctttaaaagtagccaggtgcagtggcatgagcctgtagtcccagctacttgggaggctgaggtgggaggactgcctgagcacagaggtcgaggctgcagtgagctatgatcacgccactgcactccagcctgtgctacagagcaagaaagaaggtgtctaaaaatattttgaataaaagaactgtgaaaggaagtcagaaactgtctcccttctcacagaagcaaaacaagctcatcaaagcaacaggtggattcacctagagccaaactaggccactgaggtgggggaactcccagtaggaaggacaacttctgcaaaggaacttgacgttcaggtttctgagaacaaagaggccagatgatccgcatccttactatagcatttctttccagggtcacgatatttctcttaagtcttcctaaatcttctgacattaaatatattttgttcatattctattttaaggtgtgtgaaatatcctaacctttgtgattcaagagcagcctgtctggaagtggttttagacctgagcacactgtgttgtggttacatgtttacaggtcaccccccaacccccatgaaccattagcccattagcagtttaaagcagtgacagggacttacttgtctgtgtgctccagacctgacatggttcctggcagcctaacgtgtctcactgatgttgaatgaatgttcccagggagaggaagcagaggaaaacattgaactgtaaagccatgtcttattgagttgtatatttgttatttttctgtcctcttacatatctgtatcatataaataaccaaaatgagatcatgtgcgaagaattcagaaaatcaagcagtgtgaaatacaagttgcagcatatttttaagtggaatctgctggagtaaatctcaaattgtaacacttaaaatggtaacacaagacaaagcctgattagcctttcgggcaggcttgcttcttctatcatctgacacaaaactctatttgagattcgccgtatgtgacgagtcagctcctgttcctgtgtggttttagattatactcgtttcccaggagttgctggatgatcgactgagatctctttaactcacaccatggtttttgtcctctccttttttctgttatgctttcctatgtcatgaacgtctttagtgcaacgataccagttgccactttgcgggaaggggtgttaagtgtggtaaggttactgaatccttcactgctgggctgaattcttccccaggtactagtgaaaggacaagctgtctgagccagcagtctccaatatggagtttacacaccccaggcccagtgaaccactgggaccaaaaaaaatacagtattagtacttagctttatgctaagacagattaatacaggatcttatgtatttttaaattttatgtatattttataatgcaatatattaacatactgataatagagatatgtaatttataaatatgcatgctcaatgttttgactggtagactattctggcaaacatgtttatagcctctgctctaagcatgggtgtgtcctgatgggcagtttgtctttccccagggtttatgtcccattggaagggagaaaaaagtcaggttccttccagccctgtgctgcagctttgtgtcactcctgggtgatggagaaatggcgagcttaagtctatggaaggagtgtgttctgtggccccactgtctttaaaatggcacttggtactttctatccaaaaaagggctcctccaagccagtctaggctttttccccactagggagaattcttcaccatgacttttcaaatcattgctgaagaaacaaaaaactgagcctgattcttgggctgactcccatgaagactctgcactcaaaatgccgtgttagatttcctgacttcaaggtcatggccaataggcagtttgggtttttttcaatgtcctgcctgccaagaaaactgataatgctcttcatatcctctggcagtctatgttgattgtaggaatggggtgtggattatacattgttgggtacaattacctcctggaatacaatgcatcttcttttagacatcccagggagataatttcgacataatgaagatctatagtaatcagataattactatcgattgctctttagacgtcttgatgaggtaattagggcatatggaaagaaagaagctggaactgattgattggcatgactgtaatctcaaagatttctaattatgtttcttttcttctaatggcttataaacaaacatcattttagctttagaatttgtcaggtgccaggttcactgggaacatcagctttctctattatgctaactagacaccaaacatgatcaacataagctcattatgccttcctgctgaagcagaagaaactgcaattaaccctcacttttcttcttcttctccacttccacatggctctattcttgtcgtggagtggggtgtcatggagtggggtgtgccacgttctgtgaggagcgtgtgtgactcaaggctggatgggtctgtatggcctacgggagaccctcggagcctgctgagctcaggcacagcagactagggggacaatgacacaacatatgtgtcaaggtgtctggctgactgtggctgggggctggctgactgctcgggctcctgtcacaagccatagctactcatcagccagcaacattaagtagcaggtcaatactctcaggcagctggaccacacacttgtctacgtcagtgtgctattgcctcatctcttccattagatactaactagaggacgccctgtctgaaaccacattccacattatcctaatatttttttacaccttataggaccttcgagcagcttgcatggttcagaatagttgcctcaccaaaagatgacagatattaagaaccactaacgcagcatcttgaaatgagctgtttgcatgtaatcaatgatcgtggtagccaccacacttactgctctacaagtgcatgggttagaattcgttcaacaaatgcaaggtggatgcatttttctgaatatgaggcaatctggttcccatgcctgaaatcctccactgcgacccacctgtgcttggtaccctggtgggtacccaatccatgcatgttacagtctgaatgaacacctgtgttcttgaattccctgctttttattgaaatagcaccaaagaaaaaattatattttgctttttttctaaaatccatatattcctggacccttattttaaaatgggtcacaaatttcctgtgtatttgtaccattaaaacttttaaggcatgagaggagtaacgtgcatagggatggttcagacagcagaggagacccaagatagtttgttcattgataactaatggtttgctgctgtttggataattacagctgcagttggaaatgcttcattaactcccattaactagcctgagaaatggaagtatatatagaatctgtctttatgttgtatctgtatagtataagaaaattatgtagcaaattttttcatcagccacaattctcgagaaacaaaaatattcttttgaaaatgtaattggagtaactgtttagttcaatatttggtgtttaaaaaccttcctaatctgtatcggaatattttcctttaatagaatatataattagcatattctaatttttttaataattgggaattatgcataaatcattttaagcaaactttttatatttttatttctgtacttgaagtaactataagagattgaactaaatgtctaaaacaggttctaattttttatttgttgtttggttttatcaagtccaaggaatgagtatctcttctagttatttgtccctttttgtaaaagttaattgaaaatctactttcttatcaatcagtttgtctacatttctacctattttttctttaatttatggctctctggttttgagttctgatgttattcccccatatttgataaatactccactcatcagtcggtaaagggcaaactgtatgaaattgctcctcaacagtgtgatgtagactgccaaaacatagtttgttattagggtctggtcccatacaaaatgggaggggctttagttagtttagttagagggtctcgaggctgcaaaagtgggtgttcaaggtgttgcacaagttccgcctgccattcaggaggcagtaaagaaacttattcaatgagagagctgacagaagtgatccaaatcaataacgtgctttgggtttggggcatgtcattataggaaattttacatcttgagagacagatgggaggacagctcctagaagaacctaaggctcttcattttaaaggcagcacccacaacctgcgcctgtcaattcacgatatcgcccattccctctggaagagcaaattgctggctaaatatcaggtaaggttcccaagccgaacaaaaggtctggagacatctctaagaaagaggtctaaaattatatagacataggaaatccccttccttgaaattaatcatatgtcattacttgtttctccaaaatagtttggggttatttaggatttttgagaaacacagacatatttgagggaatgctttttaaaaattcttcctttaaataaatgtactatcattgttttatttttaataaatgaaaggcttccaaatccatcatttcaattaattttcatactaaatgttcacatcaatgggtaaaaacagcttgaaatgcattcacagaaacaaacagaaggacatttttattccatgggacacaaattaggcttcagccttcctaggccagtacccttacattgaaaaattagagggagccctactttggagaactgaaatagcatgtaaaagtaaaacccaatcaggatattattaaacaagagacaagaaaatactggtcccaagtgtcatttgtatatacctgggggaaaatcacatgaccctcaaggaattttcccctccttcatccgtcagcctgagctcttgagaaaaccactttggcgggattgcaagcctcatatgccatcctaggaggggcagacatatttagagagctgtgaatccatgttgatatttatgcaaattcaacccaaaccccagcattgcctctgaactggtagctatttcctgatgtaagccaatgaacatactggaagactgatgggaagacattctggctccattctcactctcattggtctagttcctacacataaattatgggaaacaagcctactggtttgttaacaatcatgagctttgacggaggttgcatgccagactctctatgcacagctcagtccttgatggagacagaaggcttctgacttactcagtatacctctttctttgctttcttctttcctctgtgttgcagttgtcataaaatactataaatctccctgttttaggagtaatttcttttatacaattataagaaaatactattttaatgataatgataatatgatattagttaaagctaagcctggccgaatgcttaccatctgctggacactctcttcatacattggtttagctcatttaaccccagcagacctacgaatgagaagctctttgtttactcttttgcagataggaaaactgagcaatggaaagattaagtaatttgccccaggttatcaagtaagcgaaataaggggttcttatttgtactggatttggctccgaagccactgctttttacagccatgctctcccattttttatgtggcaaccttttctttcctttattgaaaacagattctaggataggctctgtaaggtggtctagacttttagaaaattaaagcctgttcgatgcttggtgccaagaacttttctgtggcagctaattgagtctgaagtttccaactgtagtgggttttggcttcccctgtcctgggcagaggaggatgtaaagcatgaaagggagccacatcagtgcagtatcctttagactttctttgcttttctccagaatgtcacgacagggattctattaatgagcaatggctggtgtgtgcaagttttattttgggaattgtataaactcttttttttttttaatcatttacaatggttcctgttgttgtaaattagagacatgtggcagactggttaggtacatggattctggaggctgactccttaggttcaaatctcagccctgctacttacttgctgtgtgatttggggtaagttattgaacctctctggccctcaagtttttcatgtgataagggtccaggatgtacttaaacatagggctgttgtgaggattaaatgaggccacaggtgtgatactcagagtacctggcagcagaccatctgagagttatttttggtattagtccttcaattgtggttaacactttcatatcctttaggaaattccattttaccatgtttggagtggatctcaaagaaacctgcactgcaccttcactctggaaagatttagcctgaacacagtggagctggtttgcaaactctgtgtgcggcaggtggaaggagaagggcagatcttccagctcaactgcaccgtgtcagaggtaagtggctcctgtctgtctgaaatcaggggagagtgcgacactcaggaagacagagtgtgtgggctaaaagggtatctcaacatagtccatatgggaagtcctcaaaagctttctatagatcctatttgttaatagaataatatttgtaatgagcaatggaagctagctgcagaaaaaaatatatatatattaagggatcctttttgaaaaacaagtcttaatttttatgacatgaattttaagaattatgttctaacttgtaaaaacagatctgaatttcaagtaaaggtttaatttaaggagcgtgcacatggagtaacttctccccatgcatcccttagcgtgccatgttcccccatcctccatctgtctctcctccctttctgcttctttctcagcaactctcctccctttcccctaatcacctgctgctgggtggagtggaagaaaggagaggggcttctctgctccctttttcttcttctccattcaaaggaagaaaggagaaatctcttgatctcctttctctctatcattctctaaatataaagagagatacactttcctccgggatgggggaaatatgccacaaatagaagtagaatctccgtatttcccccctgtggccatcagctttgccttcctttgctgtgatcttcacacacttcagttggctatttccctgtgtccatattacagaaataatagtgatcactgctatctaaaacttctccttaaggaaagaggaagtgcccatgaccttccttatctgttaccttggatccaaagccttgaaaattgataacccttcacaccagaggaacaaagggaagagaagaagccaaaagggcagaaggcagcctctttggggcctcatggagctaagccctgtgctgcgtgctaagccacaaagcacaagattgtcatatgtgaaaatgacagcgggccagtatatgatttaaaatactacctctccctcgttgtgtcatgcacagtgacgaatgcaatgtcagcatgttcagcttgtcttgcttcacatgtcatatttaaagaccatcttccttagcaaaccgagtggggagaaaagcacatcagcttccgctacactccatccttctttctttcccacagcctgccgaggtgcggtcatcatttcctcctgtagtttcatgagacttttgactcataaacaactttagtcacagcccccggtgacattcataaggaatgatctcggtgtcagggtgccatggcaaccgccaggccttcggatgcgcagccctatctcccaggcacacagcaccacccctgctggctcgggagggtgttttcactttccaggcccagcaggtctgcaaagttcaataaccacccagctccagtgacaacaaaggctgcggaattttggaggggggtgagggggtctggtcctttgatgcttgctttctgttccacatgaacattggctgcgtgttaaaaaggtggatcagatgcagccacaaatgaaagagagctgctctgtgctctcccgcgccagggctgccacctcccttcagaaaaaggacagttttgcatagtgtgatcacaatttaagggcttttgctttcttatggcaacacagaggaaagattacttcttttgcaacacggtgtcagtctgctcaaagagaccagccttcagtcatgtcagaggcatctgcccttgtgtgacagacaagcatatttaactgagggcggggaagaagtgaggggagtcaagatgactttgggggattaaggggcactctgcggcttttccttctgggtcactgaatcccactgttgtggttagcatttgaatgcgggtgctgggtgcgcagaggagggagtgtggatgggtgtactgatgttggagaggaagcctctgcgctgaagaacaatggactctgtagagttatgggacccagatcctcaacaaaaccttcaagaaagggtacaagatgattgacaaaccataaacaagtagagaaaaggctccatttgtggtttctttcttctgaacagggctccttcctagggtcacagggcaagatggcaatgaggctggggttcccgttccaatgtcctatctcccaggaatgagctggcttgccagaaatgtgctgcccctccctccagccacccaccaccggacgcactcaccagtcgtcatttataaagctacacagcccttggcctgtcctgtcagacagaggacctgttgcccaccccagagaccaggctgtgcgtgacatgtactctgattatttcaagggccagccagttgtctctgggtgatttagccagggattccttaactagagacaaaggctttaattaatttcacagagatgaagtttaagaaggaaaatgtctggaagactaactaactgtattgacacaaatgaatgtcaaaatgtaaaagatgataaaagattttgtttgttggtttcatagacaagtgcagagagagtaaccaggaagctactcattatctccaaaagaaaagaaaacatggtgcagaggacagatgataaatttacagttttttcacatcttctattttgtttcagttacaggcagacatccatcatgggaaattcccaagtaggctgttccatggagatagatagggccaattacttaatcctttcttgcctcagtttccccattgtaaattggtatagaatattatcttgggccagtgtgggaattaaatgggagaatgtttgttagtaagtaagtgttctaaacagaacttggcccagagcacatgcttaatctatgttcaccatttttactggtgccactgatgccataaggataacagggcttttgagtcaactttgctacttcaatccgtggggggggtctgtcatcaattgaggtttcagattttctttctatcatcaatcaaaataaacacaaaaataaaactcagatcctatataaataaatgaaaactaaatataaacaaaaattagctcccagagaaaagaaggtagcatgtatccccaagttggtttatcacattgctttacttgaaagctctgaaccctgaaaaaaggtgcagttttagggggcagtatttattagtcagtcatctttttctttttttttttttttttttgagaaggagtcttgctctgtggcccaggctggagtgcagtggcacgacttcagctcactgcaacctccgcctcctgggttcaaacaattctcctgcctcagcctcctgagtagctgggatcacaggcatatgccaccacacccagctgatttttgtattgttagtagagacagggtttcaccacgttggctaggctggtctcgaactcctgagctcaggtcatccacccacctcagcctcccaaagtgctgggattataggcgtgagccaccacgcccgttctcatctactttactttaataatagatttataggtaataaaagcaattataattaagttttatatttgctagatcttataacctcttaagttgtggtgcacagcacttctgtatacacaaataatatttatttaaaataaatgtacaaagtaatatcactctgctacagccatttcatctgtttacatcttctgctttccataacctgctcaaaatgaccattgggaaaatctagtttttctaagcgactttaggaaaagtccaaatatcagaatagaaagttgtttcaggactgtggagtcctgaatatgtgtgtcatcacccatagcagctgtttgactaatgttgaaaaatcatatgtttacataagggaatcataacatcaaagaccaatggtactgatattataaatgattattgaaataagcattctgtgagagtaaactctacttttacctggaagtaaaggaagaactaatagcaactaaaattactagatgaaatgtaaatgtataaacgtattttactttaactttcaaggctgttgtcagccatttgataagagaaagaaacaaagaaatgatgccctattgagcttgtttcatctacacagaaataaataggctgagtgagtagccagggatagagagctcaggacttcaatgcccacatgaaatgctgaggagagttctttatccacaagaaaatggggacaacatgaatatgtgagcacgccttcccaagatccatgcctatctatcttcaactggcctctcatttcaggatttaacttccacatttagttggaaggcagctcaacaccctagtctatgggtgggcttctatcagaggttggcttcatcttctttctgtactaaggacaaatattttctctcatttcaacaaacaaacattaattgagtagcttcttgtgtgtggggcacagtgttatcatagaggtctgaggatgattgattgattgatatactctcaccaaaaagaaagaaatgtgagaaataaaaggcagtaacctacaaatacagccaatgtgcacagagcagagtgtgaggagcacagaagagctgggaggcaccgaggagacctccaggcctgacgcctagggtatgctcgcccaggggggccccagggcacaggacttttggaccaggctttgaggactttgcctgacagagatcaaagaaaagaaagagcagaataactattagaggtgcatccttagaaatggcatgagaactagtgagtggtgctcagactctaaggagcctatgagtcaggtcaagtcacggtaaggacggggcaacctgagattagattgtgaagtggtggaagcacaggtgaacagccctactccatgtccgactgcattctgcacttcacatggtcaccttgcagcctcataccagccaaccaggaaggtcatataaagatccctcactgggccaggtatggtggctcacacctgtaatcccatgactttgggaggctgagctaggaggatcacttgagcctaggagtttgagaccaatctggacaacacagtgagaccccatcatctcttaaaaaaaaaaaaggcaaattagcccagtgtgatggtgcacaccgatagtctcagctatttgggagactgaggtgggaggatcgcttgagcccaagaattcaaggctgcagcaagctatgatcacaccatggcactccagcctgggtgacagagaagtgtcaaatgcccctcctaccacatgaagaccttgtctctaaatacatatatatatgtatttgaggacaaataccatgatcacagccaacagcactgtgcataccatggcaaaagatttcaaatgccctccacacccctggattgaccctgttccatgggattgcataagcctagaagtgagcacttgctgctgatcgcagaatgtggaacatactgctaatcaacactggcacacaggcagttgcaacctcaccgcctgcagtgccagtgcattcacggctggggaggccactgaagcggtgcagggcagcatatggggggcgctctgggtgatgatggtggtgttgagcccctgagctgagcactcagcaggaaccaaacacttcatgatggctgaaactgggtgtggccagttagttcatcctctggcaactagtgaggaacaccaacaagttacgtgctttaaaaagagagagacagccgaataggaacagctccagtctacagctcccagtgtgagcgacgcataagatgggtgatttctgcatttccatctgaggtaccgggttcatctcactagggagtgccagacagtgggcgcaggtcagtgggtgcgcgcaccgtgcgtgagccgaaggagggcaaggcattgcctcactcgggaagtgcaaggggtcagggagttccctttcctagtcaaagaaaggggtgacagacggcacctggaaaatcgggtcactcccccccaagtactgcgcttttcccacgggcttaaaaaacggcacaccaggagattatatcccgcacctggctcggagggtcctacgcccacagagtctcgctgattgctagcacagcagtctgagatcaaactgcaaggcggcagcgaggctgggggaggggcccccgccattgcccagacttgcttaggtaaacaaagcagccaggaagctcgaactgggtggagcccaccacagctcaaggaggcctgcctgcctctgcaggctccacctctgggggcagggcacagacaaacaaaaagacagcagtaacctctgcagacttaaatgtccctgtcagacagctttgaagagagcagtggttctcccagcacgcagctggagatctgagaacgggcagactgcctcctcaagtgggtccctgacccctacccctgagcagcctaactgggaggcaccccccagcaggggcagactgacacctcacacggccaggtattccaacagacctgcagctgagggtcctgtctgttagaaggaaaactaacaaacagaaaggacatccacaccaaaaacccatctgtacatcaccatcatcaaagaccaaaagtagataaaaccacaaagatggggaaaaaacagagcagaaaaactggaaactctaaaaagcagagcgcctctcctcctccaaaggaacgcagttcctcaccagcaatggaacaaagctggacagggaatgaccttgacgagctgagagaggaaggcttcagatgatcaaattactccgagctatgggaggaaattcaaaccaaaggcaaagaagttgaaaactttgaaaaaaatttagaagaatgtataactagaataaccaatacagagaagtgcttaaaggagctgatggagctgaaaaccaaggctcaagaactacgtgaagaatgcagaagcctcaggagccaatgcgatcaactggaagaaagggtatcagcgatggaagatgaagtgaatgaaatgaagcgagaaggaagtttagagaaaaaagaataaaaagaaatgagcaaagcctccaagaaatatgggactatgtggaaagaccaaatctacatctgattggtgtacctgaaagtgatggggagaatggaaccaagttggaaaacactctgcaggatattatccaggagaacttccccagtctagcaaggcaggccaacactcagattcaggaaatacagagaatgccacaaagatactcctcaagaagagaaagtccaagacacataattgtcagattcaccaaagttgaaatgaaggaaaaaatgttaagggcagccagagagaaaggtcgggttacccacaaagggaagcccatcagactaacacctgatctctcagcagaaactctacaagccagaagggagtgggggccaatattcaacattcttaaagaaaagaattttcaacccagaatttcatatccagccaaactaagcttcataagtgaaggagaaataaaatactttacagacaagcaaatgctgagagattttgtcaccaccaggcctgccctaaaagagctcctgaaggaagcactaaacatggaaaggaacaaccggtaccagccactgcaaaatcatgccaaaatgtaaagaccattgagactaggaagaaactgcatcaactaacgagcaaaataaccagctaacatcataatgacaggctcaaattcacacataacaatattaactttaaatgtaaatggactaaatgctccaattaaaagacacagactggcaaattggataaagagtcaagacccatcagtgtgctgtattcaggaaacccatctcacgtgcagagacacacataggctcaaaataaaaggatggaggaagacctaccaagcaaatagaaaacaaaaaaaggcaggggttgcaatcctagtctctgataaaacagactttaaaccaacaaagatcaaaaaagacaaagaaggccattacataatggtaaagggatcaattcaacaagaagagttaactatcctaaatatatatgcacccaatacaggagcacccagattcataaagcaagtcctgagtgacctacaaagagacttagactcccacacattaataatgggagattttaacaccccactgtcaacatcagacagatcaatgagacagaaagtcaacaaggatacccaggaattgaactcagctctgcaccaagcagacctaatagacatctacagaactctccaccccaaatcaacagaatatacatttttttcagcaccacaccacacctattccaaaattgaccacatacttggaagtaaagctctcctcagcaaatgtaaatgaacagaaattataacaaactatctctcagaccacagtgcaatcaaactagaactcaggattaagaatctcactcaaaaccgctcaactacatagaaactgaacaacctgctcctgaatgactactgggtaaataacaaaatgaaggcagaaataaagatgttctttgaaaccaacgagaacaaagacacaacataccagaatctctgggacccattcaaagcagtgtgtagagggaaatttatagcactttaatgcccacaagagaaagcaggaaagatccaaaattgacaccctaacatcacaattaaaagaactagaaaagcaagagcaaacacattcaaaagctagcagaaggcaagaaataactaaaatcagagcagaactgaaggaaatagagacacaaaaaacccttcaaaaaattaatgaatccagtagctggtttttttaaaggatccataaaattgatagactgctagcaagactaataaagaaaaaaagagagaagaatcaaatagacgcaataaaaaatgataaaggggatatcaccaatgatcccacagaaatacaaactaccagcagagaatactacaaacacctctatgcaaataaactagaaaatctagaagaaatggataaattcctcaacacatacactctcccaagactaaaccaggaagaagttgaatctctgaatagaccaataacaggagctgaaattgtggcaataatcaatagcttaccaaccaaaaagagtccaggaccagatggattcacagccgaattctaccagaggtacaaggaggagctgctaccattccttctgaaactattccaatcaatagaaaaagagggaatcctccctaactgattttatgaggctagcatcatcctgataccaaaggctggcagagacacaaccaaaaaagagaattttagaccaatatccttgatgaacattgatgcaaaaatcctcaataaaatactggcaaaccgaatccagcagcacatcaaaaagcttatccaccatgatcaagtgggcttcatccctgggatgcaaggctggttcaatatacgcaaatcaataaatgtaatccagcatataaacagaaccaaagacaaaaaccacatgattatctcaatagatgcagaaaaggcctttgacaaaattcaacaacccttcatgctgaaaactctcaataaattaggtattgatgggacgtatctcaaaataataagagctatctatgacaaacccacagccaatatcatactgaatgggcaaaaactggaagcattccctttgaaaactggcacaagacagggatgccctctctcaccactcctattcaacatagtgttggaagttctggccagggcaattaggcaggagaaggaaataaagggtattcagttaggaaaagaggaagtcaaattgtccctgtttgcagatgacatgattgtatatctagaaaaccccatcgtctcagtccaaaatctccttaagctgataagcaacttcagcaaagtctcaggatacaaaatcaatgtacaaaaatcacaagcattcttatacaccaataacagacaaacagagggccaaatcatgagtgaactcccattcacaattgcttcaaagagaataaaatacttaggaatccaacttacgagggacatgaaggacctcttcaaggagaactacaaaccactgctcaaggaaataaaagaggatacaaacaaatggaacaacattccatgctcatgggtaggaagaatcaatatcgtgaaaatggccatactgcccaaggtaatctatagattcaatgccatccccatcaagctaccaatgactttcttcacagaattggaaaaaactactttcaagttcatatggaaccaaaaaagagcccgcattgccaagtcaatcctaagccaaaagaacaaagctggaggcatcacactacctgacttcaaactatactacaaggctacagtaaccaaaacagcatggtactggtaccaaaacagagatatagaccaatggaacagaacagagccctcagaaataacgccgcatatctacaactatctgatctttgactaacctgagaaaaacaagcaatggggaaatgattccctatttaataaatggtgctgaggaaactgcctaaccatatgtagaaagctgaaactggatctcttccttacaccttatacaaaaatcaattcgagatggattaaagacataaacgttagacctaaaaccataaaaaccctagaagaaaacctaggcattaccattcaggacataggcatgggcaaggacttcatgtctaaaacaccaaaagcaatggcaaccaaagccaaaattgacaaatgggatctcattaaaataaagagcttctgcacagcaaaagaaactaccatcagagtcaacaggcaacctacaaaatgggagaaaattttcgcaacctactcatctgacaaagggctaatatccagaatctacaatgaactcaaacaaatttacaagaaaaaaacaaacaaccccatcaaaaagtgggcgaaggacatgaacagacacttctcaaaagaagacatttatgcagccaaaaaacacatgaaaaaatgctcaccatcactggccatcagagaaatgcaaatcaaaaccacaatgagataccatctcacaccagttagaatggcaatcattaaaaagtcaggaaacgacaggtgctagagaggatgtggagaaacaggaacacttttacactgttggtgggactgtaaactagttcaaccattgtggaagtcagtgtggcgactcctcagggatctagaactagaaataccatttgacccagccatcccattactgggtatatacccaaaggactataaatcatgctgctataaagacacatgcacacgtatgtttactgcggcactattcacaatagcaaagacttggaaccaacccaaatgtccaacaatgatagactggattaagaaaatgtggcacatatacaccatggaatactatgcagccatgaaaaaggatgagttcatgtcctttgtagggacatgggtgaaattggaaatcatcattctcagtaaactatcacaagaacaaaaaaccaaacactgcatattctcactcacgggggaattgaacaatgagaacacatggacacaggaaggggaacatcacactctggggactgttgtggggtagggggaggtgggaggggggagggatagcattgggagatatacctaatgctagatgatgagttagtgggtgcagcgcaccagcatggcacgtgtatacatatgtaactaacctgcacattgtgcacatgtaccctaaaacttaaagtataataataataaataaataaaaaagaaaaaaaaaatagagagagatggcatttatagtagattaagtagattttcttttattgctttaatagttcccaggcaccatttgcttttgcttttccaaccagcacaagtgatcagaaaatgattagaatttctcctgcagatgaaattcagattttgcatttgtgctgttttatgagctgagactatcttaagagccaatttatggttttctctactaaaattagatttttaaaaaataaggatatacagcaattggaggatgccattaacaacttgccctaaggcaataatatactgtgtttaccattttcttttttaagaaattagccttaagttgatatcatttagaggagagctatgttccagttcattcaacaaaagcagaactgagacatcttctgtggagtttagcagaactactggagcatttgcccaggactttctcctcaaggtcaggctgtttccagaagccttgaatctcagatctattcattcccaaagcactgcccttttgaacattttcctctcctgaaatttaaacctttaggagctctgatattccctctcttctctctcagcctggagaatcccattagtaaagctgttatcgaatcacaccagagctttccatccagcccagtcctcaccaaagactcacaaatctgaggctatgcaaagttagctcaaaatgtatgtacctctatctctgagccaggttacatctagtgatgcacaactttcaggctaagaagaagccattcttcctaagaagaataacagcattcattcttttcttatcactcaaagcaaggcattatgttgattggttcaatagagattgcttttgtcctcagaaataatgctgtgttgttcctgtccctgaactacaggaacctactggcatcgatttgccgctgctggatcctgcgaacaccatcaccacggtcacggggcccagtgctttcagcatccctctccctatccggcagaagctctgtagcagcctggatgccccccagacgagaggccatgactggaggatgctggcccataagctgaacctggacaggtgggtatggtctggccccaagactagcttctttctgttagtgccctccaggaccgataactattagacgtagggttagcttcatttttttttccatccacacatctatttaatttttcattttgcaaatatgcattaagctctgtccttgtaccttgcactacgggcttgcaaagagtgctaagagacattctgagcttatctggcattggtaagtatcaagttttgtgatgcactttgccaagctgatgggctaaattccccaaatcatatagccattcactaccgtagttattgctcctcctctgcagttgagcaggacctaatgtttgattaataattagcatgccaacacagcactgatattaagttataaagagacctctggagcgtctactttgtggagtgtcaccgtcactaccaaacataacatgtggcatgacctgtcaaagatcatccaagcctggactagaaagaaaacataagtctcttgatttcctgtttagaatatgacccatagacatcttgtctcttaaattatctcactcagagctgaggttcacaaagttaaacatcacatcccctgtctggggctgatctaattaagcatgggctagttatttaggatggctcactgtcagccacaatgggaccaggaaacttaaagacaagtagagagacagaaaggtttagctgaggaaaaatagatatgtaagtcacactgttgagcacattttctctttcccaattacaggtacttgaattactttgccaccaaatccagcccaactggcgtaatcctggatctttgggaagcacagaacttcccagatggaaacctgagcatgctggcagctgtcttggaagaaatgggaagacatgaaacggtggtgtccttagcagcagaagggcagtattaaccaccatgctggaaggggaaatgaaggacaaaaatgcacagggagtctgtggccgtccaggtgaatcacagctgaggaggaaatccagatgagaccaatgcacttcacaggcaagactgcagcaggagccagaaggaaaacagatacaactgcccatgtacatgcccactttactcggacatcatcacgggagttaagaaaaattgtgtaaatttgtaccttgaatttagctatcaacctaattttcctcttagttgggctgtatgctgtgtggtacaggatcttacagtttcctaggaaacgctttttattgctatccagatatatggataaactttcttaacaaacccaatttctacaaatgttgtttacatcaaattggacagggatgcagacactgtccatggctcgttctatttttgttcaaatcatttgaagttgaagctgtggacggtttgttgtgtctatttcagattagtaatttacagagaaatcacagacttttgctacaaatcgtgtgcatcaagtgtctcagataatcctcccatcagtgttctgtttctagaacttgtagaaccagtgttactgtttgtatcagggaagtggagaatctaagtgtaaaaaagaaataactaagactcctattccttggagggacccttctggtgccctttgggaataaagctgtagcactgcagggaagacagtgattcatgttcaaccccacaaacaagcatttttttcacaacatgtgtgtttgtttgtaatatgcaatatgaagtgtttttttttaaaggtattattattatttacaggtattctggtaaaatgatttttttaaatttctatttttgttagcagtgctgtttgttagtatttggttattgactagacctgtcccaccttttcacctatcaaggtgggtgtggtcatcagtttaattcaacatgcatcacttccttgaccttttacctttcccttattccaccccagaaaggtgattgataaatgctgaatggctttgtcagtctgttccttcagcttgctcaggcagggtctttctttctcctctgaggagtcttaaggagacgtgttctctattaagttcacttaatattgccgttgtgtggccccacgtcgactccctatggtgctctactctagaggcagtgtggttggaggaatggactctaaactggagatcaagaaaccagttctcattgtgggtctgtcactgtcttgttgcgccaccttgagaaagtcatttaaccacacgacctcagtgtcctcactagaaagtgaaagggtgggattagatcatctccaagttctgaaatgctcaacttccaccgtgatgcctccagtctcattcatcagtctgaagaccacaatggactctgacctggatcatcatttaaaaatcatcagctggtcttttgcccaggctatgttacgcctttcaagtagttctgacaaggaagatgattattctaaccagcattatgatgttgtttgtttggcctgagtcgctctgcatcattgcattatgctgttcactgagagatgacatccctttattatcattttcttagcctctcttgggatgcccctgcccccagccttcctgactggttgcaaattctgttttttattattgtcttggcatcttgatatctagaccactcctacaagtttatctggcagtaggaacttggtgcatttttttctacgctacacccccccacccttaatctttctttgctgtcataatattcagtagcatttataaaagctgtctagttagctctttaaaaacttttgtcctgcaaaatgtttgttagtcaacacactactttgtgtaaacaactattatgtttccttgggaccatcacaagctctttaacaaacacaaggactcaattcattcagcaggtggggattaaagaatcaaagcccagtagcaaaaccaaaactgaagaacaagcagacatgtgtatgaatcggaacctttagaacatgactgtggtttacttttaggctggaggcacacaagttgctgaacagacttgaattatacatgtgcttccatctttccatgtttccgctcctattttggtagcatcttgagattccttgatgcctccgccatcctcatccctgaggaactgctgataccttgctatggaacctcttctttctttcatgctttttattccgtatcttctgttttggacatacatacatatattctataaaatctctctcagcccaccccctgcattaggatttccatatttaaaatatttgtacactgactggggaagggagagattgcactataaacaagttcagtggatgtttgtagcaatgagtaaaactgtattctaaattaaaaatcaaatatatatacacgcagttatacacacacattttttaaaaggaggaggaggaaagagagctattgtccattcctacattttgaaataaacttgtcaagattacgcatcagtaccagggttgtggaatcatctatggaaatcaagaactagaatctgaactgaatggtcaaagaaacttctatgcctagtgaaaactagaggggagcaactatgtagctatgaacatgaatcaattccataactgttactaaaaacttattttgactaaaaagtcaccaacacagaactattgaacacaaacaggaattgtttgtcttactgaagtcactgagaacccttggggttcacttcagatgcttttttggttcaacttcccaccaccagaaaagggaaaagtgattgatttcgtgtgtgaggtactcatctgtcagaacccttaatgtttcctattaagtgaatgacaacttccatacatacactatttataccaaataattttcactacaaattctgatttccttctcctttggagtaaagtaatagctgttagattgctttcaaacttagaaggtccagatataacagttcatttcataggaagccacttcatcaaccattctatgtgatacatcctgcttctttctacaccgctggagaggcagtttggctggtttcatttggatagaaaaaactatcatttgtgcatgctgccatctagtggtgtacaacacaatctaacctgagtttaatattcactagaatgtgtttgacgaagggaatgaaaacctgtagagttcaaggacctttatgacaaacagatgtagggaaattttcacttcaaatttataattttcttattctcacttttttttcatttgcatcactcatctcaatattaggtcactgtgagcccagtacatcaactcattcatacacaacatatcttcagttgcttcttgtaacagaactatgtaaaatctatataaaacagtctttgaagagttgtcatttttaacacttatggttttcattggggtttgtatactttaaatctccttttagttccttaatatttatctttggaaatgtaagaagtatctgcttagaaagaaataagtcttatatatgcgaatggaatactatgtctagggaagagaaaattggggttgttaatcaaagggaagaaagcagcttcttttctgctgaatttgggaatccaaaggcagaggtttcatcctgtttttattttcttcttatcacactctttcaagtttccttaatgtatctggaaggaatagaagttggattcagaattgataactggcatggtgatgacaaacctgtgtaacaccaaggttctcacagctaacagctgtttcacaaacggcatcttccaaatgaacagtcacctctgctatgcagaaaacccccatcctgctgtgagcaagttaggctcttcaagaactggacaacttttgggtgaggtgttcaatatcaaactgcataatcattagccattttcatatatactattttatagatttaagtctctcaactatcaaaaagtagagcgattttcaggagaaaaaagtcgtggggactgagttcaggacaccctgaaactatgcgaccagtaatttttttaaggtattttttcctacaagtaaggtatctgaaaagtcaacgttttgagggtggaatcaagacttttcacttctcctggcaaagagcaacaaggctcttgtctcgtgtccttctgtgtgtctctgtcaggatcacagcagctgtgctcttggtctgcttactcctctgtaatccacgtatgcagaagggagttaataaggtgatcaccatctccccagaattcaaaggtctttgcctctataaggtctgcccctatggggccaggaaaatataaacctatataaggacttgcaagagagcataaagaaggtagaaaaggtttacttgttgggttttcaagccttcaagttgaatgagtcttagcttttgctgggcagttgttctggacaagtcatcagtttcatgtggagaactcagtgtaagcccaaggctaatgaatgagaggggtcccatggaaacacagctgaaatgaaatgggactttatccatcttctttgagaatggaagagcttttgtgaagcagtacatcattgctcaagataatggttgataagcattagattttatagatctaataaggaaaatattttattatctcaagttaacaaaacatttttttacctctcgagtgcctcataggaccaactattactctttggcttttatttttctttttgtattatttttatatattctttaaccttgctgagctagtattgactgaaatctttagaactttgcctctgggcaatgaagtaatgtttctctaccctaagatatctatttgtataatctctggctgtaatgatcactttggaagatttcctttgcatctctaattatttctttttaatggaataaggcataagggggaataaatatattgtaaccaatgttatgtaaacccatatccatacaggccaggaaagccaaatgaagtcatttccagaattctagtgtgaaaaacctatttttgaaaagtggggagatggctttgtgtagaactgggtgggttttctctgcagactaagtctagccatgagcttccagatcctttagttttatcagccttgtgcttaccccattttcataaatgctactttaacagccagtcttcataagtcatggttcctaggttttcctgtcacctcattgtattcatctgtggtaggatattaacgggctcattcaaccaaatgtaatgtgtgcctcagacctatttagcatggttggggggcatcagcaggacaaaccaacaggtactccgcaagtgtactggcacagcaagcccaccaattattagcagctcttcatcagcctgctgtctactcagacgcttgcctactgaagggacctgtccagagatcttctggaatcccaggttgggaatctctgcagaatgtcgtgacagttgtggcccaactagcttctgagtagaaacaaggaagctaccctgagatatagtcagctgcccacctgccatagtatttgctactgaatgccagccttttaacataccatttcagatttgtccttcaacaaaaatataaattgcaagtcataccatttaagggtcttttacaaatatgtctaaattgtgtgtcatttttaagttccaaaggtctactggactaagtactatcagaccagctgtagaacctgatggcgctgatccggggtggaataaccctcagtactggtgtgtagaagatgaattgtaggcaggttttgctgatcagcagcctaaggattgatgggctctcttttggcctctgatcctgagcactatggaggcagcatcagagaatggggacctgagctacataggttctcaatgttaaaacaactctgttcggagtgacatataagagcaagaaatctacagctggtgtaaaatacctttgccttttctatcccgaaagtaacaaatggcatctgtacatgtaggggtaaaaactcagatgtctactcctccaggccatggacaagaaaaagtacagcagtcagaacagtggaacaagtgatttgcattctcttcttcacgctttcctagatctgccattggtagcgcagccctcgccctccagacataatgcatcgagcccagttgcagggaacatcactgtgtgtgtgtgatgtcatggtgttatatgtgttgagtttaatgttgagctgaagcaagttggtgaccttcctctttgctctttgtaaagaagacaccaatgtttgtcagagaaaaatccccagcagtcgtgttgaagaggcagtgtcatccacctactgtcccctttggaacagttcaactgcagaaaggtcggattgaggttttgtgctttgtcgtttttcttttttaaacaaaacatgacaaccttggcttttccgatatggaacacttttgttgttgtggagttccctcttgctgtatcttctatgcaattccttttctaaaaaaaccccccggcagaggcagagtgccctccggatatctgtccggcgccttgctgagtggtggaggtgagggataccagctccgggtgtgcctcttttctctccctggctgccaatcctgattttccctgcagtccccttggtttgtaaattgcctgcatttattctgtcagccaacatgtacaaaatgtaagaaagaatttttaaacaggtaataaattatatttataagcaacaaagtgctgcctccttcacttaataacaaggttctcttgcgtgttcagagctgccacgtgtttcttcggtgggacagaaaggctttgggtcctgcgtggatggtgatcacaacctcctgcaggcacaggatgaggttttagcatggtgctactaaaaaatcagctgcacactggaatcaccagagaggccttaagaactaacgccagggtcacacctccagagattctgatggaagtggtctgggggtagcctgggtcttgggtgttaaaagctcccgggtggtactaatgagcggttaagggtgagaaccaatgtcttagaacttctgcagaattctctggggcgggagcttctaaatagagtgtcaagccctgcccccagagatctgattttaaatgaagcttgcaaacaactatactaataggtaggaaatgaaaggtaagcaactaccagcagaggagttcagcttggtacaggactgctggccactgccttagggcgagcaagccaagggctccagctgtgaggtgcgaagcagctgtgaggctgaagactagaatcaaagacagccctgtcctccatgagagaacgacctggagacacttccttagatggactgccacctgcccccacccctcccctcagcctccgtggctgaagggtgtaagcaattgcccagcactgagaagctggtccatgccatgggctggaagaaagtgacttaaaacaatccatgctgggatcatgaattcaaatgtttctccaaggctaaggaagtaatggaaatatataaactggaacctgggtaaaatcaaagggagatgtaagggctgcagctgagccagagaactcaaattccatataaaacaatgaaaatacaatgaaaacaataaaacacaaacaaaaactgtactttacatagaaaacccatggtggcaaaggctcagccctgttaccagaccactaacccctaattagaagctttggtagctgagattcctgctgagaaggccttacctaggatggcatgcaagcattttcaaagacttcactgagggcccaacctaagcccctgtctctcagtggaggtccctggagagttctgaagcttggcctccctctgctcctgtctctcagtaccagcatacaggtgccaagcaaagaaccttcagcagccccagagatccccacagctaagctcagatcagaacctagggtagaaattagaaattactttgcagagacaaaacttctgagagtgcagtcatctgtactttgctgctgtgaccagatggagacaacaagcttgcaacttacaaaatgaccaatgccaacaaaataaccttttttcctcagctgagatttactgtcagtatgcctgtgagttctgcgaaaagtttaacttgagcccatgacacacagaagtggggtgtacagaaggtgggagagatgtaccaatagcaaatctcagctggttttaaatgttgctaattgtagatcctgctaaactaatggcaggaagaaaaagcagcattggccaggcacagtggctcacgcctgtaatcccaggactttggaaggctaagatggggagatcacttgagccctggagtttgggaccagcctaggaaacatagtgaggacttgtccctactaaacataaaattagccagccatggtggtgcatgcttgtagtcccagctacttgggaggctgagatgggagtcacttgagcccaggagatcgaggctgcagtgagctatgatcatgccactgcactccagcctgggcaagacagagtgagaccttgtcaaaaaaaaaaaagaaagaaagaaagaaaaaaagaaaaagaagaaagaaagaaagaagggaagggaagggagggagggaaggagggaggaagggagggaggaaggagggaggaagggagggagggaaggaaggaaggagggagggaaggaaggaagggagggagggagggagggagggagggagggaaagaaagaaaagaaaagaaaagaaagaaagaaaaaaaagaaaacagaggaaggaaagaaagaaaagaaagaaaggggaaagagcagtatttctgagcacctgtgatgtacctggcatgggccctcacataattcagacactcatcttattggttcctcacaagagcgcgaagaggtgggaatttacaggtgggaagactgggctcagattatgtacttccaaagaatgaaaaaagtggaaaatggtggaatttaagcaggtcagtctgaattccagcatcaggatgcactcttttgacacaagtgcagctggctaaccaccaccaatctcacgcaaactcttcattctctctgcgtcagacgcaaaccttcctgcactctccactccccagacaattttgggcttccctggtcctgatccaatctccaatggatcccctcacaaaccaaacttctcattctgccctccagggtccacaatgcttggaacaatagccctaacacattccctcccctttcgcagaggtgacaattcaggggcagcagcaacagcctcctccttccacatctcaaatactccacagctgggaggcaggtggggtctttctcatacaaaactgctgattccagattattgcattaaaaactcaatgctttgcatgtcaggcctcccggctcagctggccagcccctctctctgcctctcactgcctgcgtcccttcccattctcctgtggcactggagaattttgcctcacaaccttcctctcccaagactgccaccttcaaaatccacgaagacaacaaatctaaaggccaggatttgggttcctctttcatcaccaacaatgttgcctatgaattaaattcaccccctcctgcgatcacactctcagctgctccccctctgaaatctgaccacagcctctctctcagtaactgtggagataccacctccgcccccgccccatcaggattccctgtcctgggacctgggtttttgttttgttttgttttgttttttgtttttttttttttggtctgttagctcctctaattaattccttccctcctctggtccatcagccccttgatagtaataattcttaccttccatgacctgttgctgcgtttgcatgataaaccagtaccctgaatgaatcctatcttcgttgtctctatacctgtatttgggttgctgacaaaaagataaaaaaaatcataaaccacaagaaaagtggcactatgaatttctgttaatactatagttgagcacttaccacatgcttggtgcatggattatgtcatttcatcttcagaacaactccagatagtggatattaacatcattctcatcttcaaggggaagaaacatcttcaaggggaagaaactgaccacagcccctctctcagtaactgcggagataccacctccgccccatcaggattccctgtcctgggacctgggttttttgttcgtttgtttgtttgtttgttggtctgttagctcctctaattaattccttccctcctctggcccatcagccccttgatagtaataattcttactttccatgacctgttgctgcatttgcatgataaagaggtcaaaatgtgcccagtcacacaactgagggagtgagggaagctggattcacaccaacaggccacctggcagtcccaagtctacgcttggccactgtgccacagtcagcttcaggaagcctaacctggccctcagagttgcccgtaaccatctggctctttccccatcaagctgtaattttccagtgcaattttaaaccttcttcacttctcttaaaccactgacttccctgcctttcccctcactctcagtagatgactgtgtttccttcacaaagaaagtagaagccatcagaccatttctcttgtcctcctgccatgaaatgtgaaaaacttacctgcatctgcctccttcatggtgccttcccacctgctacaatgggatattttcaaagataataaataaataaataaataaataaataaataagcacaactataacataacagtcatgtttttttccaaggggagaatgaagccattttatttaggggaatgttaaaacaaagccatatacaatctgtaacaaatacaatacaattgtttgttccctagtcctgaataattacagtatatacaaaatctgtaaggcactggttcccccaaaagaacaaatgagtcttcttgtgaaacagacaacgaaacccctatattgccaacttttctccaaaaaatatggcattgtttttttgttttgttttacaagaggaatcacaattgctaaattaagtcacttctgatgccatttctttcatttccactgctatgtgtctgggttttctaaggcaatgtaactactgaacatgttcaagtttaaaaaactatacttctctcagtgccgttccacccacaaacaaagaagaatcagatcagaccaacaacataaaacttctaatgaatatgtatgactgtaggaacatgaaattcagtcattattaagtacttgctatacttgactacacaccaattgaaatgtgtcaaagaattccctgtaaataaaatctcagcatgttttctaagaagctttctgtttggggaattcaaaaatgggcactaatgacttttgagcagtgctttccaggaggtcaaaggcctgtttcctcatacataatggtcatagcactctttttgtgatttaacaatctacacacttttataaataaatattatgtttcatttagtactttatcatccataatatcttactctctaatccacataatggagttgtgccagactccaaactgaacataatatttatatatacatatatatttatatatatacacacatacataaactataaacctgaatatcttagcatacaaaacttatctaacaactaataatttaggattcctttgagagggaggggttagaagaaactcttcttagtctttgaaatagtcctgacagtaagcaataaacaacattattaatttctgggttctcatttattcaagtgaaagacaaataaaataaaattcacttctgagccactagaaattttgaaatcataaaggattattgggaaatgagtagtctttaagaacaatttagtgttatctaagtaaagtggattttggtaagatacagagaaaaatctatgcataaataaattcttgtttcattgagcaactataatcgctaagtgggtctttttaagtatctcaggaatgtttttaaaatattaatagtgaataaattagattgaggataggaccaatcttttccaaagcaaccaaatataataaggaagaagtttgaagactattttaatttcttcccatccttcattggaaccaacacctccctagaaatctagcttaatttcaaatcatcacctcctcacaaaatattctgatttgacgttatccacgttcaagtatttaccaaaaagaaaacataattttatctacaaggtaagcccaacctcacttaaatttaggaaaaacccaagaaacaaaaacatgacccacttaactggcataaatgtttacctgttgttttgtagatgatctgtttagaggcactgaagtttctcttcaaggctcagatgattagtcacacttagttctaaccatatattccttctaggctatccctaagaatataactgacacaagagaaaggaacctttacattattattgaggttatttttaatatcaattgaagcagcgttctgattacagttctacttgttttctaactgttttcactctttaaaaacacaattttttttttttcaatttcaaggattacgaaattcttctgtcttagttacaaacaaaatgcagctatgaagcactgggaagtaaatgcaaaatatagaaagaatcttcatgattctcccaaactgtaagcacagctcacaaagtctcattgctttagaatgttttctggatgaacaagttaccagctgcaaaccgacttcagaagtgaggaaaatgttttctcatgtttcatgtagctgtcaaattttcaaaaatcctccatccttcaatcacccagtggggaaaatgtgttataaaacactgccccctggagtattctgggaggaatgtcttaaaaaaaaaaaaaaacagcaaggagaaagtactttcaaattctttactaaccactaacagaatttctaagaagcaaaagaaaaccacagaaaggaaatgtatatgaataaagttgagcaggatgtgtacaactttaaactgtattgtattcatgttgctaaacaatattggccttctcgatgattttattcatgttgctccaaagttaaaaccctgtagaactaagtaggtgaagagatattttgtataagtgccacagaagagaaaatataataaattaaatagtgaattgagcatcactagaataaaataaaatgagtaggcattcctaagatgtgaaatgatcacctaagatatacatgctccaaccatattgattttagaacaaaacacagcagcccataacagtttgtggcctctactaactgtcctctgctgtcccatctagaggttatgtttctctatttttaaaataaaatgtagttaaattagcctgacggatgtttcctctctatcccttatctcagacacatacaaaacagacagacaataacaaaaagacatcatctttatctgtacaaaataaggtatgcacacttttttctttgtgcttctgagattggctcctttgcatatataagatacaagccatctgcacgatcaccctcatttcctatctttgttgacatgttcctcttacaacacaagagcaaattacctctatttgaaagcaccctgtcttcaacacagctcatgacaattttatttaatattgatcctttgaatgagagatcaaaagcatgcacaggtcaatcctctgcacattaaaaaaaaaaaaaaaaaaaaaaaaaaaaaaaagctttctttgtgtttaatgaaaagggttttaccatgaaagagatgcctaactcaatcagaaacagaagtggatctgaagaacacctatcaacaattacttctattagagtcacataaaccttcatttgttccatattgcctgaagctgcaaaaggccacctgcaggaattccaaatgtggtcctagacaggcggtgtttgtacccagtgcattcacattaccatagcggccccaaatgcagggatggccaaagtggtctgaggaggccaagacggggtggggagtatgtttaagatgagttccgttctatgtcctccaacttagactgtcttttggttcacagagtgcaacaatattttaccaatggaaaaacaagtattttaatttaccttccagcagagttcctgggaagaattttgttgttattatttaaactataatactataacccttaaaccatccacattatctgttttattttggcaaaatgaaagcatcttaaaaaaaaaaaaaggcaatcacaaaatacagggctttcttagaaagcaacatgcatcatatcttgaacaagttacccaagcggtttctccgtcctacaaacagacatggatcaatctctccttctgggagcttctctgtctttgcccaggtcgctccctgagaggtgaggtctgaacccactgggaagcaggacgatgttcaaggcttgtactgtggatgcttatttgatgtcttttgctctgcccacaaacagaagagtacctgttggctttctgcagagatgcttacttttcctctcctatcagagtttaatgtcctgggactctgacattttggcaagtgttttcttaacccgcagggctgtcagccttgatgcaggattgtgagcccagcattctgtcatgagttttcccatctgccttagacactgaggaagagaaatgttagaaaaatgtatcatctgcaaggctggcacctgttacaatgtagctttttagttttaggttcattaagtttgaatatatttttaaaaggtacccttaaaaccatgtagaagtaaaattctgtaagcttttttcatgcaaaattatatatgactaaaacagatgttcatgtcttctttgtgatagaaacaagcaggtggttctgctgattgtagaaaggtgtctttgaaattagtgttaagcaaacataaaaatacccagggagtctgtattccactcaatactcccagattgtttataacacttgataagttttaatcttttatctaattccatactatgcaaacaaacacagttattcctaaatcatagctgtctgctgcagtaatagcatcacactgcaccatttaacaagattaatgacctgtgcacagcatcactaaaactttctcctgtggtacatcaattattggtcttcctattgaaaagtacaatttcacttcataagaaatcctcagtgaagagatatcaagtaacaccaaaagcccacaataacagagctccagcatctcataaagctttctgcacagcttgctggaaaacgtatatattatttagcattttagtaaccagacacaaaaccaatgagccaaaggtgtttttgtttttgttgttgtttgtttatttgttttaagacagggtctcggtctgtcgagtgcagtgtcatgatcctggctcattgcaacctccgccttccgggttcaagcaattctcgtgcatcaatctcccgagtaggtgggaatacaggtgtgcaccaacacactaggctattgtttgtattttttaatagagatgggttttcactatattggccaggctggtctcgaacttctggactcaagtgatccacccgcctcggcctgccaaagtgccgggattacagatgtgagccacagtgcccggcccagagattatatttaaatggcttttacacttcagaaatagtgctctgtcccccctttgcagtgctttggtacgtttgataagagcctgtttttttttccagtggtgcttcaaactcatcttgaacattccagtctgccagagaactctagaacatggtgagtttgaaggctgcgagggtggaaggagaggaatgtggaacaggaggaggagtcaggaaaggcaagactcatttcttccttactagccgctgctttccagacctatgtaggtttcaccactacagccttagagccaagctgaaggtggatttgttcaaatcacatctcgtcatccttattaacaaagacacccagcacagtcaggcatcttaactaggtcaacctgtatcactttaacatgcctactttttttctctaatcaaaatgggagaatgctgtacatgggtttgtcacagagaaaaattatgatgctttaaaaacacacacagagaaataataggttttatgcaaatgtcaagacattataaataaagaaaataatgttatttgttatgcaggctaaacactgaccaactcactcaatatattctggaagtggcaaaataaaattggaaaagtagaacaagtaatttaacatactacacttatcttcatataaattactgcaatgaggcgccatcaccatcaccatcaaaaaaagaagaattcctacaatcaatatgtggaattttagctaaaaaagaaaagtctatttagaagtctgtcacagccacatggttacctcaagccttacctcatcactgctccaccggtttgggaatgaggggcgtaacttcttgatgcacacaatctccctcatgtcctcataagaggggtcactgggcactaggtcatgataaggaagctggtattcttccactatacctaaaaatatgttgttactattattattattattattattttctgtgaagtagaaataaaagtctaacacagttctcaaaggaaaagtgctatcagtattacagacaagttcaggcagaaaaatagcaaaataaatcttgaaaaatatttacccaaatggtacttaatctaatttagaaaaaatgaatacaaagcccaatgaaaaatattgtcataggtcttcaagcctttctttcctaatttccaaaagctaagtaaaacaagcatcttaaatttatttccatttttatgaagaacaaattaaaagacaaatctatattaaatctcaatgcaaatctgcaagacatatcctgaactcatactacatgtgactgtttctattactatagtatgaaactatgaatatcataataaattcagaagtgtatcctacttgaacaaaatgtcagatttacattttttctgcttaattgtaggaatgtggttttgcacattaaaaatttagaaaattacagacacccaaaaatattaaccatgaattttttaggttcaaggattatctgatttttttcctatatttatccaaattttcagtaaggaatacattactattagaaaaaatatgtattgttaaaagaaaagaaatataaatctatagcatcttcataaaaatgcacactaaactttcattttattgttcctagtatttaatttctaccttcttcctcttctcctttaaaaatgcaggcttctagtatcttctttttcaccttcttaagattaactccttataataattacattagaggctgctgctctgaacaatcttttgggagcacccctcctccctatcctaaatcatcttttatagaaatatcattgcttttcatctgaaaaagatgatgccgtcaagttggcagattatatatcacatcgttaaattcactgggggcttactctgccaaaatctggggtctgtgttatgttctttcttgtaaactcaaatctgttataaaatcatcaaggaccagaaggttcagaagttttttcagaccattccaactcaccatttgtcctgtgccctgctgtgaccacagagctaattatatgtattatctatgttaatatttcctttcactgtgttttacctccatatgagataagaaaagcacagggcctaacacgcaggatgtgctctgcttcatttcagttctttctccctttctcattctcaggaccatggccctggaaacagcctgaaggcaaagcccacatctctttaacccatctcctattttccgctggtggatggactgatggatggggtggggtaggtgtatctactacaacagacgaaggcagagctcaccacttaaaattatgaattactcaaatctaactgttgaataataggccttattcttttctccatgtcatgtaatcaagttttcaaaatttcctgttagctgccatttaactctgtttgaaacctcaaacctttctgtctttcttctcctttaaaagatggaaaggcctacatctggatgtgtctctttcacccagaagggcctggactagaaagataagcccaaaaaacttctaatatcttcataaagtgttagaaaatagaattttgtgtgctttgcctctctggaaaaataaaatcgcttattgagagcttcctctatcccagttgtggaaacaggtatgctatataaattatcttattaaattctcacaaatgcgtttctgagatgacattattctccacactactcagatgaggaaacttggctctcaggggttaagtaacttgcccaagtccattcagttggtatgggacagagcagggactccaacacctctaacaataaggcaacattatagcaaatctccacatccaaagacagccctagcaaagcaaattaataccctagcacagcaattaataccctgctgtttatataaagctactttgtttttaagctgagaataatttctcctgtatttggcccacaggctttcaaatataggcttcctgtagccctgtttgttttagatgttcaagaaaacataattagaaaaataaccttgttctctacaccttcaacttccataaagctatcttaattaagtataagcatattattttttaaaaggctcgtctacttgttttttttttttttttctttttaaatacagactgggtcccaatctattgcccagactagtcctcaactcctggcttcaactgatcctccccgcttggactcccaaaatgctgggaatgcaaacgtgaggcttatctactctttataatgcgtgaaatcaaggcatagacaatttgttaaattttttggttacttcttctttacacttagaatgagaaatttattcaatatctggttagagaaaatttcctgcattaactttccttttgcacaaaatagttccctcacttcagagagtatgtgttctatttcaaatttcttaaaacaggttcagaattcccaaagtgattattagaaggcactgtgccactgataatgatctttctattgaagtgtgaatgcaggttgattaactgtttcttctttgtatttaaatatgaacctaaagatgttatggctctaccaaccaaaatgaaaagtattaatagtaataatagctaacatgtattgagtgctatttatgtgccaggcagttctcattatctttacattgaaaccatacaaccacagaagcagatacaataattcaattcatctttaagaggactctgaaacaaagaaaagtttataacctgtccaaggcatcacagataaatagcaggaacaagaacacatctcagtactagttaagtgcatgctgcactttcagaatcttcagcaagctcatgttttcatgaagatagacttaaattggccattatgaggaacagcagcagcatcaaggttttttaatgagcacaaccatggaataacatacagaagagttgatacagaaaagccaaagattcagctccttgcctaaaaggtgtcagaatttactcgaagacagactgtagagcaatcaaaatagtacaagtaataatacttctgaatatttaaatatgtcttcttgttcattataattgtttttactagggaatcctcatatgtgtagaaaaaacaatataaaaaaataatactctgatactttaatttccttttgataaaaaactgatgttttcaaattgctttatggggaagttttataaaaaatacagcaggtaagaaatgggtgtccgaccccacatttatggcctactgtcatctctgcagaggaaatcccagggaatggagttggggatggggcccagcagctaggtgagaataaactggcagggacagaaaagggggtttgatttcatcgagcaactgctggaggaagaacccaagacagaaataagacaatacacagagcagaaaacagtgatgcttgaaaaagcagggtaggctgacagtgtgtctagtggcagctggaggaaggaagcagtcaaagattattctaggatgtcgaatataatttcctggaagcactatgactgcatcaacagaaataaaggggaaaataaaaccagatcttatagacagtatgataactttgatttctgatcagaaagaaaggatttatagtagctccaatagtagcttttcaaagacagcactgtttcttacctcctgatacacatctcctagcaacctcccaaaggatgaggccaaaactatacatgtcagccatgatgtaagactggaagtgatttctgttcaagctctcgtccaacacttctggaggcatatagcgtttggtgccaactcgagtgttaggtggtatgtcaacttcatttgtatcactaaggaaaaagtaaagcaaagcattacagcattgaagaggaccaacaaaaacgaatcaaggtgattctgaaacaatggctttagttagtgaaaagtggaaaagaaaaactttccagggaataaaaacaatttcttaaagaatatttcttgccaaaagctatattaaatatttacaggttaaaagccaatgaaaggcaagctgatactgt

SEQ ID NO: 5648 - DNA, 226322 bp, Homo sapiens
  TM4SF9 gene - 99750584 - 99936905 of chr4; NCBI Entrez Gene ID: 10098; Build 35; sequence includes 20,000 bases upstream of initiation codon and 20,000 bases downstream of termination codon of the gene
cttcctatggcataatagattcttatgtaaaatagagtcaatttatgaatctcaaaaacaaaatgtcctagacaaatttttcttcaagcatgtgctacatgttattaatttgctacaagggctccaggaaagtgacagaaacatgtgtgacccgtataaaagtggaggggttatacagtgagagacagaaggcttgcataagtaagcagtttttttaaaaaaattagaaagattccatttttattttacaaagtcatgaaaatatcatgttcatatcagctgtgaaaaaggaacaatgtgacagaatgatccattatcctaggtgtgaattatacttttcaggtatgttttagaatccttttgtcagttaacaaaaataaaccacaaatgctttgatacggattatattaaaccactttcttggcctctaagactctgtgctctccaggttctctcctatttcattagttgccttctttcagtcttctctgctggatcttctttcttgtcccaaattcttcatgttggtgagccccaggattctctctgcattctctccgtcgatgacctcatccaatcctctggctgtacattccatctatctgttgatggcccaacatgtttctatgagtttcatgatcttttagcaactgcctactcaacatcaccacttccacttggagtctaacagacatttcaaacttaacatgtgttaagactcctggtttcaatctccagctcctgctcctttcccagtcttccccagtgaagcaattagcaccgtgatctaaccagtaacttcaggacaaaaatcaagggaccaacctggattcctcccatggtcccacccttcatacccaacccatcagcaaatcttttatgtctatctccaaaatctatctgaaatctacttctggttctttccacccctactatacaagtacaagcccatcttttccagactgaattactgaaataacctcctaactgttcttactgctctattttcccctcacctgtaccctgtctattctcagcatcaagaccagacagctctttaaaaaaaaccttattagatcacatcctcacctggtcaaaacagctaccacaagacttacaccccaaagtcctgttctacaagggcctgcacaatctgccctcacattacctccatcttcatctcccacaggtctccactttacgcactctgctttagcaacactgtatttcttttcttttctttcttttctttttttttttttttttttttttttgagatagagttttgctcttgctgcccaggctggagtgcagtggtgtgatctcggctcaccgcaacctctgcctcccaggttcaagcgagtctcctacctcagcctcccgagtagctgggattacagacatgcaccaccatacccggctaatttttttgtatttttagtagagacggggtttttccatattggtcaggctggtcttgagctcctgacctcaggtgatcctcccgcctcggcctcccaaagtgctgggattacaggcatgagccaccgtgcccagtgcaacactacatttcttgcagtttctagactatatcaggctggtagcatgttggggcctttgcatttgctgttccctctgcaagaaatactgctctcccagatagccacacggctctctcctacactttattcaagtatctgttccaatgttactccctcaaagaccttccctgaccacatcccccttctttcattctctatcccttaaccctattttatttttattcaatgcacatatcgttacctgacactatactatattaaggctttatttgtttgttgtgccaactcctcaagaattgaaacaccaggagggcagagcctttgtgttgttcatgactgtatccctagtacctagcattttgcttggtatacagtgggtgctcaataaatacttgttgaatgtcttggttaaacctacattatttggaaaatatttaaatatttatatcaacatctttctgcccaggaacatagtgtatttttccattttctcaaactttaataaatatatcttaataaaattttgttcttttctttgactatttgaaagacattatgcattaaagctacttctagatgttttatatattttttcttcttactaccatatgagcttttttttaaaaccatctcaaatctgttttagaaaaggtaaactatatatatatatacatacatatacatacatttaaaagtttctagctgattattacaattatattggaatgcttttgatttctgcctatcttactttcagccccttgtgtttaaacaattttcaagttatttatttggacttatagtcatacaataactgtcacaaaataagtatcattttatctcttctttgttaatagtatatcttttgtatcatgtgttattgcattgatcacagctttcagaactatattaaacaatattccttttttgtgcatattttaatgggaatataactaatgttttgctattaaatataatgatggctattggttttaatcgaatactttttcttatatttagtaagtattttttctacttctcctcttaaaataatagtatcagggattgctgttgattcttaccaaatatgttttaagcatgtatagaagcaagtctattcttttgtatttgacataatgattggatgtattatgttaatggctttcctattatttgataacttctacctctctgaaataagctagctgactgtggtgaattatttctttatttactacatttgcaacttgataatatttattttggaaggttttcagcttttttttttttttgagacgaggtctctgtcagccaggctggagtgcaggggtgcaatcttggctcactgccttgacctccccaggctcagatgatcttcccaccttagcctcttgagtagccaggactatgggtgcatgccaccacccccagttaatttttgtattttttgtagagatgaggtttcaccatgttgcccagggtggtctggaactcctgggctcaagcgatctgtctgctttggcctcccaaagtgctgggattacaggtgtgagccaccacacccagccagttgtggatattttatgtctctcagtaagtgctgaatattttaatttagagttttcttgctgctctttcttcctgttcttgtctacctgtcatttcactattaccaccaatccttattattactggcaaacagacagataatagggaggaagctattacttctctgcttcagagtattgtctcaaaaataaaaatagccctgtaatcttcttaacaggtaagaaggaccaggtggtgaatatctacagaaaatggttccatcaagctggattagtggggtgtcaccttccaatatagataaaagcctgtcaagcctctgtttgacatttattaatgggactaccatttgttgaaagcctttgtgtgtgtgtcaggcactttacatgcattatctcagacttcatcttaattctaggaattggatattaatattcccattttacagatggagaaactaaggcaggaaagggctaaataatttgaacagttcaaataatttaacagttcaaatggctgtttgttggtagagctggaatttaaacacagggatcactggctccaaagcccactctctttccatacagcgacaaggctcacagggcagtgctctgaagaagcaagacctcagcaaacgaggagagagaagataagcatgctgcaagacaggatgttatgactgctgcggaagagtcaagcacagtgttactgccattcagattcatttggaaagagctggagagccattgggaaggaggtggcttacaaaggagaggagggtattttaggtggagagaagagtaagggcaaaggcataggatctaaaaagcctaggacatgtttacagaagaaagggtaatgctctttagatggtggattgtgttcatgctgctatgtaatcaaagataagcctggaaacttagattgggttcctattgtgaaatctaagagatagatgaaggggtttgtttttaaaagatagtcagcggggagccattgcagttttgaataaggagctaacaagtcagattggggtggatcataatgggtaaagatgggagaatgacactccgatcacatgactgtaaacaatttatcaagtaataaagggagcccggtttgaagagtggcgggaggaatggaaagcaaggacctggtttaggatcagatacaagggtaggtttactatgtttgtgcagatgggattctggggcacggggaatggcagtcgtggatgccttcaagtcactgggagcctgagtcactggaagaagtgttgggccactacagataagaggatcttggaaggcaagactggttgttggaaaaaaagttgatgagacacccggatagaatgtggttgtttatagaggattagatttggagtcatctacctaaaaatgataacttacattgtagggtgtcatcaatgatcaatgtcttttttttttttttttttttttttttgagatggagtctcgcccaggctggagtgcagtggcgcgatctcggctcactgcaagctccacctcccgggttcacgccattctcctgcctcagcctcccgagtagctgggactacaggcgcccaccactacgcccggctaattttttatatatatatatatattttttttttttagtagagacggggtttcaccgtgttagccaggatggtcttgatctcctgactttgtgatcctcccgcctcagcctcccaaagtgctgggattacaggcgtgagccaccgcgcccgaccatcaatgtcttttaggagagcagttttattaaaggtcgaagggctgacgccaggcagaaattctcaatcctagttacacgtcaaaaccacctctggatcttaaaaaccacatctgttgagtcagaatccccagagtggcagatcagacccttctatcatttaataccaccacaggggatctgctgggcagccagagttgagcacctcaggagaaagggtagaaattttgctgtgagaaggcaagagtgagacagcctcttacctagccaggaagagagatgtaccatctgggtttctctttaagtttcctctttcacatctttcaagcacctcttcgttttgcagattctattgatacctagtgaatactttttactgagagccttctggtcgctttagcaggcattcatctcctcttatcataggctgttaaaaaaaatcagagggtggtagagctagaaggaaacagatgttttaactttctttagcatcggatacctttcagaaaatgaaatcttacatgaaatcctgatgtgtaaacagaccaaagcagaatcattctgagagaaccacagcccagagcccacttacttccccacttgccccaagcaaggactttagagagtccttccagatctcaggatctctatctcacaggttcagtgccaccttctctctttcagataaggaaattaagatttttgagtagtgaaataatcgatcttaggtggcatatttcggttaaatctcctaaatccttatgcagttttccttccttcacagggtgttgtctccccttctgccagtctgacatctccctaaaattcactctccattccgacagagaaaggtacacagggaatcaaattacccacagcagccttggtacaaggttaagtgacagaagaggctgcaactcctgactgccatgaattatgtggtttatctacagggatctcatttatttctgctgctccagttgcagctctctctggtaattctgagtggcctgtaaaatcattatctggccaacggagggagataaaaagccttgttagttttaaagggaaagtttcagtgattgaagttttatcagcaggatgagcacggaaaaacttttttccttatactgatctgaggaaaaagtaatgagacctaaggcattataattgaaaatgagaattgttaagtatcttttttgcatattttatgtgactgtcaagggaggctactatgaggcatatttggccctaatatacttttggcatctagtatactccctagttgtcccaaagctttgtcctggctgcatctcattctttgggaaagtttgtcacaatagaaggaaccacaacttctaaagagaataagataaatttctgacatgaggatacttaactttaaattcctatatttaagaaaaaaattattcagacacttgaaggattcttactaaatcattgcatttagaagatttaacctcttttctcatacatgctattttcttgtacaatgtgcctttgctgaggttgcattcattgttaatatttcgctgtataatcacaggtctagatgggatgataaaaagctagtccattgccttgttactatgcaggcacatatttcaatcacagagactgtgttcatctttttttaaggagacatggagcaaggttttccttgtattaatgccaggtgattttgcaggctactatttagctcacaacttcttgttcaagtctgaagaagagagtagttgttatctccaaattatcttctagcaccctgcaacaatactcatttctttcatttctggcatcattgcaaattttcttcatccatattgtagggaaggtcctgatatttgtgtctgtgaggggactatgctctaactacatccctctgtaattcatggtgtaagtcagcagctaaactggcaggatagaaatcttttcccagagtggcaatcaataaaactcatgagtatcccttcatacggatgcttatcttagcatctagttgagttgaggaatccaactcagattcatttacacagcagtactaaaaactaaaattggaagttcaataaataaatgaataactttgctaagatagtccttctttaatatctgaaaattcatgtttaacagaatgctgcacttacctagctgtttacattttttccctgcatctccctccttcttcctttgatttgtatcagcagccaaagcaattgtggattgaaatacatatgcattgatttccagatttcaggctttgctcctcctccctctctccactgcctttggccactccttgtcctactccatcttctaggctctcagtcacttagctctgtgtattgagaagaggctcacccagactgtgcttagtgtcctggtggctgtggctaaaggtatgtaatcatagtaatggtagcatgccttggatttacatagacttcccagcattctcactttaatcatctccatagaggacaaggtttaaatccacaaacagcaactcccctcaccaagagactagggtgagcactttgaagagtgcttgaacacagtattttccaatattcccagctgaagagtattacctgggcacttgttaaacattcagattcctggatcccaaatagacccactataaatatgaatgcttagagaaaggtcctgggatctatgtttatatcaacagccctggagaattcacatcacaagacaaggttagaaaacattctgctagaaagatgcctattgctctcataggctcagtgccagcagctctagaaggactcaatgaccaaagtgctgggcatttatatggtgccagatttatagtgtcagatgtataccaatagcaggctgtaaggggaggctgggtgctagagattctactcaggctactttcttgatcctagagaggtgctccaggtggtggtgaatcctaagggactgcagagctaagaggaagggacagagtgtcttttaataacagcccttgggccctcttaattggcttggcccagacctggtgtagtctgacccaggtttgcagcttggatgtgttcttcctcccaggaccatggcctgatccgttagtgtaacagtgtacagagtgtttgtctggttcccagagagtcttccctgccctaaaccagagtcttggagaaaagaaggtggggatggaccagctagagtaaagcggcaggtaggaggtgaagttatggaaactgcaaccaggaagcttgcacatttctggggctatacaactcagcaaggtgctaggattcaacatagtactttcatctataggaattaatcatactgagggataagagttcttgttctatacctcaaactttagtttcccttagtggtagtaagtatttatagagctaaattcaacataaaatcttagattttcggccaggcgcagtggctcatgcctgtaattccagcactttgggaggccttggcgggaggatcacttgaggtcaggagttctatgagaccagcctggtgaacatagtgaaaccccatctctattttattttttttaaaaaaagtcttagattttcaatgatcttgtactgtttttacttttagaggataaatgatcattgaattaaaacaaaagttagttttcagttataaatcattactgtgtattttatgcctaataacttaattatgtcactctggaattgatgaatttgaagaaacatggaaaattatattggttatggctgtgaatctagtgatgtgaagatgttggatttatgtatgttaatttgattcatatgcaagtcaaaacacgcatatttttaatcagcaaatggtttaatatgctttccacacttataaaaaatgaaaagtactgcgagctattttttgcctcgtcattcattctgtcaacagtacttattatgaatgtggtgcatttgggtacaaggcagagttacaaaagcaatagaaaatacatcccttttgtaacagaagatagaataaacttaaacacaattttttctcactttatgctttgaggagtgtttctaaggaaaatcgtgtgggtcatttgaacttttatgactcaaagatctaaatattaaaaattcagagctgatttataaccatgttgttggaccttctgttgtcattttttattagtcattcattaatttattcactttttataaaataatattattcacccagcatgtgtgaaatacttgcaaggcagcatgctacaaagaaaacttgatccttgacctcaaagggttcactgtttactagaaaaggtagctgaactattaaaatgaaaactcgggtcatcagcttggaaggcagctgtgctctctcaccgccacagcccaactcacctcagctgtgttgaattctcatgcgaggcttgagaggggccagtgcctcctataagaggacagaagtgaaggtgggctgatttcttgcccaagactgtgtgctggacagtcttccagcttcctgagctgcttctctaaagcttctttgtacctccttccaattagcccagaaactggttccaagccaatcccataacctcccgactctcttgataagatattagtaaaattattacataactttttcaaagttaatttataggttaaatccaaatagcgtttctgctctcaacagcttttgttggggtgttaacgatccattagtgaacaattaagtttatgagggaagcagctgcctgtttaaagggatgcttggataaattcctcagcaaagtagatccttttatatgtaataatgtcttaatttatttttacaattagattttcttttattttagatttgagggttcatgattccacttatatgaggtacctagagcagtgagattcatgaagcagcagtcatgaatctgactgctccaggtacctcatataagtggaatcatacaatatttgtccctttgtgtctggtttatttcacttggcatagtgtttttgaggtttatccatgttgtagcaactatcagaatcttgttcccttttaaggctgaataacattccattgtagctatatatcacattttgtttatccgttcaaacaaaatgtgaaatatgttgatggccacttgggttctttccaccttttggctattgtgctgctatgagcattggtacacaagtatctgtttggatccctgccttcaattctttggggtatagacctaggagcagaattgctggatcatatagtaattctgtggttaatactgtaaggaaccaccaaactgttttccacagcggatgcaccactgtgtttaaattttaaaacttattctctcagtcttgatgtcattcaaataaatgattcagatataaggcattaagacttggttaatttaactaattgttattcctactaactgcatttagtaaatgctactagtacagaaaagaaaaatgaaaaaaatagaaaagaataaattggaagaggtgttttttcacaatcccattttgaatatttatcatacacatatcacactttgttggaactatagcactgaaaccattctaacccatgttcttactcctgtttgtctacttttttccaggtacaatcttagggcaggaaccatggaaacaggtgcattaacaggagatgtgtttttttgtgtaagatgtgtaagtttttgttgttgaatcaattgattctttataataaaacctaaatgaatatctgattaatctgctaatatctattcctgtttctggacattaaattcaatgttccagtaattatagttccatcagaaaggcatatatcacagaagtaaagcttttagaaggtaaaagaaaccaaacggtgacaggagaaattattggatatgattagcatgcccagtgttaaatggggcagatttcataaggggttgaattatgcttaactctgcaaaatacttagattttggtgacagatggaagggtggagtttgtggactggggcatggcattctgaaattgtttggaggtaggaatgtaagggaacatgcaagtacttttgccctacaagaatgaaacaggccaggcatggtggctcacgcctgtaatcccagcactttgggaggccaaggcgggtggatcacctgaggtcaggagttcgagaccagcctggtcaacatggtgaaaccccatctctactaaaaatacaaaattagccgggtatggtggcacaggcctgtaatcccaggacttgggaggccgagacaggagaattgcttgagcccagaaggtggaggcttcagtgcccttgaccagatggctggtagactacatcaggctgctgctgaagtcacaagagtatatgcattcattaacagctatggacaaggacacaggcctgttgtttgcctacccttgcagggtggctgaccaacagcacatcatcggggcattgcaacacttacatgccctgtatggttgccctctgtccattgagagtgataggggaacacatttcactggacaacaggtacaacaatggacacaacaaatggacataaagtggggattccacgtgccatacaaaccacaagctgcgggtatgactgagcaatataacggactgttgaaaaatgggttacgcttgcatgttataccaccgtctttgcggggctggagttccaggctggacctggcgctccaaaccttgaatgaacagccatggaaaggtggcccagccctggtggaggctttgttacactaagccaccacccccatgcagttgcagatacataccaaggatgacctccttcaaccaggtatggggatgaaaggtaacctgttgttgtctgccccaacacccctgatggcaggggaacagaaaacctggctgtggccatggaccctccaagccccccactgctggtggttggccatcggagctccctggggggagggcctacagtatgactcgtatatcactccttgggtgttcaatacatggcccctacagcgggaacagccagggaaggaactctcctctgggggacatgtgtactgtctgtttggcctattatgagctctcctgtgactttggcacagatacaggactcaaaggaaccatggggagttgaggtgtggtaccatcacccagagcaaaagcccttggtggctgcattgttatccagggatgaaagattagcctgtattttgcctgagggatatgatttacctctgttagtacctgtacctgctctgtcatttcaactgtaggttaacatgctctaactgcatttggactgggcccacacctacgctgaggtgaccaagtttccatctgttggatctgcactgcccttccaacagcagctgcagatggcttgccttggcacatacattcagtatctgcagagaactggacatggctggagacctggggtcccatggctgatgtctgtgaggcaacatggcaagctttgaaaaaggatgctgtaagacccacagcacacccgccccctggctggcctgtagtgtttatgatgggtggggctggctagcgggggaacatgcagtaccccaagcccaggtactgtggtacatagagccacattggggcaacacccctgtgggatgggtacccatcatggcctgtgcaaacataatacatgtcaccacactgaaggtatgatggaacgagcggcctcaccaaggttgggccccaatggattttgtgtcccctgggagtttatgggtctgtggggacacagggtggccttagctaccagtgaactggactggacattgcacctgggggtggccttacctgccaatgttctccccaagttgcccagatagctcacttaactgggaggtgctatgttctcggtttgtgcaagtgcgacgagtcccctggtggttctgcctcttggcagtgactatccctggagtgggtgtcataaccgtagaagcacaagttaccactcttgcacagcacaccacttgggctctgaattacacttgagtggcccccctcctgttaaccaatgaggttgatcagattagaaaggtggtattgcaaaatcaaatagccttagacatagaaactgctgcccaaggaggcacctgtgcacttttaggaacacaatgttgtacctttattcctgacaatcggtagaacataacagcagccctgcaaggggtctcatggcagattaacgcagttgagagccttactgatgatcccctgtggagatggtgggcatccctaggctctggcctacactgggccctaatagtcataagtggcatagctgggatcctagtagtgaggtgttgctttctgtattgttgttgtgggttatggattcagggctctgccctatgggcacatgtgcctgcctggaggatgccctaggcctagggggtggagtgtaagggaaatggctgtgctttagtcaggagtaggctgaggcaggcttccggcacagcataactcaatgggtttggagcgcaggcgcatagctccgcacattatgtaaccaagccatgtgaggcacattaggtgatcacccatgtgagcttgtgctgggcttggagccactactgtctgtaaaaggtataattaccctgctaatgctgtacatatggcttgctcacacccaaagagagggtaaagccatgtcaaaactgtctatgattcctttagtgtttttccagctacccaccactcatccactgattcccgttggatctcaattagaacctggcagctagcttatgggaactcggacatcagttagaacctgacagctagcttatgggaccagagggaaggcagaagaatcaggaggctcccaaaggtctcaagggcagcttcaggcttgtccaggggctgcaagaaatgaactccaggtggcttttggtctctttctttgctctgctcagtatcaggaagtaagcttctaattggctgaacttgtgtcatgtgcttggcccctggtaaggtaacatcagggcctaatgccttgatccacacaggtctagctatctccaaagcagcaggaagttgaggtgccagaagaagatggaatggccgaattaaaaaaaaaaatcaattactgctctgtcatattgtgtgaaagacataattcattttattgtacaaatgattataattgattcttaaaagtgaaacaactgtgctctacatatgcttattcaatcatatttacgagacagatatgccccattttatgttattcctggggatctgaaaactggtctttagtaggtatgtgtgggcacagggcaagagggtcacagtgggcggtaaatcctgaggaatcagttaattgttttgttagagaaatagaccatttaactgctcacttttcgactaaggaacagaagatacaatattaattcattaactataacaaaaatatagtttaattttatatcatagctaactaaaaagtattttaagttgacctcatttcataaaggatttgaggtgagaagaccttttgttttaatcagggttctttgatttgaaaatttgagatactcacttcaaagtatctaaagcccaaatgggatgtgatgaatgattccatctaaaaatctcatagacctcaaagacagagtcctctttaaatctagaagcaggcctttagcagggatgggagcctttcagagcacaaaatgcacaaccatacacagcacccaggctgtcagactctgctactgtttttctctgtttaggcttccttcctctttctgcagaggatgagggagagtcttggcttcctcctggaaatgcggacccacccccagctttcgggtaaacattgcctgcacttcagctgggcgcagggttccctttgttactgagacagactctcaggttggcccagcctgaatctaccgggaccccatcaactgtgaagtacaaacctcgctggaggtgggagagcaccttgtggttgagaaggtctgagaaaggggtgggtgtgatctgtcagacaccctaaaatgtttccctgtattgtttgagacagaaacagctagggaagagagggggtggtgggtgtggggaatagaaaaaacgtggtactaagagaaatgcagaaatgctggtggtgattcaagaggagaaaatcaataaaggcttggggcagaacctcaaaaggtgtttaagtcaggatactttcagttgtatgaaacggaaaacccctgtcaaagtatcttaaccaagaaatttgtctcatctgacaggaagtcgtgagtaaggccaccttcaaggttggttaagtcagccatacaacaaaggctggaaggccctggttctttttatccttccactctgccatccttggtgtggtctttgtcatcaggctgtagaggatcgaggcatcacatccaaacccaaccaagtccaagggcgaaagagaccatttcttagatgcaaggaaacctctagcagattcttctcatggcttgttgaccagaattgggccacctgcccattcctgaaccacacattagcaagaggaatgggactgccagatgtgacgcagagggccagtcttcccagagcatgtggctgctttaagagggggacgctgaacacagctgctagggttctgagaggaaggcggcaggaggggtgtggaggcaaccagcagggcggctacagagaagcaaaagaaaaacagagaggagcagagaggcagacaatgacagagcccaagaggagggaggcaggaaggtgggcaggaacaataaagcacaggtggagacagacaagctcgttaagtttggtgtcttaggttaaaacgctgttgtcatatcttgctcctcagccaggcaactattagaagaacacgctttacctgttttcactgccacttgaagagctgattaacttgtcagtagttaaacttattaaccatttttcaacctcagagttataagggaggtggccttagcagtattcagacagaaaatttttctccttttctccttaaaatagatcagcatttattgagttgtgaaggagttgcgtgaaataaatatgattacttagttactttcttacatctttatgtataattttatcttcttaattgtaaaagcaatttaaccacacttaaaaattgcaaaccagaaacatgaaaacaaaatcacccagccttataactgttcttatttggcaaaaattaactcctaactttttttcatacaactgcataccgttttgtagactgctttatttttcaaaacgtgtatcatatacatggtacaaatttcaaaaacagactaaaggggttatttaaaaataaaacatgtctccttcctatcagtatctttagtcccccagtttgccccccattccaccctaactcgctgttaccagtttatttcgttttcttccatagatagcctacccattaacaaggaaatatgtgtatggatattcttttgccaacagagcttatcttttcacaaaatgatagcctactgtgtacactgtttttgttccttgtttttaaaatttaacaatattacttggagataattccatatatagtgcctttaaaatttaacattataatgtatccatatattgccacatactctataagcagtatcttcaagagctgtaaaaactgtgagcaaatgactcattcattcctttaataaatatttatcaagcacctgccatatctgcagagctctggtgattctaagattaccaagggttaggtcacaccctagaaggagtcacagcagattgaggagacaggtaggtaaacaagttcttacaggcagcctttaagtgccgggatggaagaacacagcgggtgttgagggaataaagaaggagcctccgagacattgaacaaaagtagtgaagaataagagaaatcagctcacagacaagagacaaggagaatgccccaggcagaaactctaaatgacatgtgcagaggcacagaatgtgaaggaacattgtggtccaagtaactacaaggaattggatatcacccctactctttgatctttaatttctggccaagtcttcaatataaataatgctatgatatacatcttgcagtgtataactttttccatctgctggggtatttctttgggtagattcccagaagagggactgctgagtcaaaatgtaggagcactctgacctgatatatacagccaaaatgctttccaaatggacatattatttcataaggacaccaacaatgtatgtgctaaccagtgctcattatttttgtatctttattagttttaatgtatacttcatttattactagattaatttccccatatattttatttcttatatgatttattttctgtttatactcaaccactgcgattctatattttactatagctctatgagccctacttataatatagacattcaggtttttatttttcatgtttgctgccaattttttttctggtttagcttacactaaaaaaagctggacacgtagaagtgtttaagatattacccaatcatatccattgattatttccttctattgcctctaagttgagaaatacttctatacagaggtttgacaaatatttttccttctggtctgctttaaaatatatttaactccttaatcctcatagaacttattttggatatacgaaatgagataattcaattagtttttccacccccccctccaaattactgattagttatcttacctttcccttctccattgatttttctttttaagactttattttcttagcagttttagtttcacagcaaaattgaaagaaagactgcatactgtatgattccttatatatggcattccggaaaaggcaaaactaaggagacagggatacagtcaaacttcagtggctgccagagactggggggaggaagggataaataggtggtgtacagaggacttttagggcagtgaaaatactctgtatgatactatgatactatgagggtgggttcatgttattctatatttgtccaaccctatagaatatacagccccaagagtgaaccctaatgtaaactatggactttgggtgataatgatctggcaatgtaggttcactatttgtagcaaatgtgctactttggttggggatgttgacaatgggggagggtgtggggtcgggtatatgggatatccactgatttttatttcaaagataaatccacttagagatcaactcagtcatcaattgcatctaatttctggtccttttgaaatgtgtcacatcagcttaggacagacctttcttctgactcatccagtattcctgcagcgactgttctatttatatacagaattacaacatagctccaataggcttaggtaaagcttgtcagtaccttcctgttaacaaggaaatctgctgctgaaagaccttacttttgaagtctaccagattggtggtagtatggcctgtgttttgagtgggtagagagcacttttgagggagtgaggattatttcatccaaagggctgaagctactgttatcccgtgtcatagcttctgaggtactgaatgagtaggatctcctggccctcccatctctgtgggtacctcgttcatacttgcgacctcaatatagcctcaatcctgctgaagcccagtactatctctaaatgtggtttattgcaggaaaaagtagcttcttgactagccaaaacttgactgccggttgtcaactagccagtttttgagaaaagtgagaggttgttacgtaggaaaccttataactagaggctctcaaactcaagtatttaagtatcatcttttagatttctgtgtccaggatcgggttgcactgggtggtgctggaaaaattttttgatctcacctccttctagccttttgaatccttaaaaatattcccatagacatttatacacagtcctgggcggttcttccttctccttccgtgaaatactggtacctgctttgccaacacctatgaaagtgctccaggaggagggcggataagcaactaatgagcacacctgctcaggtagggttctaaaacaatttccagccacctgttctattcttccccagagttcaaaagcttaatggttcgtgatccaaaaacccaattcagattccccagaagacctccctggaatccgttgtggattccttcctagagttaggaggcaagcaggtttcttaggcactattctgtcggggtaggggggagcgtgcgctgtccgggtttgtgtggttgcaatagaccctagggcgaggatcgcatcccgggccaggactcccttgagccatctctttttcctcgtccccatttctaggataaaacccatttctccggtaggtggggaggttgggttagagtcacacagggattcaggaagctttccttttcaacgtcccatcccttcatcctttcctcccacttcccgtggctcttttctccaccttccccaactacccccttttccattcagcgaagtccacgacgactttccttccctgtccagtggcatcgcatcttctctagccacataagcctgttgtggaggagggggcgccagtgtggctaccctggaaggggtgtcgggggtggctcgcaggtcctcactcacccagccctctccccgaggagcgaccctctcgcccgcgtccctccagagctgcgccgctcatcaatcccggtcactctgccagcctgctccccgggcgcccttccttctccctctcgcctgcggtcctccaccctcccaccccctacctaccccgcagcgacgttcggggtcagcggcgcttggggttggcccgagaaggggcggggataaagcgagcggtggaaggaggcggctacgtggtgccaccgccgcccgggagcgcccgaccccgtgcgcgcgcgcgcctagccaaggcttgggcggcgggcggagctgcgggcggcgcgggcggaggagcagccggccgggcgggcggagcgagaggcgggcggagcgaggggtgggagggcgcgcgcgaacgggcgggcgagcaagcgagcggcgtctccaccagcatctgccgcggccgcctttgcccgaagcccggggacgaaccgacggaccgaccgcctggcgcacggacgcgggcgctcgctttgtgttcggggctagcgtcggcgaggcttgagcttgcagcgcgcggcttccctgctttctcgcggccaccccggctccggcggcctcggcgcgcgaggggctggaggtgcgggagccgctctccgccggtcggtccccgcgcggctgagcccaggccgccagcgccgcggccccgtgcggtgtccctgagctcctgctccccgccgggctgctccgagcaacggtgcttcggagctccaaactcgggctgccggggcaagtgtcttcatgaacccagaggatgtccgggaagcactacaagggtcctgaagtcagttgttgcatcaaatacttcatatttggcttcaatgtcatattttgggtaagttggagcgctcctgggattccaactattgtggccgatcgattcgcgacgatttcccccacgttgttcgttgcctttacttttcgcagccccgcaggcgcttgccggagcagcatagaggcattcgccttccgcctttccagcttgcgcgttggagagataaacatttaatcctttcgaggaatgggaagaggtgaaaagagaaatcgaggcggaaagggggcaccgaggccttctggtggctttttgaggaacgaatagcagggatgcagataaaagaaagggttcggcagtttgagaaatgagcaaccacacgaattggatttgctctcggtgggatatagatgttgggcagagcgtggtgtcataatagggaaggctaatcgggcacggccgaccctgaggtccaccttctaacaacgatctgattggacgagggcttggctccgtgttgccgcggctggtctgtgccatgctcagcgtgtatcttcttgcaccatctcgggctttgtgtaggatgcagatgccgtggtatatggtcctgtaattgcacgtaaataacgtttcctgcacgctctcctcttcagctggaaagcgctccctgtgcgtaatggactggtcagtgggggtgcggggtagagggatttatttgtatgtatatatcatcgtcaggataataagtcaccgtcaacatatatttcagtgtgttcctgccccacgtcctcatttttaaaggagtgacacagagcgggccgtttgggggaacctttgtagaaatgcaaaggagaaggtgtgcgaggcatgttttattggggaaccgagagagcaaatgctttaacacaagattcaaatgatgctctgcttgggactgcaatgtgttgggaacctattgtaattaggctgggacgcctactctttttgtttgtttgtttgttttgattcttttccttgatctggcaaacgtgttcagcagccagacaaagagttctccaggacaaggggaaaacgttggttcaaagaccatgttatttttcttccccttctcatcccatctcatcctcttcctcagtgggcacccgcatttccatagaaagtaaagatggtggctgtctgggtagggggttctctaagttgctgttcagtgtgaggtaaacaatgctccaactgcaggatcaataattatccacagcagtctgaacacggaatgtatttatttgaattctcctttaatttgggctgtttgctgtacgtatatacatctgtgagaatagttgtcaatacggctcttcatattctttttttgtaccgcactcttaccaggttattttattttctgttttctattataataccttgcattggtcatgtatgttttgtgaggggaaatgcaagggattggagaccactttccgtgtcagcatgtcatctgtcttcaggactaataaagataatgaggggacacatgaatggatgtcatatccgatcattccacaggcagttttttgccagtgttgtgcatgattcccgggagcagtcacccacctccctgcaattaaacactgctacaagtacaggaagaaggaattattttctttctttgccccttctccatttgtgaaaatgtttaaaagtggtgggtagccacggttttgagtaagatattctgatttgattggaacttgaaactttgtgacttggagaggcacggactaccgaactgggactggttctttttggggtagtgagttcaggcctcttgtttctacttgaacatttctaaaagttgcacattttagctacccagcaacaaaaagcacccagggactttctctgccgtttcctagcagggggtggtaaggaaataaaaggatttgggtctgtttccctgacagtttgctgtaattctgtggagtgcatagagacaaatttagccctttctatggattaggttgcagcaaaacccctggaattgtagagagcttcaaagaattgcagagtgcttgcttggagaggtccagaacagagccgcatgttttctgattgtgaaggtcttcataggtgggtgggtgagtatgggaagcctgaaaggagacctaggctatgggactaaactagctgccccaggcagaattgttaagtgagtgccttccttatgagggcccttcacttaccctgcctcttgccttcccttcctctcctctctgtgcccaaagccttcctctcagatactccctcatacctttcctatcctgctctctgcctcaaaattaccccatatttaaatttcctgctttattgtaccatggtctctagtgatgatcaacagaaaggcaaccatatggttttggttaaagtaattcagactaagatgttagtgactgaaaagctggggtcagtagcttggcagcttgcttctgaaaagttacacacctctgctctctacagagtcaccaacctgtctgtgattgccaaaaacagcagactcggtgctactcccatacaattatgaagaagagattgccaacagcatggtttcctaattttcattttcacactgaactgctagactacatttgacatacactggtgacattcaaaggtatagttctggtaaaataaaattgaacatatggtggcaccagcactgagagcttggttcttttcctgatcagcagtttggctcttcatcagttaactgcctgggcctcagtttctcagctgttaaattgaaggaggtggatgagttataacgttctttctagttcttacacagaatgagtttcttgagttccaatatgctggagaagaaaaatagaagagtttggccactaatttataacagaagtagtatataccaggacacgtgataaattatagacattttctgttagggagacttgtctgaagactagttttattactttcatttcttcctcaaagatcctttcataaaaaacaaacaaacaaaaaacaaaaaacaaaaacaaaaaaaaaccaaggctgggcgcggtggctcacgcctgcgatcccagcactttgggaggctgaggtggacggatcacaagttcaggaaatcaagaccatcctggccaacatggtgaaactctgtccctactgaaatacaaaaaactagccaggtgtgttggcgggtgcctgtagtcccagctactcgggaggctgaggcaggggaatcacttgaacccgggaggtggagattgcagtgaggcaagatcacaccactgtactccagcctggcaacagagcaagactccgtctcaaaaaaaacaaaacaaagcaaaacaaaaaacctttcactaatttcttcttggcttgttcagttcctggtatagtgtccgtgcttctctctccccactgtgaatctcaaatgtagtcctgtgagtcattaaatatatttttattattagaattacagcttcatgtataaaatctgaatccttttatataacagttgtaatgacattctgagtaacaaagtcaacatcttgtacagattcctttctcattagttatcacaggctggtgggggaaaacttgtttcctctgttatatattggaacaattcaagacagaagggaattgattttattgagggtgtcaccgtactgggacatttctcagaaaaccctgagactgctttgggtttgggggagggagaagaaagaggattttgttttaaagtcatttctttggggtaccgaacaccacatcccatcactcatcattaatagatgttttgcccttttggattctggcttttaactgttttggattctggatacttaactgttcccaggcaagtaaattgatctcaatattctggttatttattgctacataacctccaagcttagttgtttaaaacacagttgtttattattatagttcacagttctgtgatttggccaggctcatctggacagttctcacttggggtctcatacagttgtggtgagatgtagttggagttggacttaccggaaggccctctgggcaggatgcctgagatggtatactcatatgactggaagctgatgcttgctgggagcttagccagagttgtcactggagcacctacctacacgtggcttcttcctgtctctaagtcttaaagaagcttccagccagttaaggttccacttagaactggcagtgccacttttatctattccattggttagagcactcatgcagactgctgaatttcaaagggtgaagaattagaagccaccttttgatggagaagtgtcaaggtcacattgcagaaagtcatgtaggttgtggccatctttgaaaaatatagtctactgtattaaggcactgagccttaatttcttgtttataaaggaaagataacattaatggtgttgtagttttaaagattcagtgagataatgttttattcggcataatatctcaatatttaacaaatagtgaatatcattactgttgttgtctccagattttatactggttccatacagggctatagaacttctagaatgccttagtctagtactttggcatcattactactaggtaatgataatacccttaagatctgccaagaagatgaggcaaatggattcaatagattttatagtgacttgttaggaaagaactcaatggaaacggtggaatgatttgggagaaccaagtcatttttctgttttctttgctacaaaggattagaaaagcctcagttacttgaggccaactttctcttttgatatgctttcagatattaccttgtgtctttaagtgcaagtttatccagggttgatggcaggatcttgcctctaatttgcttccacagggcttaattcagagaggagggagactcaggaaaccttggggcggtgggggagggggggcatcaagtaggaagctttatcttatgattcactataaattgcaagatgttctggaatgatgatacatcagcagtttataagtcataatttttgttttaatttgctagacatctgttagcttcgatggcaaccatatgggaatctaaattgcgttttgaattacagggagatggtaggaagaaagctaaatatggttatgaaagtgtcatatgggaaaagtgtaagaaaggtataaagtggggaaagtaattgaatataggcttgcttagtgtggccactccctctgtggggcagtatgaaggcgcagaagcattctcacttgatatactccgcagattgaaatgaagccaagtggggagaagttggaaaaccaaatcatgtttcaaccaccataaacttgccaaaatgttgcactcatttagatgggtcactttgttttaatgtccacagtaataggtagtccctggcaaaaggtgaaagcaatctgcatttttaacagaacttttcactaatgatgtttttcttgtaagcaccccaaagagtcttccaagaatattatatctttgtgacagatgaagaaattggagtacagagatgtggagtaacttttgaggtgttgaagagcatgtcaaggttcagtttcagagtgttaagtctcttccgtaatgatagccccagctttttgggtggagacttattttagaagatgcttgttattctaaaataaaacatcaagtaagtcatttacatctgttcataatcgaaaagtgataaagtttttgcatatgccacaattaacaccacccacaagcacaaaaaagttaggatgaaaatgttcttcaagaatatggtggaataattgtagcctattgaaaattcataaatgaaaattggagtattgtagacagcattcttgaatcacatgtttgtttctgtgtgtaatactgatgactgtcttaaaatttctaacttccaaataaatcatactccactggattataagggcttcaagtgtgggggctgtctcactttcataagcccagtgtcttgcgcattgtctgaaacacagtagatgttttgataaacgtttgggccaggcttgggggcttacacctgtaatcccaacactttaggaggctgaggctggaggatggcttgtgcccaagagtttgagaccagcctgggtaacatagtgagaccctatctctacaaaaaaaaattaaaaattaaaaattagctgggtgtggtgatgcgtgcctgtagtcccagccacttgggaggctgaggtgggaggatcacttgagcctgggaggttgaggctgcaactgcactccagggtgacagaacaagaccctgtctcaaaaaaaaaaaaaaaaaaaaaaaaaagtatgttgaaggaaagaattacaaaatcatcagaaagtacgtaggaatcatctcctctaacttcctagtcagtgaagcattctccattgtatcgtgcctacctttctaagcatggatctgtttttggaccactttaattgtagagtttcatctgttcaaactagatgttatctgtctccccatcatttccatcctcctaatttactgttcatttaaaatttttatttggaaacattaaaccaataggaaaattgcaagtagtatagagaacctgtttttatcctgtttgagacaaagttgccagcatgttggctatcacacaaacagttgagtatgtattttctgtaaactggactattctcctagatcaccacagtacaaccatgaaagccaggaaattaccaatgatacattaacaccatttaatccttagatttcatccaagtttcccagttgctcccataatgttttaaagcaaaagaattcaggtcagaaccacactttgtatttagttacatgtttttagtctctttcagtccttcactatcatgctcttgatacttttgacaattataagccagttattttgcagaatgtccctcagtttgtgtttgtgccattttcacaagcttagattcaggctgtgcatctttggtaggaatagtacagaaatggtgctgcgttctcattgtaccctatcagggtggcattgatttctgtttgtcccattactgatgatggtcacttgatcaaggtgttgtctgccaggcttctctaccatatagttactcttttctcatttgtaatttataaatgttttatggcaaattacattgaaaccatgtaaatagcctattcctcatcaaattttcaatctgttatttatttatatcagtaagaacttagtgtcttccttttttcagtgtggtttaatgttactgtcattactttatttaaaatggccctaggtttggccagtgcagtcttttcacattggctcctgtgctcttttaactcccatcagtctttgagcaccatcttgctctctggcagaataagatgttccaaactcattttgtgatttacctgtgtcatcttttgtatcagacatttctccaaggagctattgaatggagaatggaatttagaagccaagatctggttgcttggtgtgctcattgctattagggtgttgctactctgtgtatatacagacacacatgtacatctgtaattctgtatctatgtacttttaaaaccatgagtttacagtcataccttaaattcctgtctgataccacagggtttagtttttcctctccatattttataactgctttatttgacagtgagattcttggttcgcattattcttaacagtttacttatttggtaaatctccccatatgtaaccaatcttctgcagctgccaccacctttcctcctggggctgccctcctcagctgttagtgctctagcatcctgtgccaccacccccatccccatatggatacctttctccctgagataccctgctctgggcttccacagcatccctcttcctacgtttttgtaaacgtaggaagcctaccagattggacctacctaatggctttgaattttcaggaaggagaaggcgaagagcctcggctactcttgaatgatgtaaaataagacttatcttccttccccatggtccttcattatttaaaaatagccattatgtcattcctaaacattctgttttccacctttaaaagctcctagttcctccatgtgtttacactaatgatgtttttcttgtaagcatctcaaagagtcttccaaacatattatatctttgtgacagatgaagaaattggagtacagagatgtggagtaacttttgagatgttgaagagcatgtcagggttcggttttagagtgttaggtctacatatactgtttccagattgttctttgccctggtcacggtgctctgcctagggtcccatttggacacacctctattaatgcagcaaccagaatgaaacacgttgttcacaggcttttctaaccatccgaagagcagcaggctcttgaactctcccttcagtccctaggctgtgctgtgcctggtggcagaagcctctgctactgtctggaattgactttgagtaagttactttcacagattagttcctcagttgctcatctaaaaaaaccaggaaaataattttctgcaaagttgttatccagtattatgtgagatcatgcatatcaacgtgcttcataaatggtaaatctctaaatacaaatactagttattaacccaggctaaactgcacttgctttccctggcagccaacgaacactttggcttggattgactttttagtgaaataaaaccttcactttttcaagtgaactctattaaaccatccccctaagctatatgctaatcagaagccctaaccctccagttaattatttgaatttagatttagttctgtttatttctcccatttaaatgtcttattctggcccattggatttcaaacctgctaccagcaatcctaggcctccttgaggcgtatgtgggtgggtgggtctgtgctggtggggtgtggactgagcagtacctctctttcctccagaaaagcttggttattagtttgatattttgggatactaagaaagattttgcttgaaaaaaggggtcccaccacttaagaaagaaaagaaccagtattctagcctttagatgtctttgaatcttgatggccaaagtacatttttaaaaaaattactcctcgtgtgggtttttatctcttggaatctctccatgcatgggaagtccctctcactaactaggggtcacttctgtaggattagttgatatttcacccctttatgcatgtagtgtggcagcctgattagtaaggaaatttcagtcttcccactgggagatctggttcagtaggtccatccaggatggggtcctggaatttctgttaagaaaaaaatcaaaacttcctgcaggtcattgtgatgcccagctgagtttgagaagctttagcttgtttttcttgggaagatgtggcctctccttcccgttgctccctggaggggatgtgtgggagagctgggcgtgggtggtgtagagcggtgaccatttcaccagcacatgaagctagtgttctttgcttacgagaaaaaaaaggtggcctattttatccctcatggaattttttattaatccaaaaacgccagtttatttttaaacctgaaagccctaaaaacaaaatgagaaaaatctcttgaaagagaacctctggtgctgcaactagtttgctagcagttagcatcatatagggctagaagctagccatttattcgataggcacagtgaagagctagacttctggttcctttgccctgcttgtcctggaccactctgcgtgtgtcagtgcagttgagtagctctaactacagacacttaacaagggcagaccaccttctccttcaaaaaaaatcagcctccccatccactgttgctgttcctttcagcctcccttttctggggctttctcgttggcctccagccctgactatgctcagtttgtaggaggggagttgctttctgcgtcaaggtctgcatgacaggttcattgaattccctctgctgtaatgctgtggaggggacatttcttttcccatatccaaacttgcagcactgtcacaaagacagttgacaataaagcaaatacagaagacccagacatgatatttgccagtgttctttagaaagcttcaatgtggaatatccgggttatgcctagtgttttcctgttattttcttaactttcttttttccttcaccccctttgaaagttagatctttgattacggctgggttcctaaagtagaaatcttgaaaaataacattttgaataaaactctgtattatttctctgagctgttttactgggtctaacaccactccttttttttttttttaaacaaaacaaaacagaaaagccaaccaaacaaaaccaaaccagaatggtatgcaaacccaatggttagcactgtgatattatccatatgtacatagaggattgttagttatgaatcacaaggtataatttttaagtaatataatcactaagcccaattacaaaatggtgtttttgtggatggcaaaacatctacaaatggcaaaacattttggctctcttcattggaagggaaaagtgatgttctataccacttccagctactatttactattttgataagtattagaaggcatagggctctttttacttgttggaaaatttttctaaattacacttggcactaaggcttgaatttctaaaaatctggagggaacagctggtgctctaataaatattcaggccagctattttaatgcattgtactcaattaagtagtcctaataaaagaggaatacttgacttaagcatttctcaaagcataatgttgtgcttccaacaaaaatttcctccaactgttgatatttccccccaagcagccttaacatttaattctgccaagtaagtaatctaatcatggatgatgcatttaatgccaaaagttagttctcttttaaggtatagttgtatcaatgtggcctagccctttaactggagactccataggtcactgaccttttagaagaattcttcgtctggttcagagtgagagagtattgaaagattcatcctaacttgggcattctggtacccttgtggtgggagggcagaaagtctgctgttaaggagtttagactttgagtgtgtctggatttttacccagctatgttcccaagcttgtgaccttagacgttacttgcccaccttgcagttaagtctccccttcatctgcaaaatggcacgtttagtagtattaatattattaatagtagtattaagataacgtctatctcggaatcctgaggatttgaggagttaatatgtgtaaactgcttggaatagtcaataggtattagcaattattatactgttttcctcataatttattttgattgttttcccttctttcagaatcattaaaataatcttacattgtaacatatattttttgttctctgtaatattctgcctacataagtgcattctcaaaataacttaaaaggaaaaaaagatctaacaaatgttcacagtgttcttttcattgtaatgagtggcacgcagttcttatcgtggataccagaccatgaattcgcttctattgtttgttgttaattttcccttttttctttacccagttacattcactattttctttgcaaaatcaaagtgtctcctattagtattttgtactgggaagttgagtttctgatggatagctgtggtggtgttaggcctaacacctgggtggggtggggaggatagataccctttgtcaacatctgttaaatctgggcattctggaactatctagatggctgtaactaagtgtctttagttctttatggtatcataaatcctgcatattttggtcatttttttcctctatttcagacaaattcttgaggtcatgaaggtgaaacttgagtcagtgatcctgataacttgggttttccccttatatgtccttccagctgatgcagagctaggattttggattgaactacctggatcattgactaatcatcttggtgaatgagagactcactggcttctcctctagggcataatgggatgcgatgagagcttgtgcttttttttttgccacctgtactgtcccctgacacaggagacgtgggctgtcacatttccaagttgcctcttccatataactgggctcagctctgagaggaaggccagggcgtgctaaattagtaggtgcctgtcactcattcccatgcagaaggcatgctgaaaaccccagcccttcaaggggaagcaggggataaagggataagtctaagtagaatttttactgtagtttttattagtaaaaaagaatgatatatgtagcacaacaggaacagaagcgtatttaaagtcatctctagcttaccagaaacacccctaaaactgctggtttagattcattaatcaacctcatggtcctcagatgggttgtgactccctgttgcgtaaacacgaaccatgttacttcctggtcctcctgacctccactagctgatttcagcgaggatcaggagttaggtcgccagctgatctaaagcagcgagtcccaaagttcagccatttgtaaaccacctgcatggttttggaccaactcttgtgtcaccccatagtttctcagattttaatatgcatacaagtggcatgggatatgttgttcaaatgcggattctggttcagtaggagtgagaggggacaaagatccagtacctttaacaaatgcccaggtgatgctgatggctctggcccactgatctcactttgaatctcaaagatatagtccatctgaaacaatcttttcttttaaattgactctgattttaatcttaaatacatatatttaaaaaggaatgtaaaaagtatcactattcaaatgcatataatgacaataatatgacttactaacttctaggtagctattattggtgcctgttggtaagcctgagtcagaggcctcttttcttttgttataatggaggttaacaagtgtagcaagtgttcgacattctggcatcaaatggagactttctccttaactagaccagaggatgaaaagatagttgaaaaccagtgactttatattgaaggatatttaatgccacgttctaaaacttctcttctggtaccccaagtcaccagggaatcgcactttggggaacacttgtgcttaagtaatttgcagcaaggcatgcatttataaactgaaatctattagtgaggtggatggatccctagaggtaaaatgcttggggaatgtgtttaaatgtttgcatactccatgttctgttttctgttgagagtgtgggagagaagaggggcatcccccatttctgaaaagttgctaaccctaggcccagtgagtagttacatcttaggtatgagaaggaaaatgctttgggaaattgtatctcaggccagcaggaagtcaactttaaatgcttaggaactgtatctcagtgggcttcctcctctcctctttcaagttactataggtattgcttatggtcagctttggaatgagtctatttacataatgcattttaaaaatagggtgcttttcattgttcaatgacgagttagtgggtgcagcgcaccagcatgtcacatgtatacatatgtaacctgcacattgtgcacatgtaccctaaaacttaaagtataataatttaaaaaaaaaagggtgcttttttattccaaaaatacgggaacatcaatattgcttttttaaaggaaatttactacaataatattttctttcggttcaactgtattaaaagtggaaactcttcgtcaggtgctccgagaacagtgaacaaacacttcaaatgaaaaaaatattttagagtttcagttgtatttccctatgaggccttgaatttagcaaaccttagttaattaactttttaaaggaaaaatgtgctcttacattagtggcttttaagcatttcttccgactttaccggcctttcccccttaggacaacatttaaaataagtgttttcaacaaacagagcaaataccttgtgaataaacatcaatttcacacaaccagaaaaaaaaaataaatcaataaatctcctttaggcatttgaaaaactctatactttttaaaaagggaggagttgtaattcagtaacaggaaaactaaaccccaagaaaccaggctgttagttttagatgtttttcagcatgaccttatggaggcagaagacgggctgggaacttcctgagcacctgtttcgttattggtgccctacttatccaaggatgggcaacaactgcccacagggcaactcctgtgagaaagcctactctgtttttgtttttaatctcataactggaatcctagggaaaatagtgttttctttggtaccaagttcttttggcttcatctattgggttttgaaagaataaactgaatgaagagctgtctagatgatacaactatatgtggcattttcatattttttcctgaccctgcaagattaataatccctaatattctcactatatgctttgagagttttgctgtccagtgaagatttgaaacaattgcacaaaaatttgaaaacggtgttttacttgtcatgtttaaagatacagagtcactattttagaagtgaagggataggggtctcaaaacaaattgaaatatattttgtgaaatatatacatatgtattccacttaaatataaaatatatagtaccaatatatatccttgatgcttattaaatactgatctatatccttggactttttaaaaaaagtacagtcatgtatcgcttaacaacaggggtatgttctgagaaatgagtcatgggatttcatcattgtgcaaacattgtagagtgtacaacacaaacatagacggtgtgtagcctactacacacctaggctgtatggcataacctgttgctcctggaccacaaacttgtatagcatgttatggtaatgaatactgtaggcatttataacacgatggtatttgtgtatctaaacatacacaaggtacagtaaaaatataaaagataaaaaagtggtacaccaatgtagggcacttaccacgaatggagcttgcaggactggaagttgctctgggtgagtcagtgagtgagtggtgagtgaaagggaaggcctaggacattactgtacacaaatgcagactacattaacactatacttaggctacattaaatttacaaaaaatatctgtcttcaataattaacctcagcttactgtcacattttattttattaacctttttttagcttttttactcttttgtaataacacttagcttaacagattgtacagctgtacagaaatattttctttatatccttagtctataagcctttttttaaaaattattttttatctttaaaacttttttgttaaaaatgaagacaaaaacacacacattagcctagacctatacaggatcaagatcatcaatacatcactagacaataggaatttttcagtttcattagaatcttatgggaccacagttattccgtcattgattaaaatgtcgttatgtagtgtgggactgtagatatgtgctctctttggagaaaaaaaaagagaaactacctaaatgaccgtatcacctctaaatattttcattcataagagactaaaatttctttactgtagtatactataaatatgcaaactaaatgaaacttgttttaaagttaaaagctggagatccattttagaaactaacacataagcagaaaaaaaattttgtggttattagttggaggctagaaaagaaactctttgaactatgaagttactaagtcttagctagagaccccaacaaatgattaattattgctaagaatcttttaaaatccagttttaaagtttaagtgttgtttctgtggaatttttccctcacctgcccccttctttctgtgattctaattccaaaattgagaagacagagctttttacttttagggaagctaaacctctttcttgctctaagaaggttgacctgctgatgaaagaacagaaggttggaattcttttgagcaggaatagctgtgcaaatgcttatttcattgttctttggccaatctttttagcactcaagtattagaactatgctttaattggtcttttgcagccctgattgtataatcttaggatttatatgttgaaagagaccttacaaataatttgggtcctagtttttactactcactgttcaacactttgcctacccttttcatagtggaatcctttgttttcctaaccaaaattttaagcaaagaccccagtttataaaacaaagaacagagcttctcttctgggagcccagcatctcaggtgcctcagctgtgttcttggtatcactgtgtaggaacagtgtgcagaggggacagtgggagtcctggtggattttacccatgggtggagtttgagctgagactggtggagaaggcatctgcttaccgtttatatgttgaattaggatgaagtcggcacttggcctgtgttctttgtaggatgtgtgcacgctgaattgtccaagttcccaagtcccagcactttgactgtatttggttccactaaatggttttggcgcagtcgttttgattaacatcaaccttgcttatgttaagtaactattcaggttatttattatgcattactctcatgctttggaatgagcagactcaaaaacttctgcttcatatggattccatatgtggcctttaagttagcagaaacacaaaggtttccaattaatttgcacataaaattgtatattgagtaagttaagcttgatggcataggcattatttgaaattctttgtcatctttaatatttttatatttcatttaaacaagttattaggtgtttgaaggttctgtggtgacgaacataacctacacattcacatatgtcctgtttggtttttttgttacagaatgcaggtatccatggaatttattttattgttttatactgatgagctccagatagtaggagattatataaaaagaggggatatttacttttttatttctgtgatttaactttttctcccctcctcttcccaatgctaggcagagaatattacaacatgtaagacagtggttaagggtgagactgcctggattcaaacatgggccttgatatgtccaagctgtgtgaccatggatggttacttcatcactttgaactactccttttgggcaaaaagtgggtaatattagtggcgacctctaggatcattgtgaagattccatgagatgatgtacatccaaccctgagcactcagtgaatgctgacgtgataattgagggaccagtaggtgacccactcaggggagttgcgggcttttggttcactgtcacctgggaaaaggtgttgtcagtgtccggaccctcaactttccttgttagaaaagtgtaccctgtataatagaacttgtcactaatgccaggctttgtttcctttgtcccccacccattggaggagagtgtatctccatgctttcctttggcaactggatctgagggttttctcatcagagcagctgccatgttcctctcctcctgggctgtaatttcctctcctgtgtagccatagctgtccaccacgtccattcctgacatggcctggccagtccttcctttctggataacaacgccaacatttcttatgtcttacctcagggatcattttcaggccacagacctacctgttttgttttgtttttttaaaatggtagtatctacagaacattacagtttccgtaaaatcatgtatataaatatgcctagaaaactacctgaaatatagcagctatcccataattactaattgaaatacgttagttgaatctgaaataaatttcttagcctaggaacaaagttagcatccatctgggtctctgcaaaaatttgtaatgtgtaaaaataggcatgtttaggaagttgcttaatttattaatatatacttcatttttatggcagttacagattctctaattgaatttatatttgcatgattacagttttttttttgttgcaaacgatttttatgggctgctgaagtttaaggagtctggcattttaaattgttcttcactgtctgagaagtaaaaatatgtcttaaaaaatcattgatgttatagtaaaggaaagctccctcccttccctaagttagtgcctttcagaatgtgagcatttgtcaagtggaattctgtctgatcctttttcattttctgagctattataagtgctttcttttcctttaactgtcataaatggtttttcttcccttaactaagtaaagatttctggaacaatgttttgaccagattgaaaccagcttctgtcctatctactagtcattcatttcttgatttctcgtgcatttctaaacatagataagtttctaatggtgaagaaagtgaaacagaaaggaaggaaagaagcaaaagctgggttgggtcaccatattgagcgaaggatatgcttgtggggaatcctacactgtgatattggagtaaacagttacattatggggtgagaccaggtgagatggcttatgcctgtgatcccagcactttgagaagctgaggtgggaggattgctttaggccaggagttcaagaccaggctgggcaacaaaaatgagaccctgtctgtacaaaaaaaaaaaaaaaaattagccagtcacagtggggtgtgcctgttttctcagctactctggatgctgaggcaggaggattacttgagcccagaagttcaaggctgcagtaagttatgattttgccactgcactctggcctgggcgacagagcaaaaccttgtctcagattagattagattagattagaatagatagataacatagataagatcagtgtttcaaaatccttttccagtgagaggcatgtactgctgcttttgtaacccatgacattgagagtgtagcagggggttcatgtggaggagttgctgagaccaagaaccccgtaaggatagtcatctaagtttgggaatacacacaaattgttgggagacacttctccatgggtctcttgtgctcctgcatgtcttactgagtataccaagaacgttctttacctgggccatttcttcgtgttgtgtttgcaatgagcagccttgagggatgaagtagtgtctctttctgggacaaagactgacctactctcacttactgcttactataaagcagcaggtttcccaagcataggttcctcagctggatgcacgctcactgcatgtgcagctgccatctgggcccctcaacgctatttccattggactgatgtaaacatgatgctggtgttgtctgaatcatgctgtgaataataaagtcctttgtccttgacccgggaatctcatgtcttctgccagcttctatgaaacagtaacaggctaacttattaccttgcgagtagggtaaaatcaaacaagaccagatacaggtggagcttccagatgagctgaacatgtggaggttcctgtagggtggtgctctagaaagggcatggaagcgccatgtcccttgccccatacctttacctgtgaatctcttcatctgtatccattgtaattttttaaaataataaactagtaaatgtaaaataaccaaaacaaagaaaccaaatgccggtgtattacatataagttgatacctagccagttaaatgcgttcagatgtgtcttgtttaggaggtaatcacccgggcctcccccacaaagtatggttcaaagggtcatggtgggtggctcctcagagcatctcagctcccttagacctgatgaaggcttcacaggcatttcatatctgtgcctctggccagtatatctccagggaactgagtgccaagggagaccaaggcatctttactgacattgttgtaccttaagtgaggcaacatgtaaaactgtgacacatgggagtgcttgatttttgagcgtgcggagcaacagggtccagtgttatggtggcaggggcaggagaactcatggcatcaggagcgtagacagccccactgggcacgaattataacccaggcagaggcaaggcgcaagggtggtcagacatctggccctgaaataagaagagacaggtgggaaagtccaggccaagaccgtggagcagagttaagaaggagcaggaagagccgatctcagaaacaggctggctctgttgaaattggactgaggcagataatttctttctttctttttcttttcacctttcagcactgttggacatgaaggaaagataatttctaagtttactttttgatatttatagataaaatgctttcaagcagttaaccagcctattggagagtgacacttagatcatcttgaagttggtttgggcgatttagagaaacatttataattaagttatgcagttaatgaaagccaagtggggacatttgttcagaacaattgtttttgtaccttttctttgtgatagagctgtaaaagtgtatttacttgtaaactgcaacaagtttttgctccttcccccatcaaaagaataatatatctatataataattaggcctgaaattaagattctagatttaaagaggactcccagggctcaaatataggagataagatgttgaaacaccactcctgttgtttgcaaaatgaatattaatgacatttagtcaaaaccaaattctaaatatttaataatatgtgaaaattattaactgcctgtggtcatcagttgagacccatagttactgctggaatccagggatacagggattaaaaaaataatggatcagaaagtagatgttaatggggaagtatctgtgggagagtgacctcttatccctgagggccgccatgtacagctacacaggaggcgaactgcacaattccctggaatgtgcgtgatgctccctggagttgtgcagtgtggcagtgctgtgtgcatcaagggcaggagcaacggcagtccttcaaaggcttaagtaagtggcatagaaagtggacagtccttttaagttgcatggcttcagacacttctgttagtgtgataactactgcctgtgcctctcactctttgaagaggaacttgctggtgatggggcttctcatggggaagctgggaagctccctaccaagggggagggttcctaagcctgacaaggactgctcatcaggtgctttggtatcctgtagactgggctaagaaacctcacaccagggtccactctccagctggtctccactgggcctagggagaccaaaagacctgcagttgctgaacctctcttattgtacctgtgaagccaagtaaaccatttgttcacttatgttaaagaataagcttgatcattcatgttcaaaatagttaactcttttttgtgaattaatagtctggctataattacatttgacatttcagtccagtatatttgtcatccagatgaagaagctgccagccgcatttttttccagcagttttacttgactttcttttaattttatgtacaaggtgttatttaagtgcacagattaatagagataatatttatatgtaaaattatttttattgcatacctctatgagtaatttctcacttgcattgttataatacctcccatccttccctaaagcgccactctccccactctactgcaggagatttctctagcagcaattctgattatgtcatactcccctgctttaaatagctaaatattcttaatttggaaaagattaaagctaggcaccattataggaaccttgcctacttgtcacctctcatattttctcatccatattctgttccacagtcttacctgcatggagcaaaggtgtagggcatatttgatgtccattataaaatattcaggctccctcagttcaagggtcctccactgtaaagcagtccactatgtatgcaggtgtcagtcctttttccaccaccttgtgggaattgggacttggagaactgccacattatgcccttatttacatttcttgactctgtagctttgcgcttacctctgctttaaatgatatttctgccatttctgtctaccttccatcaaaggtatggtgtctacctttacaataagattgtaaagaataaagaggtaatgagtacaaagcacttagctcagggcttgattagctgctgctgctattattgttactcttgcaaaattggttccagaattataccctttgggtgctctttcctaaacttcttctatccctaccctattatttagggagaccctatttagcagttcagtctttatatattccttatagctctttgttggcaatatttttaaatcataaagaatacctaaatctataatgatactaaaaagagtatttgtctaattttcttctggccaggtggatggcatctatgaagagggggctgtggaacgctctcagccaaagagtgctagtctggcatgttgtgctttttcagtttgaatggctctgggcaatctgttttgctgtagtctctttttttcccccgttcagcaccttattttccacctgatggtctttgattcacagcaaattgtttgtcttctaaaggataaatcgaaggtgggtttaaatggttcaaatacaagctggctattaaactgtgagttttacaagctgtcatgtcatatgggctgagttctatctagctagatccaccattggaactattctaagccatggtgaaaagataaaagacatcagccaataaatcccttcctcatgtaggggattcattgttgggatagtacctccacagggtgtactatcaggcccaggcttgtcaccatgacctctttggtgctaagtcagttagaggacccatttctcactggtctttgagttccccatgggataggaccttaagggggttttatcccaagctttgccagggcctggcttctggaaggcattccataaattgttttgaatgcatgaatgactaaataagaaaatgtgagagtgcttcgttaactgtaaaattagctaaatgtcaactaatattttttcccttctgtgatgtggaaagatatgcaggtgcaggagcaggcagctgatggtggagactggggcgaatggaaagtgcctgttataaatggcagcctccttacctgtgcttctgtccagctctcttgcctctcaccctgaaaggctgtggtctgtcaaatcactcacaggtctgtctgtggagaagtcctaagtagtatagggtccccacttctgtgatccatttcagttccaacccaaaggactttccaaagaatggacatcttttgtctcttctcccactctgtccagttgggtttataatccctttcattatcttctcctcattctccccactctgttctggtcttcatctgtagaaatttatctgtcaccattttgggtgctcaggatgctatcgtttctcagatccttccttcgtgtttcatggatacctcctggaacccttttttcagtgagctgggaatatgtctttcaagaaaaggaggtggtatatattataaaaaatttaatttgggacaaagcatctgacaaagcgtttttccctccttatgtgtggacttacagcaagtgttttataatagcatgcaaagtaaaccacatttgatgggttttattgaaaataatacatttaccccaaaaggggaaaaagtacatttttgtgcatgtcaattgacagtatttgaaatggaaatttttctagaaaatttgggaggtaacagtctcaggaaaggaaactttatatgctataatccagacattggtcacagagagatttcctttggtggcttaggtagggcaaggcaaaaggccccttgtacccatctgctgtagagatagcatatggaagagccctgccactccctgccagtcaagcccttgtgataaatcttgatactcccatgtatatttgcctgcttgtgctgccaaggccactgaaaaaggtcagtgctttgtgaaatggagagtatgatataaacatagaagttgttagtaatttttattgtgattgatcactttttttttcttttctttccttttttttttgagacagagtttcgctcttgttgcccaggctggagtgcagtggtgccatctccactcaccgcaacctctgcctcccgggttcaagcgattctcctgcctcatcttcctgagtagctgggattacaggcgtgtgccaccacgcctggctaattttgtatttttagtagagacgaggtttctccatgttggtcaggctggtcttgaactcccgacctcaggtgatcctcccgtctcggcctcccaaactgctggtattacaggcgtcagccatcgtgcccggccgtgattgatcacttttaagtacatgagaattcttggcatgacatacaaaagaggatgggcagagttccttttcctgtctgtgatatatttcatgacgatccagtctttgcgggcagtggttcagggtagtgcagccattgtaacctaaaccattcctgtgtgtttatttatcagattttctcaaagggtgagtgctgatcattttaaattctgtttaaaaataaaattgttcatcgaagtgatgaaataaataggggtcagatatgattttagagatttcgaatcctgaagagggtttgagatttgaataccatctctgtacactcaaggcaaacttcctgtatcactcaggactcataacttcatctgcaattttattattgggtgacataactgaacaggtcgctgcaaacactgagaattattgagttgtttaggtgagtctctcttgtttaaactgttgaaaggttcattgatttgtgggtgagggaaaactgttgtagcgtagttttagtgtttgcatttcattttaacattaccttgcaagggatttttcatgctgtactaaggagattacaaggccaccctaaggcattttagggttatataaggaactggctttgctgttttatgtactggcccttttattttctggctaagccagaatcttggtaaccctctcacctatcacctttgggtattaccttttcagctctccctttgccctcatgagtccaaccagtgccctggtctgagcctccatcctcccaactgccctggcttcctgctgtctgccttccgtgttcctgcctacggttcatgctttgccctggacctcagtggtccttcatgtctgtctgatcacgacacctcatgctatgagtgacctccacagcttctgctgcttttggtgcagcatcaaatcctcccggtctgtgctttctccttcagggcccacctgcagccttattcccttctcctcttccttctcttccactccagtcctcctccccatccccagtcaagttaacccttggaatattctgtcataccacccaggacttttccttcagagcatacatcataattaggtgaggtcattattgcatatttgggtgattatttgattgtctgtatcttgcgctaggcagtcaacttccagagggaagtggctgtccttttaatgcagcattgatggtagcacccacactcagggcagggttttcgaagtgctccataggtcctggttttccgtgacagtgctggtatacccctgaagtccccatgtaatttattaatagtgtcccctttcactttcaaagttactctcattttgaatgacagcatatatgatgatcccttctaaagcccagtgatatgtagtcattcaggtaaaaggttttattgtcaggctcccagagtgggagagcctggttccagggtcggggggtcagaggggagctgttgctgaattttgattctggctgaagataatttatcttcttgaaactctggcagcatatacagatgtgcctgttgttaacattttaagaggtaagaacactctctgtgcacctgggattttggaatatgatagtgggaggcaccaagactgttacagaaatggaaaatgaacacagggtggcagagggtaggtacttctgccagtcagaggcagacagactttcaactggaaggggtcaaggacactattgcattgtgtttggccaaacaaacaaaatgcattctaggggagagctggttttagtcgtgtgtttagcgggggctcagtgagaggcacacagatgatctgtgcatccatttctctactgatgtaaagactcaaagaaggtagtgtgcacggtgccaggggaatcttgttgaattactaacagtgaaaaactaaaaagtggcctaagatcttggtttctaaggcctattatggccgagtccccagagacaaagtttcctcctgtctgacttggagcagatgctcgtctgcctcaggaaaggctctgaagaatccaggagaacatgctttgcaaggcactttcaaattgctgggtcccttcaggggaaaaggggtttttatgacaccactagtctgaagataatttttatcagatcctatagcctgaggtcttaaaacagaacaacactaaagagcccctctcaggcctggcttcctagcagcagttggatgggaccttgaagtggtggctcccttcatgttggccctgcagggtcaggcatctaagactcgtggaggcccaggcagtctggagggataccagatgacatagcaaatgccaaaaaaaaaagatcgagtgctatgtttgcctgtgtgtgggtgtgtttgtttcacaggtacaggtgcacccacccggagtcagggatggaacatgtgcagtgaaggctatatgcttcccagatattggggtgaacttgatgagagtctggtggtggactcagggacctggaattgtcttcctcactttcttgccacttctcagtgtgaatgttgtctgtagggggtgctctccttgcttgccgtgggtctcagagctaccagagcattagaatgtaggagatgcgcaggccttgtggacgttttgccagtcgagcgattcagcaaagtaattgcaaggtttctctaattgttaaatatctacaacaggctgaatttggattggctgaaaagaaaggtgaaatgaggtcatcagaattacatgatttttttcaagttctggcatcttgtgttctttgccaagcagaaatattccagtagaactgtgataatgcctttcatctatctgctgagccttccagatggcagtttctcagccagtgagcaaaagaaagggtgttgagatttatgagtaagttgattcccttcgtttgtacttcccagtgaactctcattcgctatttgtgctaagcaccagtggcaagttatcctcacatctttagctctgcagggcccttaagccagtaggccttacttcaaggggaggagggcttcaaattcagagtaataaatagctgtctaaatagagcccttcacatactttctcagagaactttttgtgatctaagtggacttaagtttcttgaggacaggggcactcctttctcctgggtagcaccaatgcacaggaagcttggcgttggattccgtgggcccctccctttctagttatgtgcacagtctcccgggttgagagaatccctccctttgctaagtcatcttcattcaatccagggatgtttagggaatatgcgtgcctcggatgacaatacaagatggattaaggtgattcttgtgctttgagagctctcagtccaatggaggaaaaacatataaataaatacacacataaacgagaagtggtgtataagtctaaagatcaggtaatgagggaatgttttagaggaggtggtgctgctgtatgtattggaggcgggtagggatttgctgagcagaacatgtgccatgttgttttctccatcaggcctcatggctggaacagctgcagtgcttttcgtttggtgcctcctctgctttgcctttgtcctgttcttgttcactttgagcacccttgcagcctaccctgggcataaccctccaggaactctgatgctgtttagtagatactcagaggttaccacttaatccttgttggttagttttgttccccaactcgagcgtgaattcaggacagggcccatctctgaccacaccaaatgcagtcagtgcatatgttaagatttagggaaagcgtttgggttggttagtcgagtattttcatagattattattacctggttatgtaagtatgacaagacagtttaacaatgacacaaatataagcagaggatctgattaaaaatacttttttttgaaagggaagcataagtttgtggtcagcagcaaataacccatttgatcttcattcatttattcttccatttattcactcactaacagtctgtacctttgtgaatagcaacagtctttttcttcattggtgttttttgaatgctgggtttttactgccctggggattttctttaaacctgatagttgttttgataaatcatctggataccagctttgagctaattcttttctattaagtacctcttagagtggctgaccataaaccatttgagaaatcactacattttattaatgacttttgagatttagcagcaacttaaattaataatactggagtgtgctttggataaaagaccaggagactgcttcattctgcaaaccagagcagagatgagaatgtttgcattaggagaacgtaatttatcagcattttaggctagtgtgtcgattgatacaaggttgggcaatagtggtaggcagtgttataagtgctgtttgtatgtatcagctcatttaatcctcccagtaaccctttaagatgtctgcactattatttttcacattattctgatgaggacatcgaggcacagaggggttgtgtgacttgcctgcaatcttggttgtgtgctcagaaatagtctttttgagactgaagatattctggttatgtgtaatacacagtacaactcaaagactgtgaaatagttcatagacaaattatccattctttgccactttagagtaattatgcttattgtttctgtttcaggataatatgtgtgtgtttataagcattttttcctttttatttaattgcagtaacatatacataaataactatgatggctagttttgaactcatttaaaaacaagtaaatttatgctttgataagctaaggtacattcaaagcattcccatttccaaagcaaagtgttttcagttaaagattatagatgttgccttttgccagggatgcttgtgagaatgtcatttagagaaatcttaaagtaatttatccataatattaacttagcatgccttctctctgcaatgtacaatgtatcataggacaatgtatgatacagctcagttttgatatatcagcaagttgagtagtaatttttgtttgtttgttttagttgttttaaaagctggtgttgcagattcctatgcttagaaggaccaggcagaaaataagccattaagggtgctgggaatgcaatagggagtgatggggagtgtggtaaaggggtcagcaatgcttctgccatgcctatcagggagctggtttccattagctgttggttgacccaggaatctgtacctgtgttgccagatctaaccattttccaggagaggctggaacttcatatttaaaaaatgagaatttgtcaactttaataatttggaagaaaattcaaattaaaccaataccaggcagtgtggtgtaccccacattacagaggaaagtaggggacttgggaggtacatgagtcaatctatagatgctcctgttgtcatgttaaacttgtgcttgctttcagttgctgttaacattttgggtccactgtatctagacatgtccttcaaaagttgcatgtaagttaatttttttttctgtatttaaaaaatggccccacaaacactagtctagatgttgaaaaaaacccttataccttattatggagacttctgatgagtccttttgtacagtgaacaatcacttgctgtatttacgtttgtacttttgtgtttaaaatggggaatggtgttagatattgcatactgcttgagttaaggaggtcgttaaccaggaatgctttggattactcagattattattgcactggtgtttgttgtaatggaatttgacctgtcaggggagctgtagatgtttggatgagtgttcagtccttaatactgttatctaaattctaggcatgttgcctgtaacttccagtttcaaaaaatctatgtcaatctgttcttttataacctagtgctgttgtttttttccctcttgttttatatttaatcattctctttggctcacaacagcagtccagtccaaagatttactttttctattttcaaccccatcattatttttgtgtaaaaagtatgttttgagttacagcaattcatggagatcaagcttctactctgtagggagaagagagatgtcatttactacagagtttatacacacaaatgttctgctgcatgctgtgttcccactgaaatccagggggtttatttgcatttatacttaaagaagaatgaccgtatttggctgactctaagccaagatgatacaggcccaaagtttttcatggaggaatgggggagtaagggaaataggaacatttggaagaaatagttgttgtttttccctgttttattcagtgggcattttattcacagatcatttgatgcattgcatttactcgtgttattctggttccttttgtgttttttttttccttttgaaacaacttcacacttacaggaaaatggcaaaaatactaaaataagaactcctataaaccttcactgataaaatcccttcagttttctccagttatcccagtaacgtcctttatagcaaaaggatccggttcaggatcactcatacccagctgtcatatctttccagtctccttcattctagaagcattcttcattcttccttcatctttcatgacactgacacttttaattacaggccagctgatgtgtagaatgtccttccttttcttaggagatgttttctgtccttccttgaaaaccccactagtgttacctgccacgaggagagctaggcgctctgccccctaccccaagctggttgctctctcttacaatgcttcattaatcaagtacccttttttggagcattgatgatattcattcatccttttagccagtaaatattttttgatgtctattacgtgccaaatgggatacatttaagaacaaagcagaccaaaaaaaaaaaaaaaaaaaaaacctgctctcatgaagcttacattttagtggagggtaacagataaccaacaagaaaaaataagtaaaacagcaagtacattagatcattagatagtgataaacgctaaagaggatcgaatcaggcaggaaaagggatgggcaggttcttgataaagtggccagggaaggcctcccacactagtgattgtggagcaggaaccccaaggaagggaaggaacaggctgtggggctagctgcaggaaagcggtcccggcagagggagcctgtaggggtgaaggttctgctgcaccaggtgggccaggggtgaggaggaggcggtctggtggctggagccaagcaggaggggagaggagagtggtaggaaatgagtcagaaaggcagagcagggagattattctaggcttgttgccactgagggagatgagaaactctgggggaattttgagcagagaagttacatgatctgacttatgccttaaaaatccttttgttgtttacggaataagcaggtatgtagggatggggtcaaggttagaagcagagagatcaatttaagatcaattatgggaggttatgataagccctttgtgtatctgtttgtcctattagcacataaaggggactcagtggtcttcaacctttagaatacataagatgtacctgggctgttcgtgagtgatgcagatttcttcactgggaaaccagcatgtacctgggctgttcgtgagtgatgcagatttcttcactgggaaaccagcattcattagatctcacctgtgttgtcaacagccagccccaggtgattctcatgtggatggtccttgaacaacatgttgatgttgataaatatagtaacaagtgaggaatgagtgaataattggtttatggaaaatcctttagagatacttagttatgaagtgtttccactcattgctttatttctcataaacatagtactcaacttaaaaatatgtggtagtataaattttctcttaaaacttacctggcacagaaagatctaataagcaaagtgatttttttttttccaagagaagatgtgtatttgatgaaataaacatactactctgacatactattttcttgcttttaaacgtggttttcagaaggaatgaataaatgctactaatagggttcattcataaagaagcaattaaatgtattcaagaggaaattggtttcagggagtaggtcggatgaagccatttaaagatagtaatagcaagtgagtcgtattttagagtggaccagatctggcttgacatttcattgcaccagaggttcacaggaaggaaggggtttggccctctggccctggaaatatgtaaagggcaaaacataacagacttttgttttttctctttggtgaagtaacgtcaatcttgcatgggtaatcttgagttgaacatgaaaataagtcttaccttgattaactgggtaaaatcttggtcagtttcatgggctttggaaccaaagtggctccaaattctgctcggaactatcagtgtgactgggcaactcacatcaccttcatttccttataagcgggaaataatacctgcttcacaagctcattgtaaggattgagagttaatccatttatgtctgaggttgcaattttttgaatttttgcaatcagaccttggcaaccaccttgagcagaagggtataaaaaactcccacatgcttagcgttccagtaatggaacactaggcataaataactactgcccatagggctcttacagaattgtctggtgtattataagcactcaacaattattagctttttctcctcctccctttcctattattgttgttgttattatcattattatgtttcagtgctttcaaatcgtattttgccttttggaatcctacaaattttcaatgatggtttttttgggattggttgtgtctaaaaatacgttcattaatgcctctctgtataggaggaatctaaagtcttaagtgtggcgttagtcttgtgtatttatgatcacttcctggaagtaggctgccatcacttatgtaacattgactttctttccctctatcaaagagaagctcagacttgcttcagggaagtatgttgagaattaatgaataagttaatgtttgtggctctaccccattaactactaattaatgtaagttactgctcttatagttctccaagtactatcgtcatactgattctctgaactagggacagggacattgagaagactttttcttatgtactgtggggaagcagtgttttgtaaaatttttgctcttgcttttacaacagagtatcactccgtatctaaaattttacacctcctctacaaaacaaacaaacaaaaaacacagaaaaacccaacctagattaaatcaagtaacttcttatggagctcttagtaatgaaatgttacttatgttaatacgtatttttttttcctctgggaaaccattactttcattcttgactttatctcctcatcattatgctgcacttagtctgtacttggcaataatgttctaaaagctctcataacagttccatgaaggcatagtgtggtagaggcagtcctagcgttgtggtttgtttttttttttaaaggtttgtatttcaattctgtgtttctaaaggtaagatttggatcttctgcccctgaacttttgtctgtaaaacagggatggtaataacttctatttgggtttttgtaaggctttggaataacatatatgtcaaataccaggcctgaataccagcaaatgtggctgattgtgactaatgcaatgattttattactttttttcaatatgattcaatttggtaatataattagaaccaatttcatagtttcatataaagcaaaagaaggtatttatagggtcctaacatcaatcatatttccacctgacataggcttaccttaaataactaatatccaaacttactctgggaggacacctcttctgtaaatggataaaattgaacttttcaaagtacgtgaatacagaggaaacatggaattgtatatatgtatgtgtgcatgtgttgttttcaaataaagtaactcactgtaatgaattacagtgaattttaaatttcccaattttgtattaatgttgaaagccaccaaaggagtaagggatgggttgtatctcaaaaaggccaccggcctgagctaaaactgtttcctatactcttctaaaggcaatgtttatttaatcccaagagtcctttgttctcatgattacaaagttaaaatttaattatttgcattgtagacttgaaaggattagctacactcgtgattgatatgtaaagagagttttataatctctggaactatggcttttgaggaacaaaataatttaagctataattttgaagtgggacagaggatattattacaggtttattcataggattctcatcttttgattggactctaattaaataccttcttgtcagcagggagggtgtgtggaggaattatgattctcctgctttaatcgttgttgatttcttagtgatactttgaagtggcatccaactgtcttctccagctttcagaccctttgatgaaacaatagaaacttgttaagtacatgaccagattcttttcatgcagttcccttgggggaggtctattttaaattagataggtttgatgtccagtctgaaaagcatttattcaccagttctgataacaggtcaagtagtttaacctcttacacataagactaagggaattaaaacctttcctttccaccaccactaccctcccctcccctaaaaaaggaaaggaattttaaaaaggaaaaatgtagaaagaagtaaaatggtgtttatccttttttgttaaaatgtcacaatttagaccatttacaaatctgtttcttattacaaaatgatgagtctcttttgtctttgctcagtctccttcctcttagtccaccaatattataattttgttaaattctgcttatcacactccttcctgcagacacgttttcttctgtcccaccactcattttcagagctcctaaaagttcagaagcccctcttttctatactttgcactttctctcatggaatctcttccatgcccatgacctgctgagtctcaaagtttaactccagagctgactgacctcatttttaagcctcagactgactgtcctacctgacatgtcctcttgaatgttttaaaagtcatgtcagacccatcggttcaaaactgaactcatgttctctcatgaatgctggtttctatgactttttttctaagcacaactcaatatctcatttgcttgaagccctccagagaaccctcagacattgctgatgggaatgaaaatggcgcaaccactgtggaaagtgttttggtggacccccaaaaaagttaaagaattaccatatgactcatcagttttacccctaggtatacatttccaaaagaattgaaaacaggtgttcaaataaaatgtgtgcatgaggctggatgcagtggtttatgcctgtaatcccagcactttggggatctgaggcgggtggatcacttgaggccaggagttcgagaccagtctgggcaacaggctaatttgtctctatgaaaaatacagaaattagccaggcatagtagtgggcacctgtaatcccagctacttgtgaggctgaggcacgagaatcatttgaacctgggaggcagaggttgcagtgagccaagatcgtgccactgcattccagcctgggcaacacagtgagactctgtctcaaaaaaagaaagtgtgcataatgttcaatagcagcattactcataatagccccaaagtagaaacagctcagataattgtccctgatgaatgggtaaacaaattgtggtatacccatacaatggtatagaaaggaatgaagtaatgatacatgctacaacatggatgaacgtggaaaacattatgctaagtgacaagccgtacacaaaaggccacatattgtatgtttctatttatatgaaacgtacagaataggcaaaaatcatagagacagaaagcagattaatggttgccaggggctgcggggggggtgggaatgaggtctccttttgggatatgaaaatgttctacaatcagatagtggtgctggctgcactatattgtgaatttactaaaagccactgaactgtgcactttaaaatggtgacatctggccgggcgcagtggctcacgcctgttatcctagcactttgggagcctgaggcgggcggatcacgaggtcaggagatcgagagcatcctggtgaacatggtgaaaccccgtctctactaaaaatacaaaaaaattagccggacgtggtggcggttgcctgtagtcccagctactcgggaggctgaggcaggaggatggtatgaacctggggggcagagcttgcagtaagcagagatcgcgccactgcattccagcctgggagacagagcgagactctgtctcaaaaaaaaaaaaaaaaaaaaagtgacatattggttccctagggttgctgtaatgaagttctagaaactgggtggcataaactacagaaatgtattgccccacaactctggaggctgcagctctgagatgaaggtgtcacagggttggtttctactgatggttgtagggagaatcagctccgtggctctcccctagcttatagtggtttgccagccatctttgtcattccgtggtgtataaacctgtcacctgacctctgtcttcattttcacatggtggtctccttgtgtgtgtgtctgtggtccaaattttgtctttttataaggacacagtcatactggattaggatctaccctgaacgacctcttaattaagtatacctgcaatgattctatttccaaataaagtcacgttttgagatgctggtaatgacttcaatatgtgaattttggggatatgcagttcaacccataacagtgacttttatgttacgtgaattttcaattaaaaaaatgtatatagacaacccctccagggacttctaagtgctgtcaagcaccagaccagcaaagcacccaatgtggtctgacccctgcctaccttgtcagcctttttactctcctctcactctgtgctgttttttctgtgccagccacactccctctgattgcagtgcctgtgcctacagcctgcttctccctctctttccattaatggaggtcttttcacccttcagatcgcagccctaatgctactttcatggagagcgctcgcatgacttcctggcacaaggcagcctctgttatatgcagcacctttgttcttattgtcgactgctgtgtgacaaagcacttctaaacactgtggtgttaaacagcaaccactcttaggcttgtggactctgcaggtcaggaatagagacggcctagtgaggaaggcttatctctgctccatgatgggagaatgtgaacagctggaggccagaatcataagggagcttcctcaggtgtgtatgcctgctgtctggactgggatgactccaagaccagcctcagcggggactgttgaccatggctcctactgtggtttcttcatgtggcttagacttcctcacgactgggtggcctccgggtggtcagacttctcacagggtagctcagggttccaagagtgagctaaagaagctgcatggcctcttatgacctagctttgttacatagcgtcatttccaacatgttctattggttaagctgtcataaggctgcccatattcatgagtgaggggacatagacctcacctctcagtgggaggagtttcagaatttgcagccatgtttaaaaactgcccaaattctccatgctacgtctaaatgtttgtgtctcccagaattcatgtgttgaaacctagtactcaatgcaataatatgaggcttttaggaggtaattagatcctaagggtgaaattggattagtgcccttataactgaggctggggaagcttgtttgccccttccaacacgtgaggacgcagtgagagtgcaccatctgaaaagcagagatgagcctcgccagacgctgaatctgctggagccttgattttggacctccccacctccagaactgtgagaaatacatttctattgtttataagttacacagtttatagtgtttttattatagcagcctgaacagatggacactcgtcaatctgtgttccttcacggtgctcttttctaattactcactcctttgcatcattatttgattgacttctgcctttttaaataggcagtaagcttattttgctcactacagtattgccagcagctagcacagtagctggcacatagatggtttgtaagactttgaaataaaagttgactgggaagaattagaaaaggtagagcaaggaaagccatttgcttatatcataaacatcacaagcttgtgcagctgatccaagcatgatcaacagcaaatatgcccagtggcctgtaggtttattgtttcatgctcatgatctcagtttagcagtaaatctgaggctgccttgtgaatattgatactgcacgagatgtctgagagctgccacccaagagacagtcatattgacgcctgcaataaaataacagcaacagaagtataagcaaagccaaatgtctcctgaatgaatttcccaaaagagataagcagaattaaaaatttaaggtttaaataggctaatactgatagagtttgtgtgtgtgctcgtggatttttatacttgttgggtgaagaatgagaggtagtaggagatacagttttttatttttaatgactgactttatcagagctttatggggctgatcatgtttatttaatactctctgtagaatttagaaaaagattatctttcccttctccttggctccccagtttaaaaaaaaatttcaagtctgagacagaggcacgtaaagccttgcctagcacacgattcacttgtcccccggcttctgcacagctgctttacagctatgctatagacttgttagatgagtgccaatttccctgtctttgcctgtaaattttcagggcagtcagttacacagaacctcttaaaatggaaggtgattgctgcttactaaattaaaatgcagttttagtttttgctcctacacactgaagaccccaaggcagtgtggtataatatgaaaaacactggctttagagtcccgtggacctaggtttgaaccttgactctgccccttttattgatatgaccctaggcaagttacttatccttcatatgcctcctttgcttaaaaaaaggaggaggtaataacagaggtgttagaagaatttagtgaatcgtacatataaagagcctaatgcagtttgccacgtagtgaagctcaatcaatattagttattacgactgctattatacaaatgtaattgcttggggtttacttagaatttgtatatagtaatacttgaatggctttcaaagaatgcttgattttattctggttttgctcttaattggaaagtaagttcacagtgccttaggtctgaggtattagtacattaatagtgtgattattcctactttgtctttgttttatactggtgactttttttttttgaaaagcatttattaaagaataaatataaattgaaaaggggaaatggtccagaattctaggactttagaaaattgaatgcacttttctacatttttctaacatctgtgggagttaaagctgccagatagaatgcatggacctgtttgcttcaggatgtttgatttaaaacagtggttcttccctttccggacagggtcagaatgacctgggttctctccaaggttgtgtacaagagctccacaccttctgttcagaagaccaaggacagtggcagatgccatggcctgttgtgaagtgaagttggaggagggagaattctagaacagatggtttcttggatatctggggcctgtccagctctagctttgaaaatgatgggccagaccttgaactggcatggatacaggcttaagtgccagaacaggaagtgaggtcctagggtgatgtctttggggcagctgctgctactcagctggtgggctggcaccgctagctttggcttcctatggtttggtgaggtgattgtgtgtggtacaataacaacagtgaggtgggaaactgggcctgcaatctgagaaggccataaccactttggagctgttggcctattttagaaggggtgtcagctactgtgccttgcaggacatgtgctacctttggcatgacggaaatgcatgaatgtgggagccaaggatacatgcatcccctacactgatcagcctgagttctggcttgtgtagagcagtaagcagtgctttgtgggagggcttggctgtcccctttgacattagcctccaaagactaggagcttatcacagactttgctaacatcctctgatacctttttggaataattaaatcattcttggctaggttctgctgtttgtcctgcctctcactagctgggtgtccttgggcgaattacttaatctctctgtgcctagctttctttatgtataaaatgaagaggccagactagatgataccatagatgtgagatgatctctgatgtccaaatctgattaaataatttttaggtatacatgtattttggtatttgctttttttgaatagtgagtcccacaaatattacttctgtgtaagtgacacctacaccctttcttttgttcataaattctttcttaaagatttctgtgagctctaatcccagtattttgggaggccaaggcaggtgattgtttgagctcaggagttcaagactagactgggcaacatggtgaaacccagtctctacaaaaaataaaaagaattagccaggcatggtggtgcacacttgtagtcccagctactcgggaggtcgaggtgggaggatggcttgagcccagtaggtcaaggctgcagagcaagactctgtttccaaaaaaaaaaaaatttacgtggagcttctcaatatctagtattcaagaatttggaaattggagtgtatcgttattttatggagagaaggacccattaattccctctctcgtaaatgatcttgtcccatttgttgttggaacaatactggttgcaactgttgtttgagaggcaaagtatgaaaagcatggtgtcgaattatagaaacatattattacagtggcactagaggctcttcatactaagaggaggagattgaggcccaaaaatgtttcagggtgagtctgaggctgtgcgctatgctccccttgagagtggaggctgtgctttgttcatcttgccatccagcgcctcttgggctggttttgttttattttgttttgttttgtttttaaacagctcttgtcagagtgacactaggtaaagatctctctttaacttccccttgacctgttcgatgctgaaatgccgtcacccatatttctaagcattatttcaaggtagcacaaactccaggagccgtgggtttccttttcagcatggtctgtgtaaacatgggctgtttctcagaggctgggctgaggccccagaagttttcttcataaggggtcacctcttacctctgcccctacaattccttttctatgaggttttaatctccaagagggaagcagaggtatggttctgaggagtgatgtggattctggggaatgcaagggaagcaagggccaagtgggttgagctaacgtggggactgagaaaccatagtgagggaaaaggacaagcagaaggaagggccttgtagaaccacctagtgcttggataagattcttctgcagagccctgggaaattggaaacactctccggggtggtgtgtgcactggcagttgaatcttagcatcttcgttgtttccttttgatttcacttgttctgcttcttctcttgctgtagttgccacgtgccctgacatttcgcagaactttgttgccatccatccagatttggccatttctcctttaattccacctgttgcccctcattgtaagtgtgacacacttatcttctttggtttattctaaggcattaactaaacatgtctgaaattccgacgagtctaagaatcaatatgtgtgtgtgtatacaaaaagtaattctgcctcagcctcctgagtagctgggattacaggcatacattaccacgccctgctaattttggtatttttagtagagacagggtttcgccacgttggccaggctggtcttgaactcctgacctcaagtgatctgcctgccttggcctcccaaagtgctagaattacaggcatgagccaccatgcgcccggccatcaacgtctgtgtttaatgccaggttttttcttttccctaaaagcattgttcggaaatctctgcatttgagaatctagaaataatgatagtcaaacacgggacatttttagtgaagagaagctgagtgattgagaacaaaatgattggaaagaaggggcgatgacaaccttaaaggtgggaacaatttgctaagagagagggaaaagtactgtattgtcattgtccctgaggtttccaggcttgtgtgaattttgaacaggggcagcctgtccagttgtaggaaggttgtggcattaggctctcttggtcccaaggcacaaaaactctgtagcaggggttttcatagcaggttacacgtggcaaggcagatgggaatcttgagaatatctgaggatatgaactgtggctgggccacacaggtatgggctgtcacgtggttcccgatccaaggcagcactggggggttggtgactctttcctccttgaaatttctgctacggtgactgtgatgatcctagctagttggcatcatctctgttgaagtagacacttgaattaaatatgttgccctatgttgttggccaatagggcatagtgtatatatcagggaggatggcagcagctgttggctgcgatggcatttagcttgggcctgacattcatgaagggcctcagatttattacttcatgttgtctccacatgaacttgtacgtttagtcacagagacaaactggcaggattgaaagaagatggcattcgtcatccagatttaaatatgtttctcattaatagacattctgcctgtagtgcactatgaattaatacattttataaatcttgtaactgccttatgaagagcataattagttataagtgtttggatgttagaaatgttaatttgttcaatataggcgttaaaatgttttgtcattttcttatttttaatgttattgggaactttaaaaaacaagagtggctcaagcccctcttgacctcttggaaggccctgctgagctgggtttgcatcggctgttctgggtcatatgttcactttgggtccagttggctgggcctagggtttcacaaggtgtggaaacctttgtcccccatatgtaaaatagcctggctccatttctgtcagaaatgcagcccactctacccgccacagcccaggcaaggggatggagctgggtcagtgggtgtgacaggctgatgacggaattgaagagggggagcctgtgagtctgacttacgggactaaagaataaggccccaggcagaattcttgatttagacataagactccaaagttttaggcagttcatttcagttttctgcatctacacttataaactacagatgaataacaccaaatgacttttgaaaactctgaagactgtaaaactcatttgtgctttgagataccaagccactgctaaactactttcttgaaaatgaaatcattgtttaggcagttggtggttgtttggaaaaatttcagagtgaagggctctaggagaaaaagagttccagaaataaggagaggataaagtgatgcaagggaccatttagccggctagataaaggctggaagtgataattggttgtgcttagggagggataaaattggaaagcaatgtcaaaatgcagcgtgagtcattttggggggggaatctttgaaatgaaaaactggtatttagtagtaacagcgaccatgcattttaaaatccatcaaccagcatctctattccccaccctcaatatcaacctgtaataatttatgctgtaaccaccaccgagagatagcttaggactggattacatcagtcacttttttttttcttggttgtatggcagatattttgatgtttacaatagggactagagaattttatggggaaaggttggcatattaacagtcattgaagtaagcagtctgggaccctgttgtgttataagggaagggattttggaccttggtgttttgcagaggccatatttgcataattagagagcacaggattatgggtaaaatggttgcaactactaaactagcctagtttatatggattcttgttcatttgcaaaataccttttctgtgtgcttgttgaaaccataatatcctgggtaggttttattacaataacttatggtctagtaaacatatctggaaataccataagagaaagcataggcaacatttgtaagcctgctgctttatgaagagattgtgcttatcagaaattgtagcattactgtaaattttttctttcatatggagtgatttacttggtatttcagtatattaatttgctaggaaaatgtcaagttagtacttctctcaaaagggcattgtgcatctgaatcacccgtggaattaaaaaaaaaaaaaaaaaggttttgccctcaacccagatgtgttgtgacttaatctccagttctgggcctgggcacccatctaaaatggtgaagaggacagaaatgattcttgacttcttggtgtgtacgtctgtgaggaagccagatgataaacactgcagggggaaaaaaccataattgtaaattgtgataagtgctacggtgaaaaaataaaacacggggtaagagactggcagaaagaatgtagttttgatgggcgggaaggccgctctgaggaagtgagaccgcagctgaaaactcagggatggagaggttagccctgtggggggagggaggaaggagcatttcaggctgaggggacagagtaagggaggcctgatgtggagagggcttggtgggtttgaagagctgagatgattgggacttgtggccagagataggggagcggggggagccccgcggggagcgggagaggatggtgctcctggcagagatggcaggtggcctgctgtttctattctgtgctccttagtgtcttggttatgaaatgacttgccaaaatgtccctttaaaagaaaaggggtccttgccagttacagcagtgtcactgtttaggtctgctaagcaaattctagggtgtctgatggctttgtgttgggagttgtaaatggatttcatttgagaacatgacaagaactgaaagattagtttaagcaaaagaatttaattgaaggatacatcattgttcttgtaaatcctttgatatttggctgttgtcttccagccttttcattccctgcatcctgtctgctgcttgcaggactgggctgtaagccttcattcacctacaacccttttgtattgcttggaacttgcttgcttcttcctcctgctcctcttgttccccactcctcttctcccttcacctccccatcctcctccccctcctcttcctcctgcttctcatctcttcagatggaagagagatgggaaagagcattcacttagttattctttggaataaaatatacgtcagtttccagcgagggaattctggcagatttactgacaggtgacagtgtctgtgtagaattaggattcctaggaaacattagttctaactacattattgataacaatgccatgtgcattgtaaatttgggaccaggccctgcatgcagttgtgtggtggttccctacacaagggctcctggctgaagggcaaatgagggtggaatccactgaaatgcagcccactcgccaccctccacggcccaggccaggggatggagctgggtcagtctggaggaagagggtgttcttttctgtttcttacgcaagcaaatcaccaggcccatttcttgactccttcagaggtgccaaaagggctggtgatagccctgcctgggacaaacctcagtgacttctgggtcgcacattcttgcctgggaagaccctgttcttacctggtaaggcacaattgaaactatgattggtccacttcacagacgaggcagcttgttttctcccctggtgtgttattagttttaatggacatatttgtgcaatcagtgtgtacagttcatgttggtaagcatctggcatattttcattattttagaataatgctatgctgagctcacatttcagcttcttgtcaaaaatagtaatattctggtatggcagatttccttctggggcagtacttcccaccagtgtgtgctgcctggatatagtttcattcacagaggctgcttcacatcacatttcaatgcatttgtgctttaatagttgattcttagtattaataaaattgaccgggtgctttcatctccagtttataaaggaggaaattgtgcaagggggaggctaactcacttgccctagacaaattagaggcttgtttcagggttggaaaacaggttctcatattccttctggaatatgttaaggtgtggactaatctcttctgtgacaaggacatccctgagtagtacagtgtgtcctcagatcgtagtccagagttaagaagtcagggttggaggagttcctctgccttcctccatgcctggctgtccagatggctccgtttgtcaccatgtcttagccagtggtgcaagtggctgtgtctttaagagggtgacctcaaagttggacacattacatcgagtcatatcacatcacggtatagtcacaggaacaaacctagttcccagggagcctaggaaatatagtctatacctggggagcggggtcagggggaatcacatgcctgactagagctaggggagttcagtactaaaaagagtagcggggaggatgccggggcactgactaccacattagtcctcgttcctccctgaacagccttagggtgggtgagcagccctaagtgagttgttagctaacagagatgtataatgaaggggcaccacagagcattttatattcctactgtagccctaaatgaataggcagctctttgtacatacgcttgaatatgcttcttggaaccagttcattcactcgacagatacgtgctgagcgccagttctttgcctgggtgctgtgtggtctagtaattgaaggtacctgtaagatggccagggccagccctgctcatcatgaagggcctacttatgtagataattttgaacctcaaataggagggaagttggagttgatttacctgtcattaagttgttaaagaaagatttttcctactggtagcaactgaatggagctctactatggtttgaatgtgtcccccaaagagcatatattggaaacttagtccccagtgtaaccgtgatgggaggtggagcctaatgggaggtgtttaggtcatcagggctccccctcatgaggggattagtgctgattataaaagggcttgaggctgagttcgatctcttgctgcccctcatcttttgcattccactatgggatgatgcaacaagaaggccctttgcaaatgccagctcctcggtattgtgtttcctagccttcgtaactgtgagaaatgagtttatttctttacaaattacccagtctgtggtattctgtcatagtgacacagaatggactaagatgagctcagagggagagaaggctgtctaggcccggggcctttgctgtacagcagctgggctaatgcctctgcgaattatattagcctgtttgtgttaaatgaggagccctcctgcttgaaagaggcaaggcattctgcttatgaagccagagaaatcagtcaggcagcctctgacttacctttgccctccccttctgctcagaatccttcaactcactgtccgtcaggctcagccctgtctcccctggtctctcccagacctgcctttctgggtgtggggtcttcttgcctccctaggtaagggacagataatgccttgaccacccagggaagaggagtttgggacattacccctgaactgagaggtggtgctgatgagagtaattaagcacccagagacattgtccttcaatacattgcaaaggaaagcttgctcagagtagacctgcacctggacacgagaggctggagactgtattcaggacagtgctcgtggggagcttccttcactgctccactcttgtgtcctgtgttacaggggctgctggctgttgccactgtttttcagagaatgggctgcctgtacacacctgacttgggtgatcatgtctacccaggaggaccagcaaaaagggacaagcagtgatgccatctggttttacctccagcattccgagcactgccctggccctctcccccagccagtggtcggggttgggtgcgccccactctggctgcacaatagagtaacgcaggagctttaaaaactcccaacacccagagctcacccccagcaaatccgacctaaatagtcaggcatggggcttggacagcagtatgtgtatatattttaaggtttcttagttgaatttaaatgttacagtggggattgaaaatcttggtctagtggtggtagctgttgggttttttttcttttcattttttttgcatccattcctgttactaccctctagaccactgtgatttcttagtctaatcctgacttgctacctgaaaccctctaaatgtaagtctcgtgcaagagagtgagaggtaaagtttggtttttatgataagagataccttgctcagtaagcagaaataagtgccatgtgttagtaactacagttttgttttgttttgtttcctgtgggagcgacagaaaagagtttacagggtgtggtggggaaaagaagaaacgaacatctctctgagggcgagtataaggttgtggacttagtgggaaaagtcctcaacttcaagtcagagagaactgtcgaggagagagactgatgaagaagacacagtgaggtttttagtggttaaaaacacagcactgcgtttacatagtctatttcccccctaacagtggcaacatgttgtggattttctttttttttctttttcctggagagaagcatgctgcctctgaacagtggagaggaggaaaatcatcagcatcctcattggggtcaggtgacctgggcctcgttcttccgctgccacctgccagggttgggattgtcacagaagactgttcctctccgtggtgactgattgcggagagataagggggttaggaacatgcagcttgctgtgctgggctcagaagggactccatgtgattgactccagtggagacttattttacctgccatttctgtagcaagaaggaacccagatggggccaggggtctgtgaatgcctggaaagtatatgtcaaacattgtgtgagggtacacatccttttctggggaagaagttccatggcttttaaaaatcagagtcctaaaggatcccagtgactaaaaaaaggaagtgaagaattcctatcataagtatctttatctgtgatagggaacgggaatgtctgcctgatgtagtctagaatcctgtgaattcaaacagatactttgttcgttcacactcccgcagcttatgtctagcgtgttatgctataacgaatagggttctaacattaaacttattttttgagaaatcttcaggaaaaaataccatcttatgaataggtatagtatatataaatttcatggcccggcgcagtggctcatgcctgtaatcccagcactttgggagcccgaggcaggcggatcacttgcggtcaggagtttgagaccagcctgggcaatatggtgaaactccctctctactaaaaatacaaacattagctgggcatggtggcgggcacttgtaatcccagctactcaggaggctgaggcaggagaatcgcttgaacctgggaggcggaggttgcagtgagctgagatggcgccattgcactccagcctgggtgacaagagtgagactccatctcaaaaaaaaaaaaaaatttcatttaaggcatcacagattgtttcttttttttcccaactgtgtactctaaatacaggcaaaaagcatgtaaggaaggttgtaacaaaatgtatatgtaggcaataggactgataaaatacaaataaatcacaaaaactatatggaggaagggggaaatcatgccaaataacttaggctactgaggttatttgagcattacatttataatgagcttcctggaaaccaaagtaaaaagagaaacacagtggatgttagaatttctacttaaagatagcaaattctttcgttaggtaagacagtctttctggggttcatgtctaagactttatcacatgtcgcattcctcaacactttcaccaaacatacagaaatgcctctcttgtgattgctttccacttccacaaaactaattgtgtgggatacccatctccggatgtgtggttctttgatgaactctctcccctgtttttctgaaaactcagttaccttagctgctgggaatcgcagtgcaagattacactctgtggaactgcccagagcggggaaaatgaggagggtgacaggtgctttccttcaggaaatgacaacttaacaagcacagtgatggttttttgctatggaaatggaggatgctgaccagaatgtctgctgggatggcaggtcccccggctgctcccttcccccaactgcctcaccacctccccctgccacaccaccccactatggggagttgagctgaggaggccctttgcagccatccgtctgcacctcgcctctttaggaagtactctttctttcaccttcttgcacataatttactttgtgactactcataaatgccccctaaagatgaaaacatatttttaaagttggagtgagaatcaccgtaaagcctttatagaaccaaatgacgtttctttaccaaactgcagagctttcttttctgctccttttcttcaaaaagagtcacaaaaattcaggaattttaaaaacctctgcatttaattcctcattgcctttcatatatgttcaataattgcataagctgtctcacttaagctgttgctaataatagcttttttgtcgttttggaaaactataaccaagaaccctaatacataaatacttcaaagtatgttttcttaataatggtgtttgatgtagggtggaggatgaggggaagtcaaatatttagacacttacatagtttatgtttaagaattatctacctgtatatccattatagttttatccagaaatagcatgtagtgtggaaagatgtttccgtaaccttcctggagtagctcataaagcaaacctaagaatgctttggaagtctttatggtatgagtgttttgtgtttgtcctgttttcttttgaaaagtacagatccaagggcaaacctttcagaatggggtaagacaacaattgaacttgatgagttgccttatgtagcaaagatggcttcaaagataaaggtaatctgcagaaataaaatcaagcttcttttgctctgtgactgcatcacatgaaaatggctaggtagattttcactcgattggagtttgtttagggtggtctgatttaaaatgtaggctcttgtgatgtgcataattttagatggtcttgattgcccagagcagctgttactgctgtgcagaaacaagtgttcagtgtcccttttggagaaatgtgccgtgtgcatacagatgccatagacagagaaaacaaatggtggtgtcaacatgagccccacctcaggtaacaaggacaagctggattccagaggcagggttgtgtggggacaactccgtgaagtccacacagcagagaggagctacagggaggtgtttatttcacaatggttcgtgatttttttgaccaatgctggatgggcagctaagatatagtatcaaaaacacattaactataaatgggtgaattttaaatagccacatgtacacctccatttttagactgttgagaagccattaaaaattagttcctcctgtgattattcacagggatgaagtattccgagggattgacagtttgtggctaagccatttaaaaggctgtataaactgggtattttaaattagtcttataagtgaacttcagtatactatggagtatttttcttaaaaattgtatgcttgtcatcttttggacattctttgggtcagagactcaagtgattcatgcaggaggtcacagtgagtagtgactgctgaattaggaggtagggcagggcagaggtatgtctctgctcttctcagctgaccggtcgtgtgttggttactttgtccaccaaacagttctggcaccaactttggaagggtgatgcgatattatgctcagtgaactgattagtgcccccacaattgaaccttagccaagttgttggttgataattggcacattttttctgatatgctgataatccagttactgcttcaagtttatattaaaatgtttgactctttcaaaccttgcggtttttgatgatgtcagtaggtcaccagactttctgaaaatagttctttgtttcaacaacaacaacaacaaaaaagagaaaagagataacacataagcaataacttaccattattgttttttaaaccttcacaaactgacttctttcatggaaatactgaaatatttattttgtatttaatttattatataatttaaaatgtagagcgagtgaattcagtttgggatctactgagtcacagtgcctggtagcagttggatgttgtaagagtgaagtctgagtgggagaaaagggttgaggaatctcagctgagtgtccctgagcaagctgcataacatctccaagccttggttttcacatctgacaaatggcatgagacctgctctttagggttgtattagagattaaatagtcacataaggagtactgagactgtagtatgtgctcagtaaatattctcttttctctctccctctttttgggtatgaaggtagttgtagttgtaaaattttcttccacacttaggaacagatatttctctaaatgtaagccccctgggcttattctagtttgttcgtacatcttaaaaatggaaacctcagactaaatatagtattcaagtataaatcccactactgcctagataatggtaaagacattacttcatagtctttgcgtgccttgttcccattaatacatatcatgtcatgttagctgttttataagacagttcattgctgattcatctcaccaattcagttccagaacagcaccgtgtcaaggatgcagtggctctgtcattttgatgacgagatgttagaacagttttcagtgtaagaatctgcttagcattacaaagcattcatttctgtggaaagaagtcttcacaaagcccgggaattgactaaaataaccaccccttttttaggggtttggtgtaaagaatagaacatatttgaagcctgggtgattggtgatggggaaagttacatgaactgagttttggcttcatttcccggagtgatgataatgagtttactgggtgctgcagtactacgagatcacagagtgccaagacctcagtgcagtgctgcgtgattgaaatgactgatactctcttttttttttcatgctagttcagcctgttttcatacactccagaggttcagtaagcatcaaacagggaaaaggaaatggcagtccaatagagcggtcgttcaaaatgaccaaagtaattccagaaattcaagaaagtagttgtttctcaagtgtccattaggatcgggctgtcttagagtctgcataactcggaagtgattagaggggttttgtggcttttctgttctctgatgactggagctggtttcagccttcagagtaagtagccagagagtaagataagaaatgctgaggagctgaagtgggcaccaattttattttccattgtgaaggagatgagcatctgtaacccacagcaagatcaaccaccacattaaatttatattgtttgagacagttctgatccacttgagtgtgtgtgttccactaacactctgagatggttgcataggccacaactgttctgtccagttcctgcctgataggtaagctctctgggtaactttattcccatgaattgagatagcagaagacaaacaccacagtggcattggtgtatccaaggcactgattttgtttttcttccatgcgctagtttgagctggccaactaatcatggtattagcctcaaaatgtattgacaacagatttgttttgatagcaaaattgcttttatacttgagaaatctgatcttttataaaaggcccagggtaaatgtcctttagcaacatcatgaacatgtgtgatatcagtgatatggtggggagatgttcctcagcaaaggatgtctgtatttgttcctaggattgacaaagctgtaaagcaaagtgcctggtaggggggagtctaaaggaactagtaggtaaaatgattagagagcttactgtagtacagatggcgatatgcagtctacaaatgacatctccttgccaccactgttactatgggttctaatgaaaagaacctgagacttttgagaatttttgagttcaaaggtatagaagaaggaaagaagctgtgaaaagcaggcataacattgagggacagagaatttggctaggtaggtctagactgtaaatacagtaaacttcccacactacagtggtaaagtaaaattttccccactttacagcatacagccaccttctcgccatattccaaactttttcattgctattatacctggtattatttcacttcactttattgcattgctgtatgtcatatgtgttaggagcctgtttggaagaagagcagcattgtagaattatggagacagccatctcttgcacccgtgtttgagcatcttcatttaaaggggttaccagtcccttgcataaatgtctatttaatcagcttgctttcctaatcttctgcatgagcaattctgtcgcagggcaaaagcgttgattgtaggggaagaagagagggaaaggagaaaaatgtagttttggaaacagaacacttcaaatgagggtaggccaggttctgtagcttcctcagggatttagagtagggttgatatgagagctgtgagtacctaggcatctgtggagaagagggagtggaagagaggtaagtgaggctttgtcaaaaagaaattttgaaatgagtaaagtgtttctggttttgccaaaaaaggagaggaaattctcaataaccttcttataccacaggcttcctccttatcagaccaatagtgatcgtatcagacatgctgcagattaaaaagacatttgtgggtcaacctttaatttttaccattaatcacaggaatgctttgttttattgtgcttcactttattgctcttcacatatattatgtttttggtttttgggtttttgcttcctaacaaatggaaggtttgtggcaacccttcatggagcaagagtatcagtgccatttttccaatcgcatgtgctcacttcatgtctctgtgtcacattttggtaattctcacgacattccatactttttcattgttactatatctgttatggtgatctgtgatcagtgatctttgatgttactattgtaattgttttggtgtgacatgaaccacgcccatgtaagaaggcaaacttaataaatgtgtgtgttctcactgctccaccgactggccattcttgtctctcctcctcaggcctccgtattccctgagacacaacaatattgaaattaggctgatgagtaatggtttctcagtgtttaagtgaaaggaagagtcacatgtctctcactttaaatcaaaagctacaaatgattaagcttagtgaggaaggcatggtgagaactgagatagaccaaaaaacttgggccaaaccattagccaagttgtgaatacaaaggaaaagttattgaaggaaattgaaagtgctattccagtgaacccatgaatgataagaaagcaaaacagtcttattgctgatatggagaaagttttaaatagaagatcaaaccagccacaacactccttaaacaagagcctaatccagagcaaggctctaactgtcttcaattctgtgaaggttgagagaggagaaaaaaactacagaagaaaagccggagtctagccaaagttggttcatgaggtttaaggaaagcagccatcttcataacataaaagcgcaaggtgaagcagcacgtgctcatgtagaagcttcagcaagttatccagaagatctagctaagataattgatgaaggtggctacactaaacaacaaatttctgatgtagatgaaacagcctgctattggaagaagatgccatccaagactttcatagctagagaggagaagtcagtgcctggcttcaaatgacaggctgactcccttgttaggggctaatgcagctggtgtctttaagttgaagccaatgatcatttgccattccgaaaatcctagggcctttaagaatgatgctgactctataaatggaacaacaaagcccagatgacagcacatctgtttatagcctggtttactgaatattttaaggccactgttgagacttattgcttataaaaaagatcctttccaaaatattactgttccagtgtgataatgtacctggttacccaagagctcttatagtacaaggagattaatttgctttcatgcttgctaacaaaacatccattctgtagtccatgaatcaaggaggaatttgactttcaagtcttattatttaagaaatacattttctaatgctgccatagactatatagtgattcctctgattgatatgggcaaaggaaattgaaaaccaggaaagaagtcatcattctagatgccattaaggtccttcatgatccatgggaggaggtacaaatataaatattaactggtgttggggagaagttgattccaaccctcatggatgtctttgagggatccaagactttagtggatgtggtacagcagatgtgatacagatagcaagagaactagaattagaagtggaacctgaagatgggcctgattgccacaatctcatgataaaacttgaatggatgaggagttgcatcttatggaggaacaaagaaagtggtttcctgagatgaagtctactcctggtgaagatgctgtgaacattgttgaaacgacagcaaaggatttagaatattccataaacttagttgataaaacagggtttgagaagattgactccagtttcaaaagacgttctactgtgagtaaaatgccatctgacagcataacatgttacagagaaatcttttgtgaaaggaagagtcaatcaatgctgcaaacttcattgttgtcttattttaagaaattgccacagccaccccaaccttcagcgccaccaccgtcatcagtcagcagccatcaacattgaggcaaggccccccaccagcaaaaagattacgatgtgctaaaggcttaaatgattttcagcatttttggctataaagtatttttaaattaaggtatgtacattttttagacatgatggcattgcacacttactagatgcagtatagtataaatataacttttatgtgtactgagaaaaaaattgtgtgactcgctttattgcaatatttgccttagtactgtggtctagaatggaacctgcatatctccaagatatatctgtagtgtgattattttggaaaaccatttagtagttacccaagataagttaaaacatgtccacaaaaaagacttgtatgtgaatgttcatagcaacattattcacagtggccaaaaactggaaacaacccaagaatccatcacctagtgaatggttaaacaaattgtggtatatccataaaatggaatactactcagcaacaaaagggaacaaatttacagatacatacaacagcatgcatgaattccagaaaaattgtgcagtcaaaggaataaaactcagaagaccacatacaatgttcattcatatgaagttctggaacaggcaaaactagtctgtaggtacagaaagcaaatcagtggttttctggagtttgacatgggggtactaacaagggaactttttggggtggtgggaatgctgtatattttgattgtggggatggttacatggttggatgcatttgtcaaaacacacttaatggtaatgcaaaatgaatatattttattttatgtaaattatacctcaaagttgaatttttttaaaaagtttcttttaaaaagtaaagacatttgtggtgcttcttgtaaattttactgctgattatgaccttgtttctttagatttgactttccaagtttgaaaagaccagtttaaaaatgacttttgctgggcatggtggcatgtgcacgtagtcttacctactcaggaggctgacgcaggagggtcccttgagcccaggagttggaggctacagtgagctatgattatgccactgcactccagcttgggtgaaactgtgagaccctgtctctaaaaacaaaaataaaaaaaaattaaaatggctttttagattataatctatatgaaattgggggttatttcgcacttttatattatttgtccattttgcttctttctaaatagcctctggattgtgtgttattttcagaaagctcttggagattttttgaagtgtatgttttaacaggattttcctgttgctctttggcaaactttgtccttttattgtttaaggagtataaataacaacagaacagaattactttctggtgcattttcctcttctcctgagtcttttatgttcaataactctgaagttcctgttattcctgcctttgaacgtagaaaatgagactctctctcaaatacctgaaactaaggcacataaaaaatttaggaggggccaggcacggtggctcatgcctgtaatcccagtactttgggagattgaggctgaggtggatggatcgcttgagcttggcagttcaagaccagcctgggcaacatggtgaaaccccatctctacaaaaacaaaaattagctgggtatagtggcacgcacctgtagtgccagctacttgggaggctgaggtgggagaattgcttgagcccgggaggtggaggttgcagtgagcacagaccgcgccactgcactgcagcctgggtgacagaagtgaaaagaaacactgtctcaaaaaaaaaacaggagggaggagccaagatggccgaataggaacagctccggtctacagctcccagcgtgagcgacgcagaagacgggtgatttctgcatttccatctgaggtaccgggttcatctcactagggagtgccagacagtgggcgcaggccagtgtgtgtgcgcaccgtgcgcgagccgaagcagggcgaggcattgcctcacctgggaagcgcaaggggtcagggagttccctttccgagtcaaagaaaggggtgacggacgcacctggaaaatcgggtcactcccacccgaatattgcgcttttcagactggcttaagaaatggcgcaccacgagactatatcccacacctggctcagagggtcctacgcccacgaaatctcgctgattgctagcacagcagtctgagatcaaactgcaaggcggcaacgaggctgggggaggggcgcccgccattgcccaggcttgcttaggtaaacaaagcagccagtaagctcgaactgggtggagcccaccacagctcaaggaggcctgcctgcctctgtaggctccacctctgggggcagggcacagacaaacaaaaagacagcagtaacctctgcagacttaagtgtccctgtctgacagctttgaagagagcagtggttctcccagcacgcagctggagatctgagaacgggcagactgcctcctcaagtgggtccctgacccctgacccccgagcagcctaactgggaggcaccccccagcaggggcacactgacacctcacacggcagggtattccaacagacctgcagctgagggtcctgtctgttagaaggaaaactaacaaccagaaaggacatctacaccgaaaacccatatgtacatcaccatcatcaaagaccaaaagtagataaaaccacaaagatggggaaaaaacagaacagaaaaactggaaactctaaaacgcagagcgcctctcctcctccaaaggaacgcagttcctcaccagcaacagaacaaagctggatggagaatgattttgacgagctgagagaagaagccttcagacgatcaaattactctgagctacgggaggacattcaaaccaaaggcaaagaagttgaaaactttgaaaaaaatttagaagaatgtataactagaataaccaatacagagaagtgcttaaaggagctgatggagctgaaaaccaaggctcgagaactacgtgaagaatgcagaagcctcaggagccgatgcgatcaactggaagaaagggtatcagcaatggaagatgaaatgaatgaaatgaagcgagaagggaagtttagagaaaaaagaataaaaagaaatgagcaaagcctccaagaaatatgggactatgtgaaaagaccaaatctacgtctgattggtgtacctgaaagtgatgtggagaatggaaccaagttggaaaacactctgcaggatattatccaggagaacttccccaatctagcaaggcaggccaacgttcagattcaggaaatacagagaacgccacaaagatactcctcgagaagagcaactccaagacacataattgtcagattcaccaaagttgaaatgaaggaaaaaatgttaagggcagccagagagaaaggtcgggttaccctcaaaggaaagcccatcagactaacagcggatctctcggcagaaaccctacaagccagaagagagtgggggccaatattcaacattcttaaagaaaagaattttcaacccagaatttcatatccggccaaactaagcttcataagtgaaggagaaataaaatactttatagacaagcaaatgctgagagattttgtcaccaccaggcctgccctaaaagagctcctgaaggaagcactaaacatggaaaggaacaaccggtaccacccgctgcaaaatcatgccaaaatgtaaagaccatcgagactaggaagaaactgcatcaactaatgagcaaaatcaccagctaacatcataatgacaggatcaaattcacacataacaatattaactttaaatataaatggactaaattctgcaattaaaagacacagactggcaagttggataaagagtcaagacccatcagtgtgctgtattcaggaaacccatctcacgtgcagagacacacataggctcaaaataaaaggatggaggaagatctaccaagccaatggaaaacaaaaaaaggcaggggttgcaatcctagtctctgataaaacagactttaaaccaacaaagatcaaaagagacaaagaaggccattacataatggtaaagggatcaattcaacaagaggagctaactatcctaaatatttatgcacccaatacaggagcacccagattcataaagcaagtcctgagtgacctacaaagagacttagactcccacacattaataatgggagactttaacaccccactgtcaacattagacagatcaccgagacagaaagtcaacaaggatacccaggaattgaactcagctctgcaccaagcagacctaatagacatctacagaactctccaccccaaatcaacagaatatacatttttttcagcaccacaccacacctattccaaaattgaccacatagttggaagtaaagctctcctcagcaaatgtaaaagaacagaaattataacaaactatctctcagaccacagtgcaatcaaactagaactcaggattaagaatctcactcaaagccgctcaactacatggaaactgaacaacctgctcctgaatgactactgggtacataacgaaatgaaggcagaaataaagatgttcttcgaaaccaacgagagcaaagacaccacataccagaatctctgggacgcattcaaagcagtgtgtagagggaaatttatagcactaaatgcctacaagagaaagcaggaaagatccaaaattgacaccctaacatcacaattaaatgaactagaaaagcaagagcaaacacattcaaaagctagcagaaggcaagaaataactaaaatcagagcagaactgaaggaaatagagacacaaaaaacccttcaaaaaatcaatgaatccaggagctggttttttgaaaggatcaacaaaattgatagaccgctagcaagactaataaaaaaagagagaagaatcaaatagacacaataaaaaatgataaaggggatatcaccaccgatcccacagaaatacaaactaccatcagagaatactacaaacacctctacgcaaataaactagaaaatctagaagaaatggatacattccttgacacatacactctcccaagacaaaaccaggaagaagttgaatctctgaatagaccaataacaggctctgaaattgtggcaataatcaatagtttaccaaccaaaaagagtccaggaccagatggattcacagccgaattctaccagaggtacaaggaggaactggtaccattccttctgaaactattccaatcaatagaaaaagagggaatcctccctaactcattttatgaggccagcatcattctgataccaaagccgggcagagacacaaccaaaaaagagaattttagaccaatatccttgatgaacattgatgcaaaaatcctcaataaaatactggcaaaccaaatccagcagcacatcaaaaagcttatccaccatgatcaagtgggcttcatccctgggatgcaaggctggttcaatatacgcaaatcaataaatgtaatccagcatataaacagagccaaagacaaaaaccacatgattatctcaatagatgcagaaaaagcctttgacaaaattcaacaacccttcatgctaaaaactctcaataaattaggtattgatgggacgtatttcaaaatataagagctatctatgacaaacccacagccaatatcatactgaatgggcaaaaactggaagcattccctttgaaaactggcacaagacggggatgccctctctcacggctcctattcaacatagtgttggaagttctggccagggcaatcaggcaggagaaggaaataaagggtattcaattaggaaaagaggaagtcaaattgtccctgtttgcagacgacatgattgtttatctagaaaaccccatcgtctcagcccaaaatctccttaagctgataagcaacttcagcaaagtctcaggatacaaaatcaatgtacaaaaatcacaagcattcttatacaccaacaacagacaaacagagagccaaatcataggtgaactcccattcacaattacttcaaagagaataaaatacctaggaatccaacttacaagggatgtgaaggacctcttcaaggagaactacaaaccactgctcaaggaaataaaagaggacacaaacaaatggaagaacattccatgctcatgggtaggaagaatcaatattgtgaaaatggccatactgcccaaggtaatttacagattcaatgccatccccatcaagctaccaatgactttcttcacagaattgtaaaaaactactttcaagttcatatggaatcaaaaaagagcccacattgccaagtcaatcctaagccaaaagaacaaagctggaggcatcacactacctgacttcaaactatgctacaaggctacagtaaccaaaacagcatggtactggtaccaaaacagagatatagatcaatggaacagaacagagccctcagaaataatgccgcatatctacaactatctgatctttgacaaacctgagaaaaacaagcaatggggaaaggattccctatttaataaatggtgctgggaaaactggctagccatatgtagaaagctgaaactggatcccttccttacaccttatacaaaaatcaattcaagatggattaaagatttaaacgttaaacctaaaaccataaaaaccctagaagaaaacctaggcattaccattcaggacataggcgtgggcaaggacttcatgtccaaaacaccaaaagcaatggcaacaaaagacaaaattgacaaatgggatctaattaaactaaagagcttctgcacagcaaaagaaactaccatcagagtgaacaggcaacctacaacatgggagaaaattttcgcaacctactcatctgacaaagggctaatatccagaatctacaatgaactcaaacaaatttacaagaaaaaaacaaacaaccccatcaaaaagtgggcgaaggacatgaacagacacttctcaaaagaagacatttatgcagccaaaaaacacatgaaaaaatgctcatcatcactggccatcagagaaatgcaaatcaaaaccactatgagatatcatctcacaccagttagaatggcaatcattaaaaagtcaggaaacaacaggtgctggagaggatgtggagaaataggaacacttttacactgttggtgggactgtaaactagttcaaccattgtggaagtcagtgtggcgattcctcagggatctagaactagaaataccatttgacccagccatcccattactgggtatatacccaaatgagtataaatcatgctgctataaagacacatgcacacgtatgtttattgcggcactattcacaatagcaaagtcttggaaccaacccagatgtccaacaatgatagactggattaagaaaatgtggcacatatacaccatggaatactgtgcagccataaaaaatgatgagttcatatcctttgtagggacatggatgaaattggaaaccatcattctcagtaaactatcgcaagaacaaaaaaaccaaacaccgcatattctcactcataggtgggaattgaacaatgagatcacatggacacaggaaggggaatatcacactctggggactgtggtggggtcgggggaggggggagggatagcattgggagatatacctaatgctagacgacacattagtgggtgcagcgcaccagcatggcacatgtatacatatgtaactaacctgcacaatgtgcacatgtaccctaaaacttagagtataataaaaaaaaaaaaaaaaaaaacaaaaaacagagatcccttagttaggtaaaccaggccctttctgattggttgctgtgaatctcctggttttttgaatactggctcattttgaagttcagtttcattatgtggcaccgaacaggagcgattccatactggttctgtctggtcttttggggcctagagcacagcctcagccctaaacaatggcttctcttccactttgtttaacagttctctgaactctttcaaattaacgtttccgtatggcatgagataaaggtaatggttcatttgttctccatgtggctatctagttgttataacactatttattgaaaagtgtatcttttctttattgaattactatcatatcttgttaaaaatcgaggatatgtgtgtaggtcaatttctggattctccattctgttccattgatctcttggccatataccacactgtcttgattactgtagcattataataaatctttaaataagggagtataagtccttcaacattgttctttttaaaaattcttttggctatttttggttcttaccattttcacataaattttatagtttgtcaagatttagcaaaagccctgtggcagttttgattggaattgcattaaacttatagataaatgatgactaatgggaacgtaatgcatgtcaaaatatgtaagcacatgtaatttaaatatttctggtagacacattaaaaagaaaaaaaaccatgaaattaatgttaataattattttatttaccccaatatatgaaaacatcaacctgtaatcaatataaaaacattgatatgatattttattctttttttgtactaagtcattgaaatctggtgtgtttttacacttacagcacaccttagtcaccttagtctgaattaagattcagactagccacatatcaagtgtttagtagcctcatgtggctcatggataccatactgaacaaaataactatagatcaatttggagataattgtcaaataaatagtatttagtattcttaacaaaaaatgaatttaaaagtgtattattaagtgtcttatttatctaaacaggtattagtgtacagttcttgcatgtactttgttaaatttattcctaagtacttcaggtttttgcgtgctgttattaatggtattgtttttcatgttttagtttttaattgttcattgcaacttatataaataattgaattttgcgtattggcctggtatattctgcaacttattgaaagtgtttactagctctggtatgttattttgttgacactttagaacttcctacctaaaaaaaatatgtctgtaaataaaagcagttttcacttattaaaaaaaaaaaacaaaaaaacaaaaaaaaggaaaagcatggcagggcaaagttgctcatttctattgggctatgactgggaaccaagagttagggaagttggtttcctacttgatgtacacaccagtctttgaggtttactgattacaggtacccaaagtgtgtgttcctgcttgccttctcaggttcctgtgtggatggatggttatcttaatgctggtaattaggctaaaggagccatttcacccttgtggggtcttagtgagctgataatagactagtcttggagttcagttgacctgtgttcagaacatgacactgatcagcactgtgacctcggacaagttaattcatctctctctctctcttttttttttttttttgagacagtctcgctctgtcgcccaggctggagtgcagtgatgcaacctcggctcactgcaacctctgcctcccggattcaagtgattctcctgcctcagcctcctgagtagctgggactacaggcacatgccaccacacctggctaattttttgtatttttagtagagacggggtttcagcgtgttagccaggatggtctcgatctcctgacctcgtgatctgcccacctcggcctcccaaagtgctgggattacaggagtgagcaaccacgcctggccaattcatctcttgagccttagtgtcctcacctgtaagatgggaatatccactttacagagttttctggaaaattagatgagatgaaataagtgagagtcataggtgttgtgcctggcacatcataggcacttggtaaacctgagttcatttccttcctttattgggcagcttcctggctcaggtccctatttcacataaattgtatgcctagcagcaccctattcattttataaattgaatatgagaatcagatgataagagtttgggaccatctttagcagatggtttttgttaaaggtaccttttgaagtgggggtagtgccgtttcatttcatggtctgtgttgtgtacctttgcagcatgtctttgtgatatgcagtgatgtgactggaatttcgtacagtaggatgggatactgaaagtaaatctgatcattggtagcacctttcctgtaattacagcacaggagagaggtagtgtgactatgtaaatagagctagaagtgctattgaaataactcagcagattctttaaagagaaaaaggggagaaaaaccccaccaccttccacagagacattcccatgctaggcctgcactgacactgcaacaccagatagacgattcagtttattttgctccaacattttacgcgttggtcagagaaaatggttttcattaacacaaggtaatgaaaaattttgtgccatggtatcatgtttgtaaaaagcttaattacattgttgctgtttctgttttgaacctaattctggtagtctgcgcgtagctggcgtgccagttccgggttgtgggtctaggcagttggagaaaagaagcaattatccagttaatgtaaagaatcctgctaaggaggaaagaaaggtgcccctcatgccctcatcagtcactccaattggtgtttatagggaattaagttctctggtaattgccctccttccctttcctttgtctgctagggccatcatcacaggccttaagtgaacaactctgggagtatttccggcctcttctctaagtcaggccagtaatgcagctgttaagcactgacatctgggtctcagtcatgcttccagaccaggattgttcttagttccaggagattaattgacccataagaaatattataatgcaaatatatgtttgcgccaatttgctgaccagtgcttgctatcctggaattcacagtgtggcagaatacaactgtctggcattaaggataacctaggtcttgtttccacttgtttccagcatgtactaatctagggtgaactttcttcacacgtagagagcatcaaagaggaaggtgttgaagcaggagccctggattagggatcaggagtgtggagtctggttccaacactgtcacatttctgctgtgtgtccctttccaggcccttaacctgtgctgggcctcagttttctcatgtatagaatgcagtaatcatagcttaatttctagccagctttctagggttgttaatctatccttttatcaaaaggataaaatgatatgttataaatgaagacaccttaaaaaacaaagcactctgcaaacgtaagatgttattaaatgtaaactcaatgacattatttcaacattcacattagagaaacaacatttgaagtcttctaggccacacacaagttattgtagagcttaaatttctctttggtgaagttcttttaggacagataaatatgcctcagggccagcttatctctttgaacatcgtaactggatattctttggcttcctttttccattatttaatcttactaaatttctcttttattttgaagcattgggaataatgagaaaactggaagatttcaacaataatgagtggaaataatatgaaggacctatgggaagagagaataaattatattaaatatattcaaagcaaaagatgagaaaagacattctttaaaaaatagtgataatgttaaaatatcttttttagaagtaatagacttgggaacagaaaagggatgttgttaactttttttttttttgaaccgaagttaacacccagcactgtcctttctttacttagcgaaacatacggtggaaacagatttctgtgatcttctgcggtctctgttactggccaccccattcatgtgacatcggcacacttggctcatttaaaaggcttctcagtgatgtcttgaaagcctaatcctttttcattttatctctttcatcctgcaggccatgatgaagttaattcgttttaactttccgagacacaaccacttttacaaaacaggaaaatgaaaggactctgaaaagtgtgacacagaatatctagtttgcagaatagactgtgcagggcgggaggatggccgacgacgggtttcatttaggaactcaaagtgaaaggacagggcaagaagtgtagtgaacaccttcagggaaatgccgaagagaccaactgttatttgaaaacttggataggttttggggccccagatccaagcaccttgttttgttgttgttgttgttgttgctgtttttgagacggagtcttgttctgtcaccaggctggagtgcagtggcatgatcttggctcactgctgccttcgcctcctcagttcaagcgattcccctgccccagcctcctgagaagctgggactacaggcacgcaccaccatgcccagctaatttttttgtattttagtagagacagggtttcaccatattggtcaggatggtctcaatctcctgacctcgtgatctgcccgcctcagcctcctaaagtgctgggattacaggcatgagccactgcgcccggccagcaccttggtgtttatggagatggcgatgtgccttgcttcactggggtatggatgggcggagtttctgttccagacttgcttgtcttccccaaccctgcctaccttctttagaggaggaaatatatgttcagtcttcatggagctaagaaaaagccagacagccgaggaagaagctaataattaggcttctttggaaggtatgagacaaattggcagcatggtcacccgggaaaacacagtggggctttgtctgcaactaagaactctagaaatcatggtgtctggataccacggggtttaagctgtggaagcctcagcctgcgtgtggaagctgggctttctaattggatcactggcacacacagtgctgttgcttcttctctgcccatgtcccccagagcatctatctgcttttgttactgcattgttatgaatgcccttctttggcgccctccacttttcctgaaggcaggctgggaagcagcccttggcatgtgtgatggctgcgctgcatgctggccatcgaaggatgtccatccaaggaaaagctgctctccctcagccctcacccttggcttttgccccaccctgcctcccaactgccggtgcattcaattccctgcctttgtccaaggggcaggacagggcacgaccactttggctccccttttccctttggaagccaaagtcactcctccagcttcagaactgtgagtttcttgtgcatgccgctggcttggtgggaatatgagaatgggaactctaactctcactgtgtgaagagttggcaagggtgcatgtgcacgctattgtgtgttatctgtaagagaactgcaaaaacaagtgtctagaattagattcagtgcttcaggaccccctctcctttctccatttagattcctcaacagaagctgcttttcgcttgattaactgtaacaaactctctttggagttttgtattttggaaactgcattgccaaaggaaaatcattatgtctgctgtaaaagccccaaataaattcctcctagggtaaatggaggaaaaagaatagaagggtttaatctatcatcttgcctattagtgaaatacttagtgacctagttcatttacatattaaatgtgctagacctatttgtgccttctttttttttaacttgttaccttggaaaccatgccctggctcagaaattacacaaggccaacagcaaatctgcagtctggtttcttcacacagacaagtcagttaatggggaaaggttagattgtcccaaaatgtcttcagtcgttagtagaaaaaggagaggaaggagaaaaagtgagaaacatgtattattttggtaacattttcaaaatactacttttaaactaattggaagggattttacctagacttaagaagaaaataatagtgtggactcttaaaacttcagtctgcttttaaagaactttcctggtacatttggcagcactggcatgaaaaggatcagctatcaattgacattgaattccagacctacatttaaggaatcttgactctctcattgctttgttgtaatagcactggttcttccagattgtttggtggtgtcttatgttctcaggccaacttttcaagagtctgagaagcagaatttaaaaatacgatttagttagcagctagagagcaaaatttcagcccatcttcccacctgaatatgtagcctgcaagttctgggagaacaaggaactttactgatcttctacagtgtctcatttcacagtggaggagattggcacccagagaggtgaaataaattgccaagggcatccatctggtttggggcagtctagactagaaaacaggcttcttaacacatcttgcagcatcatggatggaactggaggctattatcctaagtgaaataactcagaaacagaaagtaaaatactacatgttcccacttacaagtggaagctaaacaatggatacacatggacatagagagtggaataataggctgggcgcagtggctcacgcctttaatctcagcactttgggaggctgaggcaggtggatcacttgaggtcaggagtttgagaccagccttgccaacatgctgaaaacctatctctactgaaaatacaaaaaatggccaggtgtggcggtgcatgcctgtaatcctagctacttgggaggctgaggcaggagaattgtttgaaccccggaggcagaggtcgcagtaagccaagattgcgccactgcactccagtctgtgtgacagagcaagactgcctcaaaaaaaaaagagagagagtggaataatagacattggagactaccaaaggtgggaggctgaacgttgaagtattgcttgtttgttacagtgttcaccattcgggtaatgggtacactacaagcctagagtttgttgctatgcaatatatgcacaccagaaaatatgcacttgtaccccctaaatgtataagaattttgaaaaaactttttaaaaattaggttttttgactgcagatctagtgctctttcaacattagtcctgacacagataagtcacttgctttgagttctgtcagaggtaaagctgggtgaagaaattgtgagaagaatgctattctctttaagccagccaccagccagcttacttgggaagcggtggaaggaggacacagtgtatcctcaaatgttaaatcccttcttagtggtatttgttgtggatagaaggaattagattgaatgtggaactttgagcactctgaggataaattgtgccttctcattcaagacacattcaattctcttggtcactccatcttttctgaagttccttttaccatgctttgcagtggcgataggcctattgcatgaagagataaaatgtcttttaggctttttcctcttaaaaacttgggataagaacaagttagcctgaggcaatcacagagtctttataaagagacttttagcaaggaaatgatttttcaaatacagtacaggattttgggcatgactttgaactggaaagtctacatatataagtagaagatggtgtgtaatatctttgcaaatacttttgtgtattcattcctcatttgtaaatgttttcttacctgctgactcaagcactgacagtgtatttgtttgctcattcaactatggactgtgaacatgcttgggaaacagagttgagtattgtacgcaatctctgacctcagtaatacttaggcatatatgcttattcagtaactggacattttaaaataaaaagaaatgagtattttcactgcttgcatataatgggaatgattgaataactttcccataagatggcattagttcaagtgtccttattttagtaagagtatttcaggccaggtgtggtggcacacacctgtagtcccagctactcaggaggcagaggcaggaggatcctttgagcccaggagctagactccagcctgggtaacaaagaaagaccgcatctctttgaaaaaataatttggaagctctccgtaaaaatctcacctcttattttcctcaaaacaagctctggtgcattagggtatatagtagggtcccctggcctttggaatggggggttatttgagactggaaggtgggagtgggagagggagggggagccagggacaagcatggcaaagttccagattctctgtatttgtgtgaaaaatcacaaaaccctacattgactgtgtagtggatgtcagatgggaagagggagtggggaagcaatgaataatagcaatcacaggtgcaggagccacgtctcctcctgggcactttacatgcgttctctcacttattcttctttctcaccctgtgaggcttggtccagttgctattcccaaatcacccatgaggaacctgatgctgtgaagatcagcagcatggccaaggccgtgtagtgaagtgatgagcaggagttagtcccggtctttctgttgtctgagcttaccagctcttgccttcacacagtgctctctcctctcttatcaagttgaacgtgggtcaggaccatgaagttaattttcttcctccttttaatcatcaaaatggaatttctgttttgcctgttagagattattgatataagaaaggctgggcgttaaatgctgagaacacatggacacatagaggggaacaatcacaccctggggcctggtggagggtggagggtgggaggagggaggggattaagaaacaacgaatgggtactaggctgaatacctgagtgattaaacagtctgtacaacagacctccatgacacaagtttacctgtgtaacaaacctgcattttaaaagttaaaaaaatgaaaggctttatatcaataaataagtgggcctaaaaaagggagacaaaatgaaggaaaattattctggattcttaagaataaaagtgaaaatatcggactaaactgataaaatgaggtagaaaatagaggaatcacatacacagttttgacttccaacccactttgccttaagttatttcagttgacaagtcgaagttgggttgaggggatgagggtaggaggtgagtgatgtatggataaatacaacgttctattttctaatggtaagtatatctgccttccctccctccagtgcttttatacggtaccaaggaatatgttttgctttttgtctgacaaagggaattcacaactcataacagctatttgacatcttttgtgggtaccaagctcacttttcttctttccagtgataagtgccttaatagaacaaagtcaacataatccttgcctccagggagcttgcagtttaatgaggggggcacatgtttacaatatagtggggtcagtgctggggaggcattgaggaagaacttagtgtatgaatccatctccgaacttcagtgatgtggaaaataagctgttagaaagatatcttggacttcatttttcaagcagcttgaactcctcaaacaattgttctgcagacttatttgccacgagatttgtgacttgaagtctagtgtttagatcacagtgagctttttggagatgagatttgtgctcacatctgtggcaagtcaacgtgtggcaaatgcctgttttgactgtcaaaacggaaagcaaatctctttgcgtgattttctatgtcattttctttattagtgcacatgtcatgggcgtttcttttccttgcagttttgtgtgaacttaatcctagacagaacctcagtttgagtggttaaggctcagcatcctggtcagcgtctgagctgctgtcctctgggtccctgttgtgccgtcagctccagtggggatggcaccaggttcaggaggctgaagaagtgacccagagccagcaaacgcaacatgcggttgcgtcgggggcttacatacaggggagagggcccagcggctatgcgctggacaagagaaccgcaatcacttgcaaaagctatgcagtttatattgcattttcacttagtactctgtttaacgattccacctggcaaccttcattcatgccaaaactcggggcctccatttccctacagcccatgtcccacaagagatgggccgggagctcagatgttcctcatagacaaggaacagatctctggggtggccacttccagatccctagctcagaactctgaacacattcgggggcatctgccatacagaatcattcttaagagtacgcttaagttactgctatcaggtgcatttactgtatacccctaagtgacttcaacttctagtcagtctaatgaaatttgatttcatgcagagggtctcttagacaaaaattacatctataagcaaattactggctgcgcaggttactttgaaatatttctggtgtttttttaaaaaaatcagttaagctgatcagagacaaagggaagaaattacccttttctttttaatgtgcagcaaaatgtgtactaatggtgcaatcacagaatattaggttgttaatacaatcaataaaaagttaatccgttttggatttcattgtattatgtttttcttgtttgtggaataacgtaattgtgacagagtaattaataccctgcagagggattagccgtcaagattgagataaaagaacaaggagacaagagcagagttgcctagaagacaggggcgtttagaaagtgctgaggcatagagtttccttaaggtgattttttacctttcctgactctaattatacatttttgcatctagtagtgatacagctgggttggtaaaacatattattaatagaagtgagggagttctgaggtggatcagatttttccctttaagcttggtttccagccaagccaccggtcctcaattggtattttgctgtgtgttcagaatggctttttcacttctgtaatttacttatttcttattatttgttattcaaagatcttttggtcatttattctgcacaaatcctagaaaatgaaagccaaataaggagggattcccccaaatgagtactagtttttatatcagtgcatggtgggcctctcagtgccaacagattgttcccgttaatttttttttcccctttatattgactctggggtttctaatggtcagcctgtgctttcagattggagttattaactttgaccaaaacaggagtggtttgagaagaggcagtagagaggagaaagtggagatctagccagaatcttttgttttccacagaaattagagagggaaaagactataggaatcagactctgtcagccttgtcctttgtagcccctacccaggcagcaaagaggaaactgtcttcttcctgtacgggtctccaattggctgacattataaatagtctcagtggcaggtttctcatttttgaataaaaaaacaggttttcatgctaaattattaaacattctgtggtttggctttaaaatcaaataaataactctctttatgaatgcattagacaccctccctagtttccttttaattgtttgttctcccctgttcctcatcttggacttcaaggccatcatcttggtattctggtgtctgctcttctcttgctgacttctctctgggaaaccttttccaggtcggcttgttccactatcacccacctccctgtgaaggaagattgaagctggtgtagatggggcttcctgcctgccctggaagtctgagccaagagtaattttaccctcatctttccacagtgtgtataagagtaaaaaaggtcagctggacaacttgcctcgctgggatagagcagtcagagtcagatgatgtttctatgaactgttttgttggggtcagatggactcaactgtgcagtccacatcatctgcccccatctgcactgacctgatatggtgggtggccacatcctaaaatagtttctcagagactttgtgtgtgaaacatacatataaatgtgttcatgtttataatgttggtgtgcaagagtttattttgcttaaagaagataatggaaattttggtttcaactaacatatctattttctctccactaatgagtatggaaggttttctcctagatgaaaacatggagagaatcactaataagaagagaaagctgttgagtactgttaaaatatcacaaaacagttactattatagtcatatatatgatacgttcattcttttagaggataatttaaacattattttgggtatatagggttttaaaaaatctattcagcatctaatatgaatgtgtgaaaaatttcacataaattttcatatagtaattgggaccaaattatttgctgtcttttgtctctttcacattgtttatgaagatctggcttgaataaaggagtcaggagctttcgccttccatagctaagcccaactgtcctaatgctgcataagacagctgggattagagaaactcttgaaaagcaggattggtaatgggaagtgatagctgtgtgtgaaagccttaatgctgaagtgcattcttgtaacgcaattttcttgtctgccttgttatcttacaattttagtgggaaaaataataacaatgttatttcaaagaaatggttaaaaaatagtcaaacttaatagaaagcagagccctgtcctttggttaaacactcatttactcagctctctctctctttttaaaaaacagaaccatgaatccttcctgtacagttgcatgggttgatattaactctctctcagcttattcactgtccacctaaaagaatagtacagggctccagaaatgtaccttgctctggtttataggtaaaatgctgcacttgggcataggtttgtggagggtgagtattgtttctcttcctgtgatgaagattgatggcattcctgataaaggaagaagagcgtgtttgaggatgctggaagatgctgaagtgaagctgagaacgtgacggccagcctgggctcttgggggtggaggatggttgtggatgctgtgttgcagttgactatgccctttctggaggtgtacgggtagcacctgttctgctctaacagctttgtggggaggacagccacccaccagagccccccatccagcacgtcttcctatttccttggtattagtaactacatgggggatatttatctatgttttaatgcacacaggctagtgcagtcaagggtgtggggcatacaaaggtaaaaaatagatcattgttaccctatagaagctttcagttggcatgtgtagtgggaggtgtgctttagggaggtgtcatatgtaacttagaggaaagaattcccaaggtggctgagaggactggggaggtgggagagtctgctttggatctggaggaaaagtggcactgtctacctaagagaatagtgccaaagacaatttgcacagagtttggcatataataagtactaataggctaggcacaggtggctcatgcctgtaagcccagcactttgggaggccgaggtgggcagatcactcgaggtcaggagtttgagaacagcctggccaatatggcaaaaccccatctttactacaaatacaaaaattagctgggcgtggtggtgtgtgcctgtaatcccaggggtagctgagacaggagaatctcttgaacccaggagacggaggttgcagtgagccgagattgtgccactgcactccagcctgggcgacagagcaagactctgtctcaaaaaaataaaataaatactaataaatacttaatgaaagaaggagaaaagtctagggaagttattatttggggaagagctaagaggaattcatctgtgaatagacaaactgaatatcattccacgattactttcactttaaatgtaagtatttaagggtaccgtgaatgaattccttcacagatgtgttggctctgcagggataaaggtgatggggtttccagttcatgttgcaagttcatgtctcaaggggaggttctgtgagacttgggctgtgtcctgaccacacagctttgcataattgattaattctgcataactgcttgcattcctttcctaaaataactttcactttctaattagctctccagaattaataagtgccaaaaaataggatgtgtgttgaatcttgtgatctaatgtgatgctgccaactcacacagatttaaggtataattaataatgctgaatctctgagggaattcttaattcctgaattggtagacagatctctaaaaagtagctaatacttattgtgtttaccatgtgccgggcactgtgctgaggactttacccagtttacctccttgatctgttttcattatcacaaacaccctaaggattagtattatgggtatctccatttctagagaggtaaagtcactcacacagccaattgacacagccagtgaatagcagaactggatttgggctgaaagagtcaggctctggagccagtgctcctaaaggccatgtgacattgcttctcttttctttctctggggtgttccagttttcctcagggcttcgtcattgctgctttctacttgctgacacttttgtcaaatgtgataaacagcaaaaattgatacagtacaggtccaaaataaacggaccctgataggtaccacaggtaaagttgttggcaaatgacatcacttatgtaatggtaggtccttcactggaggtcaattatggagcgatgctgtgagggaaaggtaggtagatgtctctgggctgggagaaggcaaatgatgaggggacttggagtttcagggggggaaacaataaagattctggttggcaagtttcttggcaaattttaagggtggtaaacattttaaatcagtatgtcagtaacttctgcatgagaagtgccaggtacttcacaaaactttaatataatgtgtgagccttagggttgaaagtagggatggcactgcttctggcttctctgttaacagaaatatgagagagaagtatgaataattttttctcaaattgagttttagattggggtttcatttttcagcagaatataaaacagttattttctatttccatgaataccaggaggggagacttaataaaatgcagtaaatatggccgggtgcagtggctcacacctgcaatcccagcactttgggaggccgaggtgggcagatcacctgaggtcaggagttcaagatcagcctggtcaacatggcaaaaccccatttctactaaaaatacaaaaaattagccagatgtggtggcgggtacctgtagtcccagctactcaggaggctgaggcaggagaatcacttgaacacgggaggtggaggttgcagtgagctgagatcgcaccactgcattccagcctgggcgacagagcaagacactgtctcaacacaaacaaacagaataaagtaataaataggtgtatgctgaaagaaaaatcattcttagtcctggcctttttttgagacagggtcttgctttgttgcctaggtatcatcacagctcactgcagcctggacttcctgggcccaagtgaccctccatcctcagttttccaagtagctgggactataggcacatgccaccacgcctggctaattttttagttttttgcccaagctggtctcgaacttctgacctcaagcaatcctcccatctcgacctcccaaagtatgttgtctgggattacaggtgtgagccactgctcatggccccatgacattttttaaatcaaaatatctagataaaaatcaacatattcagacaatctaatttggttgatatacaactatgtttttaaaaattttccctttttgaaaaaggcaatatttgtggtgattgtagacttagcaatgtaagtttaagttttgtaacattgcaggttgattttgagttaattgaaacatttgaagtttaatatgttggcaaagtggattgtgtacatgaattgagggggaaagaggaaattaatactgtttgattttttttttaattttcttgtaaataatgtgaatatccagaaagcaacagaataacctaagttatcagaggctgagaaaggacataaaataacctttattattattattgtttttttagatggagtctcgctctgtccaccaggctggagtgcagtggtgccatctcagcttactgcaatctgtgcctcccaggttcaagcaattctcctgcctcagcctcccaagtagctgggattacaggcatgcaccaccacacccagctattttttgtatttttagtagagatggggtttcaccatgttggccagatggtctcgatctcctgaccttgtgatctgcctgtctcagcctcccaaagtgctgggattacaggtgtgagccaccacgcccagccacttttttttttttttttgtggggtggggggcgcagatggatgggaatggcattgaatacaatattcaggatattgtagatgaaagaggaaaagtttctagaatattatgtgactgttgtgggaggtgttgaatattataaataaggagattttgctgctgttgtttttgtttctgaggaaaagaaacccttggattagccccagtggttctggctggtgaaattacccagtaaataaccacagacgtctcgttagcagaaagagagaagggaatcagcagaaagagctggggaacaaggttcactgggggctttcaaacttctcaggtagtatgtgtattgaagagcttagatctgaaagattaggagttatattgtctcattgaaaagagactgacagtatgggctttaaaaaaaaaaaaaaaagagcccgccagcctgttagagatatactatgtgctcaaatacttttgtgaaaaattcagaaagcctatgtataaatctgagagagaatgtgtgtgtgagtagcgattatctctgatgacttacatattttaaataattttctatattttttgttttccagatatttgtatatatggatccattttgttcatgttgagtttgtactttatttttaaaaatttgccactacattgtaagctttccctgtgtcatgaggtgttccttgcagaggggattcacaagactctgtttccttctccactcagcgtgctggctctggctctggctctggcccttgtctgcacctctcagctcctacactccggagtctgtgcttttcctgtggcccagaacattccagctgccaccctcttcacctggctagctcttaatcttcgtggtgcccttttcttttttaggaggacttaaatgcattggacagtggacaaagaccatttaaatggattacaaaaagcagacttcaccaggcagagcggcctctaacttcttcagtaatgttgccatttaccatgtgtctgttggggatcaggtccgtcgctaggcacccttcgtgcttttaggtaatagtcatagctaccctgaataagggtgaggagatggcattcccatttagaaaagttgaaaccaggattgcaagaagtgtatgagccgggatgggaagccaggtctgtctctctgcccttagatcacgctgctgttactattctttgtgacaccctaggacattgccgtggaaggaaggggagaaaccttgatagggcccttggatgaagcactgcagcttatgctaagaagatcaaggccctgttagactggaaacattcattgtaagacctagtgccataaggtaaagaggtctctaggagaatgctcaagatctctgagggataactgttaaatatcctgtaagaattaggcttaaattatacacacgtgagaaaggtaagtgctctcagtgcagggggtaaaataaacctttagtgaaactctatgacgaggaaccctgcccatcaactgttggtaagtttagaaaaaatgaagagatgcaattcaaggtcagtaagtaggtgaaatatgatgtgcgcataaacctttaaaggtttgagaggttggctgtttttggtaacgggttaacttgaggattaatgagtcaggatatatggaaagttaaaattcccttctctgcaccattcaattcagttcaacaaatactttcccaggccaaatgggatcattagccttgtaggaaactcttggcctttttaaaatgatgacattgtggccagttttgtaaatacagttgatgcgtgaatctgtagaccaaggatcagattaattttgtaatgccctcagggaaggcagttgatgaactggtttctctgcatcataagagcagtgttaatgatccacttgtaccatgagattctaacattcctgagttacctaaatgcttcagtgttccctgccatgtaattttaagctgtatgtacatttttgggataatttttatccatattttgtttaaaaaatgaactaaaccaaactaaaattcagaacattttgtacttctgcttcttattaagattgtttagtccttggtgggtgatgtgagaagatcagtacttaacagtttgagaattcttgctctcataaatcaaaatagtattcgatgacagttttcaaacagtttcaagtgatgatttagattctcttgtagttgttatctactttagaatagtgttactatgatttaaaagttggtatttcggctgggccatggtggctcaagcctgtaatcctaaaactttgggaggccaagatgggaggatcacttgagcgcaggagttcgagaccagcctgggcaacatagactctatctgtacaaaatacaaaatttaaaaagttgttatttcatgagtttgcatttttaaatgcaatggacaatagatagaactgtttataagatatatttgcttgtatgtttttctcttcatattacgaggtcaaaccacagaggaaaaataaaatttggaggccctaagcctatttacccaatgtctcctagaagagcccccttcagaaacttctagcaattgttagtgttgcttgggttaatagccatggtcaaagcatgaacagaacaaaataaaaattttctaaatataaaggaaatatggtaataactgagaagccaagcattaataactgggaagccaagcattctctcaatatcctctttctccataagaaacgtgtagcattttccttggagaagggtctatgttacttttgttcagcccttgatgaaaacaacatatggttagttttatgaggacttagagacagatggtgacctacaggctaattatgcagtgggcaagattctttaaacaaatcactgtgattgtgacatggccctttctcatgagttagacaatctggactgttcattgtcacactaggtaaacatgttccaggtgaatgaggaagaggtgctacgtgagggaaatgtatttacaacatcttttcatctccatatttactttaatgggtataagagaaaaggaagtcaagaaggtaaaaggggagcacactaaaacctcagctagtgctaggattgtgttattttggacagctaacttttcagatagctgaggggttcccccattaagcataaacgtttttcttttaatcactttgaatgaactctttctgaagtcttccttgccctctgaaaacagaatgtctgagacgtagtaggctttatagtgtttatgatcttacttttcctgctttcccaaacgtaagcttcatgaaggtagcggtctcagtctgttctgtgctgtgaccctggcccctagaacagtgctggtacacagccacattaaatatttgctgaagtaagtgggaattaattaaagctctttaatcttcacaactgtgtcactgtccaggctttgttctccctgtttgtagattggtcagggaccctagagtgcattgtgcctatgcttacggtcttaatgtccctctgccccagtgtggtggctcatggctgtaatcccagcacttttggaggccaagaccagcggatcacttgagatcaggagttcgagactagcctggaaaaaattgttaacggcgaaaccccgtctctactaaaaatacaaaaattagccaggtgtggtggtaatcgcagctacttgggaggctgaggcatgagaatcacttgaacccgggaggcagaggttgcagtgagccaggatcgcaccactgtactccagcctgggtgacagagttgagactgtgtctctaaataaataaataaataaataaataaaatgtctctctcattatattgtaattgccttttcttgtctctctccaccaccggactgtaatatcattgacagcagaaattttggaggttcactgttatatccacaatgtctggtagtacatattgttacttgtttcttgaacgtgtgaacaaactaattcaccaaaggaaatggtcactgccctgggtcctttcctttacaaaatcgtatgatgtagatagtttgatgcccattttacatacacacagctgagaggagcagccgtgatttgcatccaggtttgtcagcctcaaggctaaccttccaccgtatgggtagctcctcacctttacacacacaagtgccccctttctgatgtcaaattttcctaaccttgcacagtatgtggtttttttttacttacctcacccagaatggtataataaaaatgctgttatcagtttagtagtgcttttagttactgtttttagtcattatactaacattgtaaatttgaaaaaaaaaaaaaaaagccagaacggtttgtgggagaacttcttgttggttgcaatgctccaggctgcctggggtttgccagccacccccctgcagtaaccctgtgcacttcccctttccccagactccctcctccccgccagcagccccttctgcgctcccccgtgcagcctgccctccatgagtggccacggacttcagggtccacgcggttcttcacaccgccctttatgtgatgtgtgtcccctccttggctgtctggttttgcttttgtcagtagggctagtggccagcccatctccattttgaatttgctgttttataataagcctttgatttgaaagccagatgatcagggctgctagaacttgctagaatgaggaaaatagacaagtggtccattgacctctgagtgagttacagtaacttttactacatggatttctttttttttttgagatagagtcttgctctgtcgcccatattggagcgtagtggcgcgatctcggctcgctgcaacctccacctctcaggcaccctgagaggccctgttctcaggccttctcagggtactggtaggtgaggccccagcacgcgttgctcagagccagtttggctcaggtctgtaggaggtgcgatgtggacataagtggggtggagtatgaaagaggagagatggcaaaatgggagagcgtttacctggtcaagggcttaggtcacattaggttctcaaaggcaaatatggcttcatgtggatactttcttgagtccatctctctctgtttctgttcctccctctgcctaacctatcctggctctaagctggctcagacactgcgtttgtgtcttttcacgtggcatttttcttttttccctccaccttgctaagtgctgaaatttgcagtcagcatttatatatgccctatagacaaggcacatttctctagttttacctttcttgtcatttgtgatcttttaaattttcagtcaatggaaagtaattgttaatatgaattgcagtttggaaactttgtgccagatgatgaaactgaatgaatctgtggtctttacgtaggcagtgccttacgtatggtttggtttttggcccatgtactagatgtttgcctttctgtgggctgtcacagatctggcatgtacctttatttttttgggagtttctacatgtgttgctgcaatctctcagctaagagtatttttcagtcctcttgctatttgttttttaccacttatagggtgaaaggaagtaaaattagataggattttgatgtttgatttaaaaatcaacatttccatgaattcaaaacttcaagaagatgaaaggataacattgattcttctgtttaaagaaaattgatttcctttggctgaaaaagttttgttctctctctcttggtgttcattattttagatgttccctttggactctgtgcacatccccatcatagaacctactatatttactatgatagtaaattgacctctctgccaacaccactggaccatgtaagttccttgaaggcaggggtccctagtgacaggcagagtaatatctggtacattgtagacactcagtaaatgtttgtgaaatgaatagagtgaccaagcaatctaatgaatatggtcctatcatggtcccaaccagtcattggactgagtatagttttgatggtgtcatctcaaatgaacatatctcaaatcacatccaggttcagcaaattttcttctctgtcttgccaaggtgggggccccactctgagtcccagagatagaaactccagtcatctttgcatttcttttacttccttagtgtctcttgtattttcctctgtttttctccattcctactgcctctactctagtttacactgttggtcaccttatgtctgtagcctgtgagctagcttgctgacacgagcacccccagccatcctgcactctgccgcagccagatcaggctgcctcccacatcccttctaataggacgtccctgcagatggtcagagtgggttttcccaaggagttctgcagggcggtgtgttccagtggacatccttggtcccctgaggaccaaggcttagaaactgattttatgagcctagccagagctaatctctccatcgtgttatcccagttcaggaagtggatatataaaaccagattgtctgcttactgccttaaaatgagaatagaactgtttctatttccatttcatggcctgggattctggtgtgggaacatctagtacacattttcttcctgtagtcaggccttcgtgggaagccaaatcataatcagatgcttacttggctggtatggaataaaaacaaagagaagtgaagtgtcagatggcatcaaggttaagtccgaggcatccatttcacagtcaggaggcttgccagtgggaataccccaagtgagttggcttcagctgcctgcatccttctccacagtgaggctgactttgccagtgggtcctgaccctccaaggctcaggaggttgcctcaggccctttctcactacatattgctgggagtggcaaggccattgctgttctctttgactatctgctttcctccactttcaaatctgaccaagcccttctgattgacattcttacccttagatataatactttcaattctttagggcttggagctgtttctccaggatgattttgcatgtcttggctttttaaagtttaactctaagagcagtatgctatctttatttcaaagcctttatatcttctctccctcactcaccatctcctttcctcaaaacccttttaagccctaactgttattggtgggagtctaaatttctttgcctagcctctgaggtcctctgtctgcctccctgagtgatccagacttcttttcttttttttgtggtgggttggtggtgggctgggggtgggggactgtcgcccaggctggagtgcagtggagtgatctcgggtcactgcaacctctgccttctgggttcaaacgattctcctgcctcagtctcccaagtagctgggactacaggcacgtgccaccacgcccagctaattttttgtacttttagtagagatagggtttcaccttgctagccaggatggtctcgatctcctgacctcttgatccgcctgccttggcctcccaaagtgctgggattacaggcgggaaccaccgtgcctggcctccagacttattttctacttgtttccctgtggaataagaggactgggtcagaagccccagcataagtcattctgtctgtctgctggagtttcctgagctctaaaaacccatcttgcctatctcataggattgttgtgagggccaaatacagtgacaagtgttcattttctctattggtgcaagattctgcgtaggtgatgtgactccttttttttaagctatcatatattgagcccaagcagtgtgcatgtattatttcatttagtcctttcaagtagatcctgttgtcatccccattttacagatgaagaaagtgaaactcaaagaggctagagaagtctcaggactgatggagaccagatgagtctgtttaatccctttagtctgctctgaacttccagtacccacggctatattggactgaacactcgcctgaccaggccccccgccccgccaccaccgccaacaactaactgaactcgtttctacttctctgacccactgccctggccaaagtcctccctgcctttccaggcccctttcaggtttcctctctctccttttgtgtctagccctcattgctcaccatcatcttctctgacctcctgtggtacttgaggacatactggaggcagacccatctgcgattacatcccaaccgtgctgtgttgctttgaacaaggcagccacatctccgaaccactgaaaaaaggcataataatgatagctggatcctgggatttctggattctgtaaaaccaattgtgtaaaagttctttgtaaatggttagatgtgcctggtttcttcagtaatcagttatttttgaaattatttttaatttgtcccatagtaaggaatatattttaatgttgtgatgggcacatacattttaattaagagttccacaggaacattttcttctttttttgtgtgtgttaaaaacagtgtttattttgacccatttaattgattttgactatccactgtaggaggctacccacaatttggaaggaaccatcgggcctagatgacaataaaccctttgagggcagggaatgtattttgcacttctgcgtcctcataggcccaacaggttacgagaagatccagtctgttgatggattttgtgctgggagtaggcaggatggagagacttattcaaatttcaaattatttattgagtgcccctttgcaagaattggccagttaaaccctggggggcagctttgtagctgcactactcgggagcctgcaccctcttgaagacatcatgccagcgtctcctgcacttggccgtgtaggctgcagcacagctgtttctgctacaatcagctccagtatttgtattcctcctcttgaggccgaggcttgttcgttggccccagggaatgtgttgtgttggggtttgaatctcctgtcctgcgtgcggtgcccctgccaagggctgtgcacccacctgtcccagatgggtcttgcgtcatgttttccctgctatgctggtggtgacagcatcctgctgtctcagagtaaagctcagctgcatatatgccacccgccctcctccacagcatccaggcttccagtgtaaaagcctcttacaacatcaggcgggagaaaacaagcctgccgcttgtggtgccttagcaccaatttgtcacccacttcactcagccctggccccctgcttctcctctgtatggtatctttttttcccatggctgctccagctgggctctggcctgacactggaatcacatgttttggctctagcctttggtattattctcgaggttgtcagcatacatccccactgccatctttttctaatgcaaaggtcttttcattaatggatattttttcctgtgagacttgtttaggggagagatgcatccctcatttccccacccccacccgccataaggtttttacaagccaagctagagattgctttccagccactttcagaaaaatgctggggctccactttgtgtttagcacaatcagcacacataattcttgttctgcttgggctctgttcaatgtcacttgctcctcctgaccctagaaagagttgagaattataagcacggattataaggactcataatctcagttgccagagtaagggaaataacgttttcaccggttccctgaaatagacctggcggacagctgttgcctcccctcccctttcctctcatttcccctggagatgtactctgcctgtttcttctcctcgctaaaactaaggaactttcccttgtgttttcttttggcttctagattgttcacttggctttttatctaagcttgtattaaattgcttcatgatctgtgcctgcagaggctttggcataacatggctcacagagaagtgttgtttgttgtggttggaccactttgttgcagcagcatctgttcttgtctgaatggggcatgcaggtgaagcatgtactctaggccactgaaaaaggagggaacacaggcacctggactgaccattggcagctgtgatctacttatgtgactctcagacagcctctcagctgcttgtgataaaggctacaaaattccaggcagctttttggtccccataacaagtatatataactcctactttaagcagtccaaatttaatacagagcaatgggatgagatgtatgtaggtggtgtcacatccacaagaatatctttaatcattattcttttcagcaattcagtttcaagaggaataagtgaatttaggaaatttgtatatgggaaaacattgtcaatcagtaaatgcgtggtctactgtgtatattttctcctcagttctttaaggcccccaaaatgggatgaaaatttgctcaaaagctctcatgcaaaattataagaatatggagatatattaggaaatggacagataaatatgctttcaagaatcttattaaagtgctcaacagttatatgaaacatgcaagtataagttgaaaatttaactgacatgtggacattgaatgtttctgtgattttaatgaaaaaaaattcaaggaacaagggggaaaaacaccaaccgtcaaaaggaaaaatgccctctatctactcatgcaaatagtccccttgttcatagcagtcacaaaggatatgacgagccatattgtgcaggatccaaggttcatgagaagtaggtttgtaggtggcaggtagtgggaaagtgatttatgtcccatgaaaacccattcagctgttgtagcacttccagggcctgtgacgtgtgagggagccattgtcttaacactcagggtgaggacaaaaaggcttcagttgctgaaaggtgctggtttgagatggtgatatcctgtctctttttccagcagaagcaggaacatgatgtctagggtttttaaaagaaaaagcttttgttcttttttatttagtgacagtagaaattaaagtagggccttaaaaattagaaacacacgtgaaccccagggggcgaagcctgcagtgagccgagatcatgccactgcactccagcctgggtgacagcaagactccatctcaaaaaagaaaaaaaaaaaaaaatttagaaacacagtcaattttaatgtcaagacccaagcctcagcagttaaatcggatgcctccttaaaaaatgtgtgaaagttatttaccctcatttcaatttggggcaacaaatgaatggctacttaggttaggtgtgggaagcattaattaataatgggataaaaggactcagtgagattaacttagatcacctatatttagcttctgattttacttcattctgtttgcttctttcattaatctaaattaactgccagaattgcatttattagtatgtaggagaacaataatcaagaagtgtttttatttatattcgtaggaggctatgttgttattcatgtgattcttagaaaataatggattttacacaggaaaagatgtttatacttttcaaagatcttactcatttggggtaagaatttgatagaaatgctaggatttggtgtatagaaaagcatgtaaactgtatgtatcatttaggtttctaatgcctgttattggctttcatgtaatttggattgggagtctagaaggaaggcagtgataacaggaggggctggggaaaagtgaaattgttgcccatttcttcaatatagtgtgataactgtctcccatttaattttgtctcatcacacgttttttgtgtgtgtgtctgctttttgccaaaaagtacttactggttctaggcctcaaggagcttatgatttagcacagattttctcagcctcagcactgttgacgtagtgggccaggtaattctttgtggtggggactgtcttgtatattatagaacatctagagacttccccaacctctacccactagatgccagtgcacccttccccaatagggtgacaaccaagatgtctccagatgttatcgaatgtcctctcagggaggcccagaattgcctccattttggaaccactggtttgacacagcacgtcttgctatagaaactcactagcattctttgccattacagctgttcagttacttatgcttatttctagttttggaaaagccatttgaaaatgccctgaagtgatttttattccattctcataattcttgaaaagtgtgtggaaagctagaggagaactgttaactgtgtctgtgtgcatgtgtatgtgtaggggtgttttcatcattgtcatcgttattttatgaagaaaatggaggcctcaaatgtatgagccaaaggacaaacactgagatgtccatgagaaagcagggcgaggactgctttcaggaagttcctgatatttcctgtattaacacaatctgttaagaccctgaaagcttagggcttaataaaatcgttgagatcttaaatgtagaggatgtaagattttttatagatcagctttaaaatgaagcctaggcaaaaatgaagtagatttgcccctcttcaccctcacctgccttctcccggtttcttctctttccctcctctcatctctgcttgctctggcagttcctttaacaaacatattgttatgtgatgactttgatgaattacaaacaggtacctctctttcaagatacattatattcatctaccaaaaaatggtcgtaatagctgtacaaagctgcagtgacccacggtaactggagccccaggagttgtgcagtgcacagcttgcacagcagtaagtggtggctatgtttgggcagtttcattccctcccatgacattagctttcacctgaatgctgttctgtttttgaccctagaccaaaccttttctgggaacatcatgcctatgtaagctaccttttggacacattcttcctagaatactctaaagcatcccaagtgtaacatatgcaaaattgaattactgttttccccaagcctggtttttcttaaatttaggagtcgtcttagtctctctttttatatacttatatacacacactatacacatacacatgtatgtatcacaagccttctcagtcctccccgtatagttcttaaatcctgtttttttgttttgttttgttttgttttgttttgttttgttttttgagacagagtctcgctgtgttgccaggctggagtgcagtggcgcgatctcggctctctgcaacctccacctcccaggttcaggcagttctcctgcctcagcctcctgagtagctgggactacaggcatgccccaccacgcccaactaatttttgtatttttagtagagatggggtttcaccatgttgtacaggatggtcttgatctcctgaccttgtgatccgcctgccttggcctcccaaagtgctgggattacaggtgtgagccaccgcacccggcctgtgattttctttctacccctgctttcctcctgttgtcttatttcagttttcatctcctctctcctgaggcctgggccattgcagtcatctactacctgcttttcctgtccaggtatcacaccccttcaagcatgtttcaactagaatgctcttgtaaaacacaaatctggccttactgtttcccatcagagctctttgaattccttctgttatgccatagtttatgcctcctttatagccttatttataacctcatcccctcccctcaaatgtctaggcattcaaaatctgcaaagtgcagggcctgttctaggcactggagactcagcagtgaataaaacaaagtcattgccatcatggagcctacttttgagggggctggactattcgcagttctgtgagctgccatgctgtttcgtacctttgctggaatgtgcctgcccacagctaatcttcctggacagtgtctgctggaatttcaggacgcagcgacggtgtagtgaccccactagcattaccactcttctttttatgtcttccttgtgttgtgtgcttcaagcttcctcttcaccagggcctggccttaccaggctttgtgtttccagcacctatagtagtgctcagcgcataacagatgcttctaaatgtttattgaatgaaaagcacacaagcatggaaacactttgggatccgtgtccctcaaatgtgtcatgtattttcttcctttctttgcttatacgctttccactgccaagaatatccaccccaaccatcctaccaggcccttataagccacttgccccattctttaaagtgtcgctgtcataaacccctgctgaacccttgcctcaattacttattgacctacttgcttttttcatgctttcagtagcatttattcaataaatactgaatatctaccattttccaggatttgtgccaggtcctagggatatgacaatggaaaaagatctgctaatattgtatttttagtagagacaaggtttctccatgttgggtcaggctggtcttgaactcccgacctcaggtgatccgcccaccttggcctcccaaagtgctgggattataggcgtgagcctggatgactgtcctttttgcagtgatgtataggcccaggccctttccacgttatggctctgctagccccattgtgttccgttttatgtgaaagggtaaagaagagagcatggagtggatatatttgtttcttaaagccttgcctcagaagtgacacctaccacttctctcacagtccattggtaaagacaagtcacaaagccactcaaactgcaagggcagctgagacatgtggtctagctgggtgaccagaaagacaaaatggagttttggtagacagctaccaaactcggccacatacctcattatactagctgcaaactgtgttatcgttagttgcctgcatattaattagttccttctgcttagaacacttttatctagaatatttgcaacatttgccactcacttcatttaaatctcagctcatctgaaacttcttccaagtgtaagaccactcagtctggaaaagctccccatcttcctacactgccttttttactttagagcccctgtcacacattatattatatatatagtttagtttattgtgctcccctgcacaggaatgtaagtgtcatgatggcacagcatttgttttgctcattgttctatctacagaatctagaagagtgcctggcacttgtcttcaaggattatccacatcctgaaggcagagctttgttgttcacatttcagtgaatatttgctgagcggagcctcatgctagacaggccttggaggcacgtcctaaacaaggaaaacacgccccctgcctccctcaattgaagatattagtctcttcaatctcattcaattttatttctctgtgcttagcatttagaagcaattaaatatgtttgtggaatgaacaaactaattaacagcatatttagaaaatctccctgtagtaaatatattaaagttttagaaaatcatgataatctaagtgaaatattttacagattatggggaaaacatgagggatgaaaatttaccctgctctgctttagcttttgaaaaagtctgcttatgagccactctcttcattgctaataataacaccagtgggggaaacttgaagaaagaggtatttgtcaccaaatggtaagttagcagcttgtcttgttatctgggttggaacacaaagtcattaagtggcatttggactaaatctgattggaatttagaatctacttggagacaaacaaaatatacttctgcttagaaaaattacattttccactttaagatgttgtggattagaaaatgataagaattaattttaagagaacgcctgttttttgaaaggattggttatatgttggtggaaattcttcagggaagtgacatctctggagggggaaacacaaaaacagctcaatacagtcagtcaatttattctacacttaaggaaaaaataactaagtctgcttgctggttttctgtgggctgttaacagctggttgactcaaatttctgctttctaccaattgtgaaaattaagctttaatttagaggagcacctggatgttgagactctgtctgaagatacaggggctaaaaatgttcagattctgtctgaagatacaggggctatggcttgtctatggttacagtttttgcaaatgcagaaaagcttttcgagcctacttatgttatggagtatttccaatagtggttattaaagtaattcaaggaaaatcagtaactaatgataataaaaaagttgccttaaaatagtgttcaagaaaatagagtgtgtatgtcatattttagcacatagaaaggcttaaaccctcttgtgaactcctacttaaccatttctttattatactcttcttactcagatttataaattttccttcctttctgcaaaaagacagagataaataaagatactaacttttccccgtcattatatcaccccattaccctgttatgacagtaatattcatgttgaatatccggtcatgtttagccatttgtattgtgtttaaagttattttttatgatttccaaatttgaaatactggaaaggaagatcccagcctgatggaaatttttaccagaatagtgattcctttttgctgtagaaaacatgggagggaaattgtcttagtgtcgttactgtctagtaatactgtttgaattcttgaaaggcttgtttcccacggtgttttactgcattatattcatggaagggaacatgcaagccagagacagtacaggttttaggcaaagaggcatgggttaggattctgctctgccactctgaagggagttatttcttctggcttattctgtgtctttgttatttaagtgagggcatttacaggacctacatcatagagtgctgggagattaaacaagaagacattcacaggttatgccctgctgctaaagaaaaggaattaccattttcaatttgttgtctaaagaccatctgaaaatcttgctgtccctcagttagactctggcctatccacagtaggtcagcttgcccacatgggtttcaagcaactccactctgctctgaggctcgctaagggtgaacaggtgatcatgaatgtggaaggctgaagaagaaactggaaaaagctgaaactgaatatcagcatttagaaactgcatttggagtgctgagataatagaaagctttcaaggcactttggaactctacatatgttaatcaagagcctcaaaagcagcccatcgattggcaaaccaatctcttcaagtgccaccacattaaagtccctggggaagctgtggatattagctagcagcggtgcacaagccgtttaccctcccttcgctgcaactttaaaaactttttgcctaataatctctgttctaaattcagtatggatttacttagccagcagattgagatccagggggacagtgtgagacttggaagagttttatatttacaggaaagttgcaaagatagtacagtttccatttactgtgcacccattttcccctgttactaacaccttatgttagaaatgcttgttccctggtgctgcagagaaataaatgtatgagcattcgaacatacatttaataaaaatggccttgctaagatgattaaatttatgttcgagtgctgtttctttgcgtcaccggggaacaagtatttctaacaccttacatgttaatatactgcatttgttacaactaatgagccaatattgatatattattattaactaaagtttgtaccttattcagacttccttaggttttacctaatgtccttttctgttccaggatctcaccctgggcactacattacgttgttcatggtttcttaggcacctcttggctgtgacagtttcgtagacctttttgtttttgatgatcttgacagttttgaggaatagtgtttaggtattttgtggaatgttcctcagatttgtctgttgtttttctcatgattagactaggggaagacccacagaggttaagtgccatttttgttgtatcaggggtacatcctgtcaacatgacttatcactgatgtgatcatgtcaacataatcttgatcacgtggccgatgcaatccgctgccagatttctccactgtaaagtgactcggcccacctcctttggaaggaggccactacgtacagcccttgcataaggaatggggaattttgcccttcccagttgtgggcagaatatttacataaattatttggaattctcagttgtatttctaagtgtgtgattttaaaaactacttggatgttaaaatggttactgttgtattcattattgagtgaatacttacaaatgtggtctgatgaacattttattctacctaagggaaaaaaacagcttcccaaattgcagccaccctgcctagttcagagactgtagaatttgtattcctccccgagtgtgttcttagtagcacgccagaagtgccagatgctaccctctctttttctgtgtcatgatttaataccatttgtgcattttcttctgcttcagttgatttagtgtcatttttggagaccacagacctatttgtattttatatgttactatacagtgtgtattctgtttagaaaaataaaaacgctagtatgataaaatgtactattttattatctttatttttaaagtgttactatcaaagacatcctttggtgtctcataattggctttgactttgttgctctcaataagagtatatgattccagattttctgtttagtcaatgtttaaactacttcatgtttaacatttatgcacattataatacaatgtggtaataagggtcatttggcttcttggctctttcaaaatattggtataatttttaacaaatttattttgaaataatcatttcactttttgatgagtataaacttggtgagaattagaaacttcttcaaaatatagaagtctattttccttatctttggcaaagaatgataataattggacttcaaaagacccagcccagtagtccccactgctaaaaatgaataatggcctatctcaatccacagaaggaaaataaaatgggctaatagaaactttttcagtttcatgtttttctcctgtcaacatttcataagtgtttggcatttgctaccacatctcttttggtgagtattagtgaaaatgaatgaataagtagtaaaagaatgttaacagaaaaatttggacacaaccagttagtttaataactctattattttattgagaacacgcaagtttagggtatggtgtttttttattctttcttagggttgaaataatctcccctgccaggtacgtataagctatggttttagatggcattcatatactgccatttctgccagaaaaattattcctcgttcataaaaagaagcaaagtatctcagtgtttcatatttttcctcaataggcagctctgcttcccagtgctttatcatcagagcaagtttgaaacccaccacgtgggtgaatgagatgcagttagggagtctctgggagcttcctgagacaggaaagcatgggtcatcctaaagttgtataacaatcatctgtgtatccttctacaggaaggatggaattgacttttccacccacagatttggcataaaatgtctctgcatctggggccaagacagtgtgtaaggattgtgaagtcccagtggtttgggtagtaggtgaagatgccagttcagtgctgaagagccattcctacctgtgtgtgtgtgtgtgtgtgtgtgggggtgctgtgtgtgtgggggtgtgtgctgtgcacgtgtgtgtgtgcgcacgcacgtgtgtgtgcgcgcgcgtgtgtggagtgatttttcagtctttttgcagggaggagaaaagaatgaattagtagctttgcttttgctaaggatatcctaacagtgtggtggatcctttttgtttaacagggtaggtcagattactgaggagctgttggtttattgttttgtcattagtgccatgaagctgctaccgctggttgtgggtaaagcaaggcacatgaaagcagtctgaaaatttgtattcaagctaatttttaatttttaactacttgtttacttatttctatatttacccttttagcataatacctgaaaacttaaggggttgggaaatatcattcatacagccaattttttttaataccttctgtattcaaggcactgtgctggggaaacacaagtggataagatggacatggtctccattctcatgatgcatacagcctactaggggagacagctgaaaaacaactacagatataattagaaggaataatttcaggaagtgtggttagtaatatgaggggggaataaattcgcaaaggtggccagaaaagactttactgagttatcatctcaaacaaacccttagggtaggagtaccctgtctttataaaggagagaagaaagagatgcaattagcaggatgattgacgtcaaaaattgcttgatatagtcaaggaatagaaagtaggcctgtgtgactggagagagtggtatgatgtgaaattggagagttggtagaaaggagagcacagagatccttagggattatgaagtatcgtatggtgcacatactgatggattttcacaaactgaagaaactctgtaaccagcacccagatcacgaagttggacatgttcagtaccattggggctgctggaagcagtaaccacccacgctgttagctctcttgtgttcacatttcagggccttgctttaggaaaacttctggtgttctcaggctatttcttctattaccatccaaggcctaacacttctagctccaagcagagtatctttctgtgggatttttatactcatgtcacttcctctccccaacccccaccttgaacatgtattatacatggaattctttggtaaatagaatgcaaatttgttttcaaagcttgtttggcacatactctctcctttagaaagcaaagggtgtcctttcagaaggttcttataatatttgtggatctggccttcaggtctaagctgaagcttttgttttcatttggactttatgcatgtattaacagtttatattttctgtggtaatggaatattttaggggttgtttcttcattatatttagattcttatattaaaaagcgtgcaaaggcatttaaccaaatttaatctagaaataaagataatatggtaatttcaaatagctttttgttcaagatgagattttaaaagttattattccacagtgaattttaatgatgattgtgtacaatggcatttatggatgtgcagcaattgaatgagtatgattagcgcgttagattatggatttgtaatgtgaaatgagaactttttaataagctttctccataatggttcacgctgtgaacaaacaaagtatgagacactgagcttcactaaatcattgcagggctttggaatcagtaggttcatgttttcaaatagtttcctatttttaaaaacaccgctaaaaagttaagaggcagctacataactagatatcttatattttgaggagttggaagaacatgtttctttttataataaaaggaaaatgttattgttgaagtatatttattgttcaagtataaaatggaattgaagttatgctttgagaaaaacttgattgcaagaccttattaggatttaacacctcatcaagactgctttttacattttttttttaatttattttttttttagatagagtctcgctctgtcacccaggatggagcgcaatggcatgatctcggctcactgcaacttccgcctccccagttcaagcgattctcctgcctcagcctcctgagtagctgggattacaggcgcctgccatcacgcccagctaatttttgtatttttagtagagacagggtttcgtcatgtgggccaggctggtctcgaacttctgacctcaagtgatccacttgcctcagcctcctaaagtgctaggattacaggcgtgagccaccgtgcccagctgcttttgacattttctttgggaggtttctggggtacaattagctgaaatctgaagtttggttttgcatggtcttgcccaagctggtggttggtcattgtggccttctgatctggtgatcctaagaaacattctgaaaacatacccaaaaacacataaaaggcgtaccttaccatttaaaggttctttcagtaaaggcctatgagtaatttttcatggagggagcccattcttacgaagttttaatggacaaacatatcattatctttaaattgtattattacgttgtcttttatttttaaaagctcatttttccccattatcaagataacatgttctagacagacaatttaggaaatgcatatgattatttttgttctaattttctgtaataccaccacatagagacagtagtttttaaaaactgtgtgatatttaatgtattgttttcatttcctttaagatgcaatttagagttttagccttgaactttagttttccttcctcttggagatttagtttgatgctaaagtgctatcttcttgtttcaacttttgcttaatttactccaacacttttagacagcaaattaggtaactttatactagtgttatctaacaatgttttgctaacttccattttaagatgttagctcacaaaaaaagctcttaatttaaatacatataaaattttgaaaatgtgtgactttaattaaagaccattgttggctagcatcatggaggtgtcaagaaaattaatagtaaatgggccagtcatcatttcaaaactttcatgttacatgacaactgaaattccagataccctttaagaggtaaactagttatggagaagggatggagaagcacagaatcctaaatttactgtggttagtcatgcactctgtgagatggaggttattagcctcatatacctaaaaatatatccagtgaccaaaccatgtcatagggctctgtccatttcttgcctttgctttctcttggactggcttcattcttagggtatcctcatgtggtttcaaggtagctactagcagctcctattgtctttcccatgagtttaataactgtagtaaatgagtctctctttgaaaatacttgaatagaaatcccaggatgagtcttactggacaagtcttaagcacccactagtcccaaaccaattgttaatgtgagataggtggaatgctgtgattgccaggattgggtcacatccttaccatcttactctagaacaccagcttattgcccaaagaaagaccaaggtgttgtaattggaaaaagggaggcagactacaagcacacaggaaaacttcctgggtgttcactaaaaaggtcgatgaagaatgaagcataattccttgaatgaaaatgaaaatacagcatagtgaaacctgtgagatactgcaaaagcagtactaagagggaagtttatagcactaaatgcctacatcaaaacagtaggtcacaagttacctaacatcacacttgaaggaactagaaaaataagaacaaaccaaactcaaagttacaagaaaataagcgacaaagatcagagcaaaactacatgaactagagaccaaaaaacaatacaaaggatgagtgaaatgaaaagttggttttttgaaaagataaacaaaattgataaaccactagctagactaaccaagaaaagaagagagaagatcaaaataaacacaatcagaaatgaaaaaggagacattacaactgatcatggaaatataagatcatcagagactattattattaacaactatatgctcacaaactagaaaagctggaagaaatggataaactcctggggacacaacctcctgagattgaagaaatagaagccctgcacagaccaatgatgagtagtgaaattgaatcagtaataaaaatctctcaacaaaaaaagcccaggaccagatgcagtcacaggcaaattctttcaaacatacaaaggaggccaggtgcagtggctcatgcctgtaatcccagcactttgggaggccgtggtgtgtggatcacgaggtcaggagatcgagactatcctggctaacactgtgaaaccccatctctactaaaaatacaaaaaaaaaaaaaaattagctgggcgtgatggtacccacctgtagtcctagctacttgggaggctgaggcaggagaatcccttgaacccgggaggcggaggttgcagtgagccaagatcgcgccactgcactccagcctgggtgacagagcaagactccatctcaaaaaaaaaaaaaaaaagaaaagaaaaaggaaaaaaccatacaaagaagaactaataccaatcctcctgaaactattccaaaaaaaaaaaacgagaggattctccccacctcattctacaaggctagttataaccctgataccaaaaccagacaaggatacaacaaaaaagaaaactagaggccaatatccctgatgaaaatatatgtaaaaattctcaacaaaatactagcaaattgaatccagcagctcatcaaaaagatactataccgtgatcaggtgggatttatcctaaggatgcaaggatgattcaacatgtgcaaatgaagaaatgtgatacatcatgcagacagaattaaggacaaaaacatatgatcgtctcaatagatgcagaaaaaagcattcagtaaaattcagcatctcttcatgataaaagtcttcaacatacgagacacagaaggaatatacttcaacataataaaggccatatatgacaaacctacagccaacatcatacttaataggaaaaagttgaaaacattccccttaagaactggaacaagagaagcatgcccactttcatgactcttattcaacatggcactggaagttctcaccagagcaatcaggcaagagagaataataaaagacatccaaattggaaaggaggaagtcaaattatccctgttcactgatgatatgatcttatatctagaaaaccttaaagactccaccaaaaaactcttagatttgataaatcaattcagtaaggtttcaggatactaaattaacatatagaaatcagtagcttttctgtacactagtacagtaatgatctagccgaggaccaaatcaaaaagtcaaccccatttataatagctaccagaaaaaaaaaaaaaaaaacccagctgggaatatatttaaacaaggaggtgaactacaaaacaccgatgaaagtaatcatagacaacacagacaaatggaaaaatatcccatgctcatgggttagaagaatcaacattgttaaaatgaccatctccccagagaaatctacagattcaatataatccttatcaaacttaccaacattatttttcacagaattaaaaaacccaatcctaaaattcatatggaaccaaaaaagccagaatagccaaagcaatcctaagcaaaaagaaaaaatctagaggcgtcacgttacctgacttgaaattacactacaaagctatagtaaccaaaacaacatggtactggtataaaaatagacacatagatcagtggaatagaatagagaagccaaaaataaagccacatatctacaactgattttcaacaaattcaacaaaaatgtacactggggaaatgacaccctattcaataaatggtgctgggaaaattggatgtatgttgtagaagaatgaaactgaacccatacctcttatcatatacaaaaattaactcaggatggattaaagacctaaacgtaagacctgaaactataaaaatcctagaagaaacctaggaaaaactcttctggacattggcccaggcaaagaatttatgaccaagtccttaaaaccaagcacaatgaaaataaaaatggagaaatggcacttaattaaattaaattaaaaagattctgcacagcaaaagaaaaaaatcaggagagtaaacctacagaatgaggaaaaaaaaattcccaaagtatgcatccaactaagggctgacatgcagaatctacaagaaactcaaacaacttaacaagaaaaaaaccccaaagaaccccattaaaaagtgagcaaaaaacatgaacacacatttttcaaaagaagacatacaagtggccaacaaacatgaaaaaaatgctcaacatcactaatcatcagagaaatgcaaattaaaatcacaacgaggccaggtgcagtggctcatacctgtaaccccagtactttgggagactgaggtgggcagatcacaaggtcaggagtttgagaccagtctggccaatatggtgaaaccctgtctctactaaaaatacaaaaaacactagctgggcgtagggcacctgtagtcccagttactcaggaggctgaggcaggagaattgcttaaacccgagaggcagaggttgcagtgagccgaaatcacaccactgcactccatcctgggtgacagagtgagactctgcctcaaaaaaaacaaaaaaaaacaaaaacaaacaaacaaacaaaaataaaacaaccacaatgagataccttctcacaccagtcagaatggttgttattcaacagactaaaaataacagatgttggtgagcatgtggagaaaagggaacgcttatacactgttggtgggaatatacgttagtacaacctcagtggaaaatggtatggagatttctcaactaaaaatagaactaccgttggatctagcaatcccatttccggtatctaaccaaaggaaaaggaattattatatttaaaaacacctcaagtcatatgttcaccacactgctgttcacaatagcaaagatatgaaatcaacctaagtgtccatcagtggaggatcattggatacagaaaatgtgggttacacacacacacacacacacacacacacacacaccttggaatactatgcagcgataaaaaggaatgaaatcttgtcttttggagcaacatggatggaactggaggcctttatcatcagtaaaataactcagaaacagaaaggcaaatgccacacattctcacttgtaaacgggggccaaatgatgggtacacatggacagacagaataaaataatggacattgaagactaaaaatagtgggaggatgggagggaggtgagggttgaaaaattatgattgggtagaaagtttactatttaggtgatgggtacattaaaagcccagactttaccactaggcaatatatgcatgtaagaaatctgcacttgaactccctacatgtatttttaaattttaaaaattaaaaaaaaaattgccactgtgccattagctggtaccatgtaatttagcatataactgtgtacggatctcttttctccatcattgcttcatcacgttaattttgttatgatgagggactgtcttttactttttttatattcctcttagcactaagcaaataacaggaccctaaacacttaactgatttttcatttctgaagtacaataaagataagtaggaaatgttaatatcattgttttgtttgtttgctggttttgtttttcagtaggtgtttgagagaaacacttaactctctaagtgaactaattttttgccatgaatgtgttcggcactaggaaaggtgatacatactagaactgaggaacttaactgggggttcatatgctttctaagagaccgtgggagagtttctgggcatctctgcacccctaaaatcctagcaaaattgtgtatgtgtgcacgcttttgtgtttttttctttttctttttcttttttttttttttttgagacagagtctcgctctgtcgcccaggctggagtgtagtggcatgatctcggctgtcagctcactgcagcctctacctccagggttcaagggattctcctgcctcagcctcctgagtagctgggattacaggcacccaccaccacgccagcgaatttttatattttagtagagacggggtttcaccgtgttggccaggctggtctcaaacccctggactcaagtgatccgtctacctcggcttcccaaagtgctgggattacaggcgtgagccaccacacctggcttctttgtgcatttttcctgagtaaggatgtgtagctttcattagatgctcaaaggagatccttaatccacagaaggttcagagccactgataggaaatatttaacactgacagaaaatagttctgaactttgcgattaaataatttattgtgagtgggaggagctaaaagagtgatgccacttaggagaagcacaaaggaatctgagctcgaggatgaattgttaatctatgttaatgaattcagtctgtacagggttcaaacaaaatatattatggatgagcctctaataaaatggacttcctctgctctgccagtccgacagttaatgatggctggcaattttctgccggctgattttggctcagtgctttggagcaggcacaggcccagttctcgccacttggaaggaaagggaaagtgatagtttgttactttgctctcataagcaatttatgacaacagtttaataaaagcttaagaagtgtcctcttcctgggcggggagaggagccgaggagcctcagtgggagcaccgcgtgggatgttaagcccctcagcatctcctggggccgcctgacgctgccacacaagagaagagcgagggggagccagcgaggtgtttcttttagcccaggcaaggctactgttatgcttgccaatttgacttttccccagcaaactcaagctgtcctgtgagtttccacatcagccgtgtgcctggggagctgctccgagcttgggctctggtgctgtctgctgcatggacctcattagcgctcacccagcagattgctttcatatcgctgcttcacccttttcagttttgaattaccacataaacatcagatattgggggttttgtgaaaggatccttagtctctaatatttagttaaggaaaaaagccctcttagggaatcagatagatttgcttagaggatttcctcaggaaaatacattgcagtatgggtcagttctaattttcctcaattcctgaggccatttagttttcacttctctctctctctctccccacctcaaccctgtgagtccaggtttaggggattttacagccagccttcacacaactttctgctctacatttgtggccttaaaactttatgatttataggaaagtatatttcatgtcatgaactgggatataaatatgtatgtatatatgtataagcaaaaaggtttcacaaggcaatatttgcccttatataccatagtctgatattttctattctgtcggggaatactgctggtcttcactcattaaatcattttcatggctcaccaatggtttgcaccctgcagttggaaaacacctctcagggatactcagggatccgtcctttctatcactgtgttgagggatggctcagggcaccgtgtagtggctgaacctctttatgtggtacagcagaaccaactttatgtattttcagtaacacttctgatattctggagggagtagagcatagtgatttaagagcgaatgttctagttagaatatgcttgcttggtcctgggtctctgacctaccacctgctctggtgttgggcaagtttcttaacctctctgaatcagtttgcccttctttaaaatagatataatttgaatacttatagcgaaacattgtgaagattgagatgtatattattaatacattattaatatatcctaatgcacatctattaagacacaatacagaattaatattaatagcaaacatttgttcaatgttactatgtgtctgtggtaaatttaacaaatgtttgctattaacattattaatactgtatcttaatatttatgtgtatctccagttggattacattttccttctgccctttgaaataacttatgttgagcctattaagaatatgtgggttgggtgtgctggctcacgcctgtaatcccagcactttgggaggttgaggtgggcatatcgcttgaggccaggagttctagaccagcctaggcaacatggtgaaaccctgcctctacaaaaaatacaaagaaattagccaggtgtggtggcacacgccagtagtcacagctacttgagaggctgaggtgggaggatcacctgagcccaggaagcagaggttgtaatgagccgatatcacaccactggactccagcctgggtgacagagcaagaccctgtctcaaaaaaaaaaaagtcttatgtgtagaaataatccctatgttcaaaagcatgaacagtaagcagtgtggttaaatgaaaaaatatatatattgcagctagatagttacattttgaattaggacattttcagctctaagtgacagaaaccccaatcaaactggctcaggcaaaaataggaatttactgattgacgtaacagaaacatctagggatattgcttttggcattggccatttccagttgctctgaaggtatcagcagtttttctcttcatttcttgctctgcctttctctgttggcttctttttcaggcaagcttgcccccaagcagtggcagaaacagccaccagctgctctaggtttctgtttcactagcaggaagaaaaaccctcttctctggtaatttcagcttagtcttgcatctgatggacatggactttggtgggctaggctcagctcacccctcctgactccttgccactgtcggtcacggagccatgagaggcactggtcattagatgtcctgggtcatgtacttgccttgtaggctcagccctgttcaagccacaaggtcagaatggaggagggctgctccatgggggcatctcagcagatgcccatcacacacttccaccatccctcccctgaacataagacttcctacatagatgttttctttgaataattcaactgagagtagtgttaacacctagatacttcttattccaagatatacctcatttccactcttaatttaaattatagctatgttcaaagatgtgtcatcccttccttcctgatcactgctaagatgttctttttagccaccccgtctttgtattgccacttaaaagtcatcatttccttctatctcattttatgcctccctctgctttcgcacacctttagtacttgttgccgtcgttatgaacagcaaaatacagacatgtgacaccccacctcctcagcagtctatccttttcattttgtgctctagccagcccaggggtcagaactgcattctgcagcttttctttcattctctggctgtgaatgagggtccctgatttaccagactacatgaggttgggactgtgagttgttggacaggccatggcttcccctatacacacacacacacagacacacagatgaaatggttgacagtggacagtttggttgcagtagggactccagatggtgaagtgtgtctgccagggagttaaagagaattgtgggtctggagccagtgaaattgagggcacattccagagcttacgtctgccatgtgcaagatatgtttagcttgctaattaaattaggaacaaggtaagcacttgtttgttcattcattcattcattcattcagagacagggtcttgctctgtcactcaggctggagtgcagtggtgtgatcatagctcactgcagccctgaactcctgggcttaaggaatccttctgcctcagcctcccgagtagctaggactacaggcgtgcactaccacacttggctaatttttaaaaatttcttgtagagacaagatctcactatgttgcccactttggtctcgaactcctggccccagacaatcctcctgcctcggcctcccaaagtatttgggattacaggtgtgtgccactgcacctagctgacattttttaagcccaatattgtgatctaatattctataactgtataggatggataaatcaaatgtcgtgaagttcacatatagaaaaaggtatggattcaggtagtctcaaggtatgcattatttgggggaaaattagaaaattccctaaagacatttaaaaattctaaagtaggctgggtgcagtggctcacacctgtaatcccagcactttgggaggccaaggcaggtagatcacttgaggtcaggagttcaagaccaacctggccaacatggtgaaaccctgtctctgctaaaaatacaaaaaaaaattagcctggcgtggtgtcgggagcctgtaatcccagctacttgggaggctgaggcaggagaatcgcttcaaccagggaggcggaggttgtggtgagccgagatcacgccactgcactctagtctgggcgacagagggagacttcatctcaaaaaaaaaaaaaattctaaagtagcagaattgttatgtatgtatttatggatgggtgtatatatatgtatattaagaaatgctagtcaaagtgcagatatgatttacacattatctaatggaagctttctaacccccgaccccataggcacatccacgatgcgagaacacaggctcatgcagagttgaaacgctgttgccaaactaaatcaagactgataattggccagttagctcaaagagtcaatgaaaatgatgagggtgtgtgtaaaatgacacatactttacacattttattttaaatgaaaatacgattttgaagtagtatattgtctagcattttggttttttccctgctcgtgctgtgtgcatggagactctgatatttttcccccagtggtatgtcacttgctgtaatattttgagtactaggaatgttttgagataggcccaaggtctttttcttgtctaagtgtcctctgactgaagtatcttccttgtgtaaacttcagccataatttgtcagccacaacttccatttacatttttttaaggtggacctagaactcagcaatacttgcaaagtaatctaagtcgggaggtttttccagaatttttccagtgttatgcagttgtctccgtcacacctcattcaacagcaaacttttgtcatggtttgccttcatggagtcttttttttttttttttttttttaaagagatgaggtctcactgtcacccaggctaaagtgcagtggcacgatcatagctaattgtaaccttgagctcctgggctcaaacgatcctcctgcctcagtcttctgagtagctaggactataggcatgtaccactgtgcctggcgaatttttaagtctttttgtagagaatgggtgtcttgctgttttacctcggctggtcttgaactcctggccttaagcgatcctgccacctctgcctcccaaagtgctgggatgacaggcatgagccactatgcccagcctgccttcatggagtctttacaaggcatttagcttagtttttacagaaacaactatttcttgacttccatatttaattgattttatataatgcttgcacagtatgcatgcaaagcaagtacacttggcacaaaaagatttgaaaggaaacatagctcacctggaataagcacacagctccatgggtggaacggatgtgagcagatgtgttggcactaggaccactggtagctcacacttaggtggggctgtgtgttctaagttctttgtatacattgactcatttcatcttcacagaaccccgtcaggtaagatattattatccctttacacagatgagggaagttatgtacagagaggacaagagatttgcttcagagtggcctactagctgccagcattcagcctgcattgggctttagacaatatgttttgcgaaggaaatgagagcattttgtgtgggggtaaattaagagcacagagacactatatagagataatcccttaataaaacccaccataacacataaagacttctgaaatactctccatatctctctaaaattagagtctaggcttttagaggtagagatgaccttaacgtatcccctgcatatcccaacaggataaccaagacccagatgggtgaggtgatttgcttcacaggcacccaagaaagtgtggcataaagtttagtttcctgatttaacccccattttccttctctctctctctctctctttttttttttttttttttttgagacagagtcttgctctgtcacccaggctggagtgtagtggcatgatctcggctcactgcaccctccccctcctgggttcaagcaattctcatgcctcagcctcctgagtagctgggattataggcatgccaccatgcccagctaatttctttgtatttttagtacagatggggtttttccatgttgcccaggctagtctcgatctcctggcctcaagtgatctgcctgcctcagcctcccaaagtgctggaattacaggcgtgagccaccatgcccagcctatcccacattttcttatggaagaaaaggatgcattgtagtgtatatgtaatcttctgagagaaacattcaggaaatgagcctctcagagtttgccaagagagcaggaaggttggtggataaggaccaccttagtgttatcaaatccacatctctcctgcagtcagagtaaagcctgtaccaggtaatcttaggactagaaagggtctagcgatgtggttttatccacccctgtctagagaaggagggaatgaggccagctgagcaccaacaaggtagatggttttgtcactattttatgggtaaggaagttgagcttcaaagagagaaaatgatttatccaaaatcacactgctagaaggaaatggaaccaggacacaagcctggtcttgctgaagctaaggcccgtgttctttatgccgtgctaattgttcatcctgtgcagttgtttaaccacagttttcttggctagaagttcttcctaaagttaaccctaaatatctcttgaatttaaatgtgtatccttctgtagtcctcagtcaacaaaagaagcgattgatcagcctatttgagaggttataagaagacacagattggcagtgtttgaatgtcagtagtactcatcaaataatcccaggatagaaggcattttgttcaactccccattatccctgctcacatttgctctgtagcatccccacgaagcctgtgctgggtagttttcagtccgggaattaagagatataagaaagagggggctgggcacggtggctcacgtctgtaatcccaggactttgggaggctgaagcaggcagatcacctgaggtcaggagttcaagaccagcctggccaacatggcgaaaccccatctctactaaaagtacaaaaattagctgggcatggtggcacgtgcctgtaatcccagccactcaggagactgagacaggagaatagcttgaacctgggaggcggaggttgcagtgagccgagatcgcgccactgcactccagcctgggctacaacagtgagactccatctcaaaaaaaaaaaggaagagggaagtcaccaccttagcccatcccatcttcttcccaagaggtcatacacacatatgccgtctttgatttgtatttgcaaaagtaattcatgtttatagtagaaacttggatcactgaagaaagctcaagaaagaatttgaaaatctatgtgtatgagttatctattgctatataacaagttaccccagaatttagcagcttaaaacaaacttttatctcccatagtttgagagtcattagtctgggagtggcttagctgggtagttctctcatggagttgcagtcaagctgtgagttgaggctctagtcacctggagctttgtctggggctgcagggtctactttcaaactcacgtgagtgttggcaggagacttcagttcttgccatatgggccgcctcatggagctgcccacagcatggcttcccacagagccatgttgatgagagagagagagaacacgcactagagagcaaccaagacacagccacaatcttttctacgctgatcttagaaaggatgttcctgcacttctgttgtattctgttggtcacacaaccaaccccggtataatattataggaggggactacacaaaggtgtgaggaccagggatgggaatcattgaaggccatatcgaaggttgcctaccacagcatgtaaattaaaattatgttgcaataaattacataagtttttgcccacagttctccttttcttccccctagagtattgcaagatacaaaagatcaccaggaaaaaaaaaatctaaagggaatgcaatgttgaggcatgaatgtcccagtaagctgtttattcctttctcattctagaggagcttcttgattttattccaagtctgccatgtcaaaattgtggtttggggaagaggggagtaagggcaatagagtggatagaagcatgtggatgcgccttggtcctgacatttgtgttttggtgaacctgctgcctctgagaaaagataaggagtttaggatttggtccaggctgaaacctgggagaagctcatggctcctggacctccttattctgcttttagatgcaaataagaaacagagatttgtaaatgatattctaatttttacaaataattatttgaggaaaaagatttgactacttcaaacatacaagcattgaaagtaacataaaaggttttttggttttttttttttttggtgggggtgagggggagaagcattttgtttatgcaaatacagggtacagagatccagaaggagatcataacatctggacaagcagtagcattccccagcctcccacccccaactgttacagataacagaggaaacttgtgggtaaataagtagtaggtaatacaggcatttatagataggggacgttttcatatcagacacggcagagctttttttgaaaagcacatacctgtatgatattttgatgaataaaggtaatgcagaagcaaactgtaatatcaaataaatttgagtgaattcttctacagtacctacagtcaaaggaaatttatcagtgaaaatcagtatacaacaaacagcaaaatggaataaatttgaataaattcctgcacaggcagtcacaggacatgttgataaatatttcagtataaactgatacaaagtatagcataaaatattaattttgaaggaattcctatgtcatgccttgaataaaagctaatatttcactgaatagtgtgtatgtaccaagcaacgggaagaaaactgaattagttttcacaaaatggctctaacttaatgtgtataaccatttttcagctgactttgagccacaggttgcagtagtcatatggatgtgactcttagatgtcagaggaatggccctgctctggtggcggggtggctgttggcctctgtccctgtccatcctgtggacctttttgtggactaaggagctgatgtagtgaactggtactgctggtgtgtggctttctggacctgcctccctcagccagaggagacccttggatttctccatcctaagccagacttactgatggccaagagtgaggagcaggcagaacagccacaaagtaactgctttgctctttggctatgccctaaagtgtccaaagtcattgttctaaagtggagcaactacataactgacagttaacctctagagccctgtacaaatccttccttttagtccagatgctatatgagtttggggaacctgagccttcctgtgtgcacgtattcccctattgctgctgatgcagggaaaactgtgcccagtagtgacaccatccagcacctcaggtgccaaagtccccaggccgtgatcacagagcatggggctgagcccctcataggtggtcacatcaccctctttgtcctgctgtcggctggaatgtgtccagcctagctcagcatggaagaaggtgaaccccaccacctaccatgagcagcacctcaaatgacaatgccacagagaaaatggagcaaaaccaggatgaccttgccagctcttcattgtaggatcaatgcatttaggtgcagaggggtgtggatggaagccatggcctagcttggcttgtcgcagacctctgtgccaggcccttgccacctcctaatgcagacagcaaatactggaggcctgagcatcagctcttgaagtagctctctgggagggcggtgaggcacatgttgagagcatgggatttgccagcagaaagatcttcagtgaattacctaagctcattacaccttagagtcctcatctgtaaaatggggcacttgcctaatgagggtgttatgaaaattagcatatttaaaggtactagggctgtttctggcacattgtcagggttcagtaattctagttaaaaatagaaaagtggcttctggctggcaagatggccgaataggaacagctccggtctgtagctcccagcgagatcgactcagaaggcgggtgatttctgcatctccaactgaggtgcccggttcatctcactgggactggttggacagcgggtgcagcccacagagggcaagccgaagcagggtggggcgtcacctcacccgggaagcgcaaggggtcgcggaatttcgtcctctagccaaaggaagccgtgagggactgagcctgaggaactccggcatagatactgcgcttgttccacagtcttcgcaacccacaaaccaggagattccctccggtgcccaccccaccagggccctgggtttcaagcacaaatctgggtggccatttgggcagacgccgaactagctgcaggagttctttttttccataccccagtagcacctggaacgccaacgagacaaccattcactctcctggaaaggggtgctgaagccagggatccaagtggtctggctcggcgggtcccacccccacagagcccagcaaactaagatccactggcttgaaatcctcgctgccagcacggcagcagtctgagctccacctggggcactagagcttggtcgggggaggggcgtccgccattgctgaggcttgagtaggtggttttacattcacagtttaaacaaaggcactgggaagttcgaactgggcagagcccactgcagctcagaaaggctgctggggccagaccgccagatttcttttctctgggcagaggatctctgacaaaaaggtagcagccccagtcagggacttatagataaaacctccatctccctgggacagagcacccggggaaaggggtggctatgggcgcagcttcagcagacttaaatgtccctgcctgacagctctgaagagagcagcggacctcccagcacagtgtttgagctctgctgagggtcagcctgcctcctcaagtgggtccctgacccctgtgtatctgggagacacctcccagtaggggccgacggacacctcatacaggagagctctggctggcatctggcaggtgctcctctgggacaaagcttcctgaggaaagatcaggcaggaatctttgcttccgctggtgatacccaggcaaacagggctgagagtggatctctagcaaactccagcagaccggcagcagaagggcctgactgccaaaaggaaaactaacaaacagaaaggaatagcacatctgcttaaagaccccatctgaaggtcaccaacattaaagaccaaagatggataaatccacaaagatggggagaaaccagctgaaaaaggctgaaaataccaaaaacaagaacacctcttctcctccaagggattacaactcctcaccagcaagggaacaaaactggatggagaatgagtttgacgaattgacagaagtaggcttcagaaggtgggtaataacagacttgagctaaacgagcatgctctaacccaatgcaaggaagctaagaaccttgaaaaaaggttagacgaattgctaactagaataaccagtttaaagaagaacatacatgacctgatggcactgaaaaaacagcacaagaacttcgtgaagcatatacaagtatcaacagccgaatcaatcaagcaaaagaaaggatagcaatgattgaagatcaacttaatgaaataaagaaagaagacaagattagagaaaaaagaataaaaaggaacgagcaaagcctccaacaaatatgggactatgtgaaaagaccaaatctgtgtttgattggtgtacctgaaagtgacaaggagaatggaaccaagttggaaaacactctccaggatattatccaggagaacttccccaaattagcaagacagaccaacattcaaattcaggaaatacagagaacaccacaaagatactccttgagaagagcaatcccaagacacataatcttcagattcaccaaggttgaaatgaaggaaaaaatgttaagggcagccatagagaaaggtcaggttacccacaaagggaagcccatcagactaacagtggatctctctgcagaaaccctacaagccagaagagagtgggggccaatactcaacattcttaaagaaaagaattttcaacccagaatttcatatccagccaaactaagcttcataagcgaaggagaaataaaatcctttacagacaagcaaatgctgagagattttgtcaccaccaggcgtgccttacaggagctcctgaaggaagcactaaacatggacaggaacagccggtaccagccactgcaaaaacataccaaattgtaaagaccattgatgttataaagaaactgcatcaactaccaggcaaaataaccagctagcatcataatgacaggatcaaattcacacataacaatattaaccttaaatgtaaacatgctaaatgccccaattaaaagacacagactggcaaattggataaagagtcaagacccatcagtgtgctctattcaggagatccaactcacatgcaaagacacacataggctcaaaataaagggatggaggaatatttaccaagcaaatggaaagccaaaaccaaacaaacaaacaaaaaacaggagttgcaatcctaacctctgataaaaaagactttaaaccaacaaagatcaaaagagaaaagaagggcattacatagtgataaagggatcgatgcagcaagaagagctaactatcctaaatatatatgcatccaatacaggagcacccagattcataaagcaagttcttagagacctacaaagaggattagactcccacacaataatagttggagactttaacaccccactgtcaatattagacagatcaatgagacagaaaattaacaaggatattcaggacttgaactcagctctggaccaagcggacctaatagacatctacagaactctccaccctaaatcaacagaatatacattcttctcagcaactcatcacacttattctaaaattgaccacataattggaagtaaaacactcctcagcaaatgctaaagaatgaaaatcacaacaaacagtctgtcagaccacagtgcagtcaaattagaactcaggcttaagaaactcactgaaaaccacacaactacatggaaactgaacaacctggtcctgaatgactacagggtacataacgaaattaaagcagaaataaagatgttctttgaaaccaatgagaacaaagacacaacataccagactctctgggacacatttaaagcagtgtgcagagggaaatttatagcactaaatgcccacaagagaaagcaggaaagatctaaaattgacatcctaacaacaaaattaaaagaactagagaagcacagcaaacaaattcaaaagctagcagaagacaagaaataactaagatcagagcagaactgaaggagatagagacacgaaaaactcttcaaaaaaatcaatgaatccaggagctggtttttttttttttttttttttttaagatcaacaaaatggatagaccactagccagactaataaagaagaaaagagagaagaatcaaatagatgcaataaaaaatgatatagggggccgggtgctgtggctcacacctgtaatcccagcactttgggaggccgaggcgggcggatcacgaggtcaggcgatcgagaccatcctggctaacatggtgaaaccctgtctctactaaaaatacaaaaaattagccaggcttggtggcgggtgcctgtagtcccagctacttgggaggctgaggcaggagaatagtgtgaacccgggaggcagagcttgcagtgagccaagatcgcgccactgcaccccagcctgggcgacagagcaaaactctgtctcaagaaaaaaaaaaaaaaaaaaaaaagatataggggatatcaccaccaatcccgcagaagtacagactaccatcagagaatactataaacacctctatgcaaataaatgagaaaacctgtaataatggataaatcctggacacataacaccccccacaagtctaaaccaggaagaagttgaatccctgaatagaccaataacaagttctgaaattgaggcagtaattaatagcctaccaacaaaatgtccaggaccagatggattcacagccgaattctaccagaggtacaaacaggagatgataccattccttctgaaactattccaaactatagaaaaagagggaatcctccctaactcattttatgaggctagcatcatcctgttaccaaaacctggcagagacaccacaaaaaaggaaaatttcaggccaatatctctgatgaacattgatgcagaaatcctcaataaaatactggcaaacagaatccagcagcacatgaaaaagcttatccaccacgatgaagtcagcttcatccctgggatgcaaggctggttcaacatacacaaatcaataaacataatccatcacataaacagaaccagtgacaaaaaccgcatgattatctcaatagatgcagaaaaggcctttgacaaaattcaacactccttcatgctaaaaactcaataaactaggtatcaatggaacatatctcaaaataataagagctatttatgacaaacccacagccaatatcatactgaatgaggaaacactggaagcattccctttgaaaactggcacaagacagggatgccctctctcaccactcctattcaacatagtattggaagttctggccagggcactcaggcaagagaaagaaataaaaataaaggttattcaattaggaagagaggaagtcaaattgtccctgttttcagatgacagatatttagaaaaccccatcgtctcagcccaaaatctccttaagttgataagcaacttcagcaaagtctcagaatacaaaatcaatgtacaaaaatcacaagcattgctatacaccaataacagacaaacagagagccaaatcatgagtgaactcccattcacaattgcttcaaagagaataaaatacctaggaatccaacttacaagggatgtgaaggacctcttcaaggagaactacaaaccactgctcaaggaaataagagaggacacaaacaaatgcaaagacattccatgctgatggataggatgaatcaatattgtcaaaatggccatactgcccaaggtaattatagattcaatgctatccccatcaagctaccaatgactttcttcacagaattggaaaaaactactttaaacttcatatggaaccataaaaatcctagaagaaaacctgggcagtaccattcaggacataggcatgggcaaagacttcctgactaaaacactaaaagcaatggcaacaaaagccaaaatagacaaatgggatctaattaaactaaagagcttctgcacagcgaaagaaactatcatcagagtgaacaggcaacctacaaggtgggagaaaatttttgcaatctgtccatctgacaaagggctaacatccagaatctacaaagaacataaacaaatttacaagaaaaaaacaaccccatcaaaacgtgggcaaaggatatgaacagacacttctcaaaagaagacatttatgcagccaacaaacatatgaaaaaaagctcatcattattggtcattagaccacaaatcaaaaccacaatgagataccatctcacaccagttagaatggcgatcattaaaaagtcaggaaacaacagatgctggagaggatgtggagaaacaggaatgcttttacactgttggtgggagtgtaaattagttcaactactgtggaagacagtgtggcgattcctcaaggatctagaactagaaataccatttgacccaacagtgccattactgggtatatacccaaaggattataaatcattctataaagacacatgtatgtatgtttattgcagcactattcacaatagcaaagacttggaaccaacccaaatgtccatcagtgatagactggatgaagaaaatgtggcacatatacactatggaatgctatgcagccataaaaaaggatgagttcatgtcctttgcagggacatggatgaagctggaaatcctctttctcagcaaactatcacaagaacagaaaaccaaacactgcatgttctcactcataagtgggagttgaacaaggagaacacacggacacagggaagggaacatcacatactggggcctgtcgtggggtagggggtaggggagggatagcattaggagaaatacctaatgtaggtgacaggttgatgggtgcagcaaaccaccatggcatgtgtatacctatgtaatgaaactgcaagttctgcacatgtactccggaacttaaagtataatttaaaaaagaataaataaaaatagagaagtgtgcctgtaatcccagctactcagaaggctgaggcagaaagattatataataccaggagtttgaggcagcagtgaggtatggtcatgccactatactccagcctgggcgacatagtgagaccgtcttttaaaaaaattttaacatttagccgggtatggtggcacatgcccctagtcccagctactcaggaggatgaagcaggaggatggcttgagctcaggagtttgtggcagcagtgagctatggtcttgccactgcattccagtctggacaatggagtaagatcctgtttctaaatatgtgtgtgtgtgtgtgtgtgtgtataatatgtgtgtatatgttgtgtaatcttaagtgaatctaataactgctctagtttactctgcaaatgaaaaaactagactagacaacctctaaaatctttgttgattctaaatatctgtgtctcagtttagctcccattcccttattcccaagtccaatgcacatcccatcactttgtttcaactttcatggccgaagtgcaggtggggtggagtgtgcctctaggaaagtggaaacggctgtggcttttccactgtggcttcagggagccctggccttaatcaagctgctttctagagctgtgttgcctctgagcctgtttcctcatttgtatgatggggatatcattgtctccttcacagtgtgatgacagttagtcatgtacagaaggcacctatagctcctggcacaggctgatgagcaacaaaagttcaccattatcactttctcagtgtctaggggacatttcatccctgagcatctctggccatttcaggatgtgctcactgtctctcatttgctctggtcccagtgaccttgttagctcctggcaatgtgtgtgcaggcccttctgcctacccagtcaggtgatggcctggtgaacaacagcagagtaggcccatgcctgatgctcagtcatttcaccatctttttcctgccaggtgccatgtccaagatacaacacctacatcaaggaactcagagtctgaagtcaaggctgcagaaactgtggtctagctttctgaccaaagctgggttttgtgcttctatggcagtgtagattcttttacttgaacatactcaaaatcttagtttttaattggtgattctttttaggattacagcagtttttggtctcaaagccaaaagattctgaattattacagatcttgtgttattttgtggctgtataacatctcttaaccaaccaaacaagatgagtaggttagagattaaactggctgcagaagtctaaatgaaactgaatccccaagttctgagacgcagtgaggagaaactgtattgccaatagatcttctcatcctgcatttggagtggtcgggattctggagtcagatgcctgggtttgaattggggttttcccagtcactaggtaggtagcaactctagtccaggctacttaatgtctcgtaagctcagtttccacagttggaaagtgacgatatggtgtttacttcagtggttgtcctgaaactttattgaaatgacacaagttcgtaactgtgccagttccattgtaaggatgcaataaatgttagctcttgtttttattaatgacgaggatataatgtttaaactcaatgcccacttcgggcagttttttaccctgtagaagcagttgtaatcattttcaaatcaggcttgctacacccttccagctggaaagaaaagtctctaatttcattgattttcgagggcacatgctttagttgaatgagtagtaaccaaatggagatatgtagtaggcggttagaagtgttagcatctttgggatcatgtggtcaaccacattataaatgaatgcttggatgtaagggcagacctgcatctgtgtgtgtgttttcagtgggtggatggggccatgtggtatcacagcgtgccacacagggatttacggtggtcaagaagcatttgtggtacagagcttggagtttggagtaaggcttccttgttttgcatcctggctctaccactgtcaatctgtgtgaccttgggtgagtcacttaactgtttcctcacctgttaaatgtgaataataacagtacctctccccttttgtgaagactgaatgagataaatgaaaagctgtttgcagtatggtcatactaaaatgggagcagtcagtaccctccccccatttccagcagagtggtgggcaggtctagctagcccttgtacatacaccttgcagaatagtttatagtagtgagcatagctggtaaatgtacaataaaaaaagttcctgtttttcatttctacctgattgaatgagacacctatttaatgcaaatttcaataatgctctgatactaactctgttcaagttagtaagagagctttgtagagttattgtgacacctgggttaagtatggctgactttgggttaagtatgaggtctaatcatcccagtctgtcctctagattttttgctgttttgttcaatataattatgtaaacaggtattctctatgtaaacatttgtgaaagttaaaataccaaagcagattaaatatagaactagactggatgcctacatcagtgttttagtgacagcaaaaaaaaaaaaaaaaatcatctgttacatttaattattttggctagtttcagttctgttggtttgatagtattctttttagttgatatataaatttgcttggggttttataccagtcttctatttctgcatatttaaggaatattttaataaataataacttatgtcaaccttgaggatctatgacttttttcttttaaagagagttcatatattagtccataaccattgaatagatcgttcagagtgtatgaagaagagcataatcctgtgcacagctggcttttctgatttgcagggtatttagtgtacatttctctatccagctcatatgccggacagaggaacactttacccttctggtctctctgcctgttgggcaattgggttattctgggtatgtggaggagcttttttgattcttgttgtgagggatgctttcaacagaaaagagaggaagaatatttgtctttcattgctcaatacccagatatttcatattcatcagaaatagctacttctgaattcttttttcctctttaaattagacacaacattatcccgtctactgttatttcttttttacatttttatattagcagtcgactgttggcatgttctctcagctgcctctagtgatgacatccgggcttttaacagccatgcttttccagggagccctgtgcacttcatagattacaccgttagtcctcacagttgttcccggaggtaggtaggatcagacagagcacgtaggggtgagaacagagggctggggcgagtcagtctgagaaaagcagtgggttacttcttttatgttagcatttctgctttaggcagagttctgcatttccacctattttcatattttcttcaaagcatttttcaaatgataagtcattagcttcatggctgcagaatgaagtaaggggatattaatatagctattgagaaataagaaccttcactgaaatatttttagggtcgttaagagcagttttaactcttggtttgggtgtgatttttgcctagaatttggagtgtatttaaattgattttatatctaaattgagtgatcaaaagaaacctctctaatgatatagttgtctaatgtctattcagtgtaactctttgaaggtgcaagattaatattcctaaagcccagctctgatcatttcataattttcttttgtgtcctttttaacattatgagctttggattcaaaagacctggcttcattttatgggctggttatataacctgtctgattctcacttgcctcctctataatggaggtaataatacccaactcaaagagtggtggttacaattaagtgagatcatgtgtgtgagatactaagcacagtcgatgtcaataaagctttaaaaaggcaaaaaacagtacaaaatccagattctttgatgctatgttttagatgctgccttggaatcacctcataactgagttcttattttccagccaaatacaaaacctcactcttcatttttcatgaagcagaacaaccaatacaatttacatgaggctaaaaagcttcatgaaatagtactttatcttgccacatgctatagcattctattccatttcattgaggaagaaaatggccattaaactgtgatatcaagcaagttgcaacctgtttaaaaaacagtggtctagaaggccttccatctccatttcttagaattctatcctccaccccccttgagacctgtaccccctcatgaaatcttccctcatcttggcatctggtggccttctctgaacttattttttctcagtctcatttatggcatttactgcaaattggcatttaggttcattattgattcataacttatctctatggtgagatgataagtaccatcagggcatgaactccattgtgccatcatttatcaacctgtgaacatagcaagatgtcctgcccactgaagccctcagaggtatttgttaggaaattgcctggtgtcttggatgcttccttacctttgtgctgacatttgaaagccgtagaattagagtttgtgtgtttacccttgggagcgggttgcctctcgccatgactactatctagttcagatgttttcacctggcctgccttggatttcttgtgtatgtgaaaaagaatgacattaggttgagattggtattctggcttctaaatggagattctcaattttcctgtttcctgacttgactttgttgggcctcagaggttcctttcagttctaacggtgtttgagcaaaaatcagcctcctttctgatgagacccagcctgatatctttaaaccttggacctttgcagcatgtaacagttaatgattttagcctatgagacctgcactttatagcctaggacacctttgatgtttctgtgtatgtacacggtgatctgtagattctatatgtgagtatatttatatgcagtattttattcatatagagcctttcatctacaatgagaaaatagtatacagacaagaatggaatacttatatcttaattatacagatacagtaagtcctcacttaagatcatctatttggaaactgtgactttaagcaaaatgacatgtatgtataagaaatctaattttaccataggctacttgatacagacaaaagttgaagttgctaggacatatttctggtcacaaaaacatcagcaaactaagtaaagattcaaaacacttttaatattaaacattgaaataaatgtgagctatatatacagaactcaggaggtggaggttgcagtgagccgagatctcaccactgcactccagcctgggggacagagcaagactctgtctcgaaaacaagagaaaggattaataaaaacaaaataattatttactcaatgattccatgattttagttcagggttgagagtggctggagtctgtcctggcatatcagggcacaaggcagggacccaccctagacaggacaccattccatcacacatccacactcactcagacagggaccgtgtggacacttcagttcggttcacctaatgcacacatctttgggatgtgggaggaaaccagagtacccaaagaaaacccatgcagacgtggggcaaatgtgcaaactctgcacaatggccccggcctctcatcaatgttactgaaggaaacgacattgaacaaaatgacatttctcgaagacctgctgtacaccacatctcacatttggagcccagttttgagaacctagtgataagattttaggaagagcaggacccattttatgtttacacaaattacctactcaagggtcaacctcatttaaaggaactgatttaatttaggaaagctgtttctttcccttttaaatctaatttaagaagcttgactgaaatagtaatagataccagagaagtgactgtgcagctacgtaaactaacagacctggccatagaaacatctctcttgggacaataccttgataaaatacatatcagaaatatctaggaaattatagataaaaaacagatcattaacaatttaatgacacacagtaaaaagatttttaaaaacataactgcatagtaaagtctgggaaaagttactgactggtacacaggtgtaggcagtaaatctattcatagtcagatttttctcttttgagcattgaacagttaatagggacttatgaaatgagttttgttaattcagtactcagaattctcagacaagcttccttatttagattctttcccatctagtctgccatttaccagagctaaagtgtgtgtcaaaggaagcaggatttatcttaaaggagatttggaggaaatcttccttcaatatttaagtgtttgacaaagtcatgctcacatggacgtcagttttaagaggaggaagtttaaaatcaggtggcttatttacgttactggctgaaagcctgtctgataggattgacatggagcactaattaatcacctagggtctcctcatttactaatcatattgcacaaaacttccctgctgactgaggctcaagggcaaactgtgggcttccagccagcttatttttcataagcattatgctaccactgtaaattaatgtgaacctaatatattctgtcagcggtttactttcccatggcgaccctctctggttaaacagctttaaatgaaatcttgtatcaaaaatgaaaagaagtttcttgcaaaaggaaaaaaggattttaggtcctctttgcaatcttttttccccatagtatatgctatttcggttctgatacaaatctgctagattaactgaataatgcacagatgatgtgatagtttctttttgttatctgaaaagtgaccttatattgtgcttaggtaagagactttttaattacacttttaatggcaataatagtgtgtttattgagtgcctactatacataaaacacataccttaactcattgatcctcatatcaatgctatgtgaatgctaggcaatagtctgtatttatgggagagaaaattgagagtgtcagcttgcccaggccacatccattaaatgctggggcccagatttgaaccaaggtttgtcatcagaggtcaggctcatttggctgtgtcactatttataatttgtatggtccctttatactttctgttttaacttcaggaaattagcagtcctcttaatttttaaagataaaagctgggcacggtggcttatgcctgtaatcccagcactttgggaggccgaggcaggtggatcacttgaggccaagagttcatgttgaccagcctggccaacatggcgaaaccttgtctctactaaaaaatacaaaaattagccaggtgtggtggtgcacacctgtaatcccagctattcaagaggctgaggcaaaagaatcacttgaacccgggaggcagaggttgcagtgagccgagcacgcgcctctgcactccagcctgggcaacagacggagactctgtctcaaaaaaaaaccataatttttatttccatgttgattttttaatattcatctgaattagtaaatcattttagaagcttgctgatctctagcacatgcttttatatcttcaactcactttaatgtcatgccacttttattcagagaacaaaaagttatggatgtctttaaaccagaggaaataagggacgcttattcacatccctcatgctgttgttcatcaggagactcttccaaacaattctaacagaaaaggaaaattccagagtgcacacacatggatagtttccaaggcagtgcttgttgagaacccagccttctctcctgaagctgtgaatagtttgtcttatatgtaaattaatttccaagagtctgtgcattaaagtcttatataaaagaacatataaaagaatgatttgtcaaaacccattttccttgtaaaaaatacctaactaaggagagaggatgatattcggtggcttctgtgggctctgtgttaagccagtactttacttcttagtatgcagtgctgatgttcttggttgaaaggaatccattccatttctttttatagtatcatgaaaagttggaaagaggaaaaactgagctgaacatacagaataaataactaaatggtgtcgtcaggctgcccttttgttttcagacatcccccctccttcctcctttgtgagtcactgagccagtaagatggatcaaagatgcctcagtgtatagaacattttatgtggaggttatttgtcatccacaacaaaggactaattgcctctgtgccttctttcacatgataatcaatggattgggatctcctgattatgccccatgcatcctgcattcatctctcaagatgttttaggttttgattgaatttataaagcatcagaaagatgacgtcagttcagtgcaactattaaggggattttaaacatgggtatggaaatatgaaaacagagcttgaagtgaaggcacctgtcatcattctttttgtaaatggttgatttgatcggaggtataacttctatgatagctattaagaagggtcctggcatttttaagatggagcgtttatttcaaaaggcccaccaggagaaaattcacttcctgtttcagcgtggacttgaggttctcagagatgacttcttggatgactttgttgctaatgttatcaatcaggtttcattttaaagaagctttctgaattctaacaagaagtcagtgtactctgagtatagttttctgtagtggatttgcctaatgtgggggttgggcacataggccacgggagcgtgtaagtgtaggaaacaccattcagctcattctgtacaatgtctgaagctttgaagttacattctcctggcatttcaattatttcaaaggcaagatgtttactaaaatgtacctgaaacatggagttatttcttaggaacttttaatatttacagttaaattagaacactttaaaatgaaagaatgatatattgactgtagcacagacatctgtttaataacagtcacttttcctctctttaaatgtataaatgtcctgtgtttcttagaaaagaaagatttcatcagtgaaacaaacaaaaaaaacagaacccacaaaaacaaaataaaattcaaaaacacacacagatatataggcatagagagagcatttgtgataagtgttttaaaaatagctattaatatctcagcagcctcctcagctctgatggtgctgacatcccacagggcaagctgaagcaagccagggggctggagaacaatctaagacaccaaactcttctgtggaacaataacactgagtgtcaaggactgtgaagggtctgagatttcaccctgcatgccagcaaacaagttatcctgccacagtgtcacaaatcctggcagaaggcatcacactgctggggcagacacataggactttattaatcacagcaatgccaggaaccagaggatcaatatttttgtacactttccctgagccctaattcttacagggtggtgcagagagggccaggtgatacatagtgagttgtattctaggagaggaaccctgaacttagggaactccgatcttttataatgggcagtaagtctccctgacccttgctctgtaaagaaacactgaatctttcaaggctatctgctgttcaaattttcttgaaaagatagtaacgaaggactcacttgtaatgtcagtgccttgctgataaggtggctcacacctgtaatctcagtgctttgggaagccgaggcaggtggatcacgaagtcaggagttcaagacccgcctgaccaacatggtgaaaccctgtctctactaaaaatacaaaaattagccaggcgtggtggcacgcacctgtaatcccagctactcaggaggctgaggcaggagaatcgcttgaaccggggaggtggaggttgcagtgagccgagattgcgccactgcactccagcctgggcgacagagcgagactctatcccccccaccctgccccccaaaaaagtgtagatgtgagaattgtctccccacacaaactcttctggaaataggcaccagataagtaccgattccatgaatggctaatctgtgctgccttctaaaggcagtgcaggtaccagatgacacagccataactgcagcgttatatctctgttattttaagaaatggataaaaggtggtattttaatttatcctgtatctatgcaacatattcttttccaaatgtcttccctgtgtttgacagtcacagtcttgtgacattgcagcaggtgttattacccatttacacttgaggagactatcattcagtgacttgaccaaggtcacacacagttactctgcagctcgccactacacctgggggctcctgactccccgtctgatggtctttggaacacattgtgtaacactgcctcccttttgtctcctacgtaaggtaacggatatttccagatattacagaggtgcccccaggccagtcctgagttcctttttggcagtttccgtgcctcccaactcatcttacctagccacacaatgcccagtgtctggtggtcatgctggactcatttgagttgagggaagttacttttttaatgctttcttgttgctctatgttttaattttcacttaacggaacacaaacagtctccactgttgccacccctttgcttagtagagctggccccttcccctacttaatgtgtaattgctctatgggctttggtggcacctctttcttggtttcctgctgcccttttatctaattcttctgaatctccccttttggtcccctctgtacactgccccatacatcttcatgctctctaagacaatgccttgatcctctttcctccagactatatgtagccttaatgataaccacagtcagttatttattgagccaggcatatgccaggcaccttttcatgtgccacacactttaagcacgttatttgagcacatgcgttatctcatttagtcttcccaatgaccccacgagatagattccacttgtctctgtgttttgtagaggaagaagtagaggactgacaagttaaattacttgtctgaggtcacacagccagtaatggtggaacctgaatgctaagctaagtttgactctagagccaactgctgtccagcccccagatttccttgtgcaagagtcagaatctttccacatcagtgtctgacatctgtcttggtaataacgcctaaaactgaaatctaaaactgatatttctctccaaatattctccacttctagtattcctaactttgtaaatgacaccaaaagcctgccaagttgtttaagctaaaaactgggacgttttcttagactgcactcttttcttcacctcccaggacattccccttcatccattcatttttttccttgcctttcctcttgtttttcctttcctttcctttctaacagactcactgtctcactcaggctagaatgcagtgacgtgatcatacctcaatgtaaccttgaactcctgggctcaagcgatcctcccactcagcctcccaagtagctgtgaccacagacacataccaccatgcccggctaatctttttaattttattttcatatttattttttatattcactgtgttgcccaggctggtctcaaactcctggactcaagcaatcctcccacattggcctcccaaagtgctgggactacagactgagccattgcacctggacctaaaggcccataattttaaccttgtaccctgctgcttcctgccactgagtccatagagtctctgccttttcatctgctgtctccatcttgctgcggctgcctcttcctttttcagctgatgtcattctcaccaaattagtagcctcccaatttgtcttgctacctgcagtctcatctctcttcaattcattctttgtactgtgctggaaagatgtttctgaaatgcaaatctgataacttgttttgcttaaaatccttggttggcttcccatggcttgctggtcccttggtacccataacacatacagctatgctgatcaggccttaacccttctagcccagaggttctcaaacttcaacacatgtcacaattacctgcagggcttgttaagaagacagaacttgctgggccctgcccccagagtttctgatgtagtaggtctcgagctgcctcagaatttgcatttctgacaagttccctggtgctaccactggtgcgggaccatagcctgcctagtgccttgtctggctctctctgctccagccctggaaccacttgcaggttcctgaagggagatgctgtttcaggctttgatccttttggataagctgttgcctctacaggagatagtctttctatcgccgtctctttaaaatacagttcaagtgtcacttcctaggaagcttcctctgacccctgcagtgatctcatagtttctgtggcaacccatgtgcatctctgggaatgctccatttctgtaattgagttgtcattttatttatgtatctcccacccactcccaccagaccattagctctttaagaaaagatatcattcattttctttttcacccttctatccctggcacctagcatggtggctggtatatactgaagatattcattaaataagttgaatgatataatcctacttttaccttaaagaataattctattttggtttttatttgcattaacctttatcataccttgtttttaaatgtcaggatagactgggtgtggtgtggctcacgcctgtaatcccagcacttttggaggctaaaggggggaggatcacttgagcctaggaaaagttaaaaaaaaaaaaaaaaaagtcaagatgtttcaacataaaaacagtgtgcatctgacagtattaaactttcgaagctaccattagagagagcttataactcagctgtctaatgcaaaccgcagtttattcctacaaaggctgatgtttgtctatagataacttacttctcatgcctctgatttgaagtgcttgagttattcctcagtctttctcagccttcagaacatttctctggtatgtttttcagccttggatttatctaatcagggagttacagatggaatagtgcaagcctttcttttactgagacaagcaaagattagtgggctgtaaacttgcagcctccatgtttccatccaaaagaggatggctcatccctcactttcccttttacgtgcctgcattgcttgggtaatttccaagaagagtatcagtttgattgcttgcacagccctcccttctctcccctccccatctcagatgactagtccttgccaaaatgtcaagttccaaaccctaacaaaagagtttgcaaacaagactgtccctggattgtagacatttcttcaaggggtgcctggccttctcctggtgtagtgcaagttcaaaggcaaagagccctttcatcctctgggaaaacagagaacacagttccaaaaatgcttggatacctccaaatagacctcctcccctgcctcacccctttcccaggctctgctatgtggtgtttttcaggaaccattctgtggattttagccatatcattctgcttccatagttcaacaagcaagcagcagacagctctttcctgcaagtggatgtgtggctgaattatatattccttacacagcaagtaacaacatcttgcccagtagttcagaacaactggtatctccattcaattatttggaaagaaatttccctctgccagagcatgattagtctctgagcaccatcagtctcatgcctgttttgcatatcttgtagcttactgtaagcttgtcacaggattaaagcatgaaagcaattgatctggtctcttatttatgtcttaggaccagtcttaatctgttttgtggtgttgctacaatagaatacccgagactgggtgatttataaagaagagacatttacttagctcatggttctgcaggctgggaagttcaagggcatggccctggtttctggcaagggcttccatgctgcatcataacatggtgagatgcacaaaggggagacagacacgtgcaaagagggatcaaacaggagaaggaatctcacttaatgccaaccaactcttgtgggaaataattcattcccagagaactaatccagtctcaggagagcaagaactcactactgttaatacaagtgttcagttacctctagaacagctgcaagccattcatgagagctctgcccccatgacccaaacacctcccactaagccccaccttctgacaccaccacattggggatcaaatttcaacattcattttggtgagggcagacaaaccgtgctcaaaccatagcagaatgcttttggctgcatgtaacagaatgcccccaaagtagctttagctaagatgagaggcgcttacttaaaataggagcccaggggattgcatggaacccagcataaggagtgcaaccacaggtcccgggataagaagctggaagcagtcaggaacataagctactctgggtctcttttctactttctatatctacataatatcccccagtctattctagcatgagggagactaggctgagaaaaatcactttgtccaataccagactcttgggaaatgggagactctggcccagcctggtattcagtggaacagctcttcctgagtcatatgtctgaccctagtgactcatctgtccagagagtgggagaaggcccatcctccacaaatatgcgtacaggagcccctgttggggcagggccagttttcagaaagggggatgtagatggaggagctaactcgattaatattggttatcatttgtatcccacgttcttctgaaaggattctgtaaaaaaataggcacaatgaaaccaaacccattcacacaggatatcatgcaaaaaccaggagcaataaggttacggagaggaaagatgcatctagaagccctgatggagagaaacttctttaatgcagaaattaaattaatcaaaattagtggatttaaaagttctggggctagtcatccagaattcatgaactaggttgctaagaaaagcaatggaaaagatgtgaaattaagtaccatatgagtatctgactagagtgtgttagtttgttttaaatgcatgggatactgtatacattttttcctggaatgaccctcaagctgaaattgaggagagaagataaatgggaggccggatgctgccacttcctgtgagcacatgctctctggttaggacaggccccatcactgatctctgttatctaatcccaggtcacatcactcctccataatcctctgtgtttgggtgtgtgtgtgtgtaaatgtcaaataagggcacatgcagcaagtgatacagaagttcaggagagggagagagagagagagagagagagcctctgatcactgtgaactagtatattttcttgtatttggaggaggcaggacgtgaagctgcatttcattttgaccagttgtagatggcagggttggaggggcaggttgagaaatgtgtcaggaggggggcaggaactgatattaatgacaatacttgccaagcactcagtgctcacgtggtcacatcaacacacacaattgctttgtgcagttctgaggtgcccttcttatctgcatgtgacaggtaaggacaccagagctctaagaagtcaagaaaccctccagtgattctttgtctcaggagaaaccagagtcctcaccacagcctgcaaagcccaacacaacctggctcctatcatcctctgtgctgtgtcttgcagccacttggtggctgtgcctccagactttccctggaatgctgttcccccgacacctgccattcactccttcacctcttttgtgtttttgcttatatgtcactttcttagtgaagacctctgttatttgctctgctttcatattgcagtgcctcctctgtcttctgccacatgacaagcccgtgacactgatctctttccacagcacttcccattttaaaaaattccctgcatctactcacttatgtttctttatattgcctttctcttcctgcacacttcaactagaatgtaaaccccacaagaccagtcactttgttttgtttcccagtttatccaaagcccctagatgacctccttgctcatggtaggtgctcaataaatatttgccaaatgaatgaagaccctttcccaagatcatgaaactacgtagcactggagtcagggttcagcaggcagagtgcactcgggccacactgaaaggaggccatcaggatgaagtgacatgagagatggtgaccctggctggatgggacatgtcctgtttacagtttgagctttatcagtcacgccatcttaccatgaggactccggacagtttgaatgtacaaactgggacacggggacccaatgggaaaactgggattgactttctgcatattgaattttccaccagcccacagttactcctttgacatggccagaattatccccagaggtttttttattcctgaaataagtccctcctctataaagacatttattttgttattataagtatttagcacatttgtgtggaccctgctaaaacgagtgttgttcagactaaagtgtcagaaaatatataatacagagtacaggtgctgcagcttcaggaaaatacaactttcctaatggcacttctccccttgcctcccttctatgctaaatttttaaatgcatttctcctgtttattcaggcagggattaacattttcttaaagacttcatcagaatgttgggtttttttccattcattgttatttaggatgatatttttgtgactccaatttaggtaagaagattgacttgatctttattttcctctatcatatttaccttgtgtgctgttattttgagtctgttcacaggatcctgggcagatgccatcaatgtaattgctatgtttttaagcaaagaggattgaaagtgtcaatttaagaattgtctaggaacttgatatatactatctatctatctatctatctatctatctatctatctatctatctatttgctttttatgaataaaagtagcaggggtgttggaaatatatgtatatttttaaataatttattttttaaaagtatacaaaccgaaatttatttcaaagagaattcagatagcagccaaaatacacagaaaagaaaactgtccttcagaagtgccactagatcaagctagttatgaaattggcacctgagaataacttctgtcagaggggatgtaagtctttggaattttgaagagccatagtctctgtagaagatgccagaaatgtaggcattatccttaacacttccttttccttccccttcctcccacccccactgaaaatgtcagttttacttctcagtagctctcaattccgaccgtttcaccgtatttcagcccaggacatgatcacatcttgcctgtattaccaaagtcacctccttttgatcactgtagatgcactcagactctaatcttttctgcggcccagatcctcatttttccaaagcccagatctgcaaagacctgcctgcctaccccacccctgctcaccacacatagctggcctttaaatggcttcctggcacttgtaggagaatgactggattccttaaggtgggctacaaggcctgcatgggctggtccatgctcgtgtctctaattgcaaacctgctgtaccttccccacttcccccattctctgtgcaccagccacagcaattgccttttagacctgtttacttgtcatgcttctctctctactgggactttgtacattctgctctgcctgaaacactcttcctcctttctttgctcattaactccttctcatcctttggactacatgtacgcatttctcactcagggaaaccttcagatgcccctccaggtcaaatccccctgttatagtttctttggccttatttgtttctcctttgtagcaccattaggaatgattttacgttttactctttatttgaggactctctctctctcttactggactgtatgctcattggaggcaggaactgtttctgttttcttaccttcatttatcccaagagaaaagtagtgtctagtacaaaataggaactcaagaatatttgttgcagattataaatgaatggatgaatggcctcttgaagtatccatttttataccagttagaataaggcactgtaccaatttcaaaatgttggaggttcagcaaggaagaaaaccaccagatagggaggaaaggatcttccttttgtagaattcagagaaaagtggggcagatgtgtccctccagaggtaactaatcgccctcatcacatgctggggccattttcttctccagctgttcccaagggtcagctctgccggctgtccttctgctatgcctgaaggcttccatcagcctgcctgagggctgttctcattcctaggtgggaaaacatacctttgatgcctagaaattaaaagagtaatttagagacttagggcatgagtttcattacagttctccgtccctgagcttgctctgtggacaaacattctgtgcatattaggaaagtataatagttttggtcttgggctaaggattcagattttctgagcaatgtagctcaggcacctttatgatcttgggaggaatacttaaaatttcttttttttttcttttttgtttgagacggagtcttgctctgtcgccaggctgtagtgcagtggcgcgatctcagctcactgcaacctccgcctcccaggttcaagcgattctcctgcctcagcctcccaagtagctgggactacaggtgtgcaccaccacgtccagctaatttttgtatttttagtagagacggggttttaccatgttggccaggatggtctcgatctcttgacctcatgatccgcccaccttggcctcccaaagtgctgggattacaggtgtgaacccctgcacctggccttaaaatttctaagcctcagtttccttatctataaaatggggattaaaacaatatctagtgcctgggatattgttatgggatactttgtaccaacattattctataaaaatataatgcaaaccacctatgtagtttacgttttccatagctatctttaaaaagtgaaatgaaattaatttaaatatttgacccagtatatccaaaatgttatcacgtcaagatgtaatcgataataaatattaatgagatattttacattccttttattcatattaagttttcaaaattcagcctgcactttacacttaccagtgcagctcagtttgaaacagtagtcatgtgccatataatgatgtttcagttaacagccaactgcatatacaatggtggtcccataagattattatattgtgtttttactatgccttttctatgtttagatacgtttggatgccagatacttaccattgtattacagttgcctacagtattcagtacagtgacatgcagtataggtttgtagcctaggagcaataggctataccatatagcctaggtgcgtcataggctgtaccatctaggcttgtgtaagtacactatgatgtttgcatgactacacatttctcagaacgtattccctttattaagcaacacgtggctgtagtttagccatacttagcattcaacaaatgccggcaaaattattgttatttattttaaaacatcaaaatttgggttgacaaacatttgtactgtacatttgcatatattgccatgtgggaagatgcctcagataagatgcctcagatatatttttttccatttcaaaagagtaaagggttgactttaagacttctcagctatttcctgcaagtgggcctccctgggtttcagaatgaggtcagtttcgtggtttatggttgtcttttctttgggaggtgggaaggggaaactgaatgtgcctcaagtattgcatgcctgtctctgttttttggctcttctctgtttaattattgggaactggaacaacttgattttaaaacaaaacatatggtctgagaataattgggaggacatttgctagtgatgtagcactgaaggtatgtatcaagttgaggcccaggcttgcaccacttgcttgcttaggtattgagtgtttcccttaacttcaaattgtgttctttcccagttcttaaacccttgtttggaaagtcacagtcaaagcaggaaatatgggagcaagattataaaggaaattgtctgtgagtcttctttaaatccctactttttttctctctcctctttatggaaaaccattggtttccaagctatttatatggctcgtgaatgaaaaaagttgtctcaaagtgccaagaggagagacgaaaactttatttaaaaaggagaatgtggacccaccattgaatttctctgttcttttgcttaactccattgtggacaccaaagtggggaatttctgttccacagccagttcttatgtgaaggcaaggtttttatctctctttaccttttccacacccctttgcttgctgggggaggaatatatgatatgctgatcatgtaccatgtaattccagcctgaatgcctcaactttttatatcatgggagcaaaggggaatttatcaggactgctaagaacatgtatttctcttgttcaagtctctgctcctctgcttagaagctatgtgcctctgagcaagttatttaaactctctaaacctcattttcctctttcctaaaaaggggataataagagcgcctatttcagagtaaaattgttgtgaagctttaaagagacattgcacacaaagcactaagcatgatgcctggaaagtaataaaaacaaatcttagcgatcaagcagaggccttcggcaggaacatgtccacaccatcagcagcaggagggacagtgaatactgcgtcagggaaaataaccaaacatttgtccatgaggagcttcagcattggaaagtcagccatttcactgggttgtgtttgatgtcaatgggttgaagtcaaagccttaactctgtgcttctgtgcttcctaggtctcatgggagcctgtacactcacttgtcagtggtcgttctcttttgcccagcacctataaatatgagagtaacatgctgaattgttttacttttgtgctacagagtcctaagtacctttgagtcttttggagattcacttgttttggatctgaaatgtaaaatgaaatagctctctgaccagggctgagcacggtttttcagttgggatagtaaaacgagaaatctttctgaacactttccaaggagtcccctataagagcaaggggtaggaagaaaggggtcttcagttcttgccaaatcaaggacatgattttctgtatagggctcagaatgtattgtgtgttgtcttgcttcaatgtcagatgagtgtcgagagcttcgggaaggtctgctttttaaaaacaccactatgttttcggagcagctaattgtcttttgtcagtccccttttctttctgctcctgccatctgtccaagtcccgtttggatttattagtgattgcttacaaagtatcaggaactccctgctgagaacagtgaagcccttgcccagtgggcaggtctcggatttccctggaactgtaaaaaataaccactctcactcatttttttctctgcatacccctctcagtggaccactttcctcacattaacttaatcaagatgttagtaaaataaacggtgtgctgccatcacactgaaacttcttgtctcttttcagtgtttggaaaggaaattgagagttgctattgataataaagatgaagcatatctttactcatggccaattacacacagtcctgatcattggatttttagtgggtggacagctctgtacaatgtgtcatcaagtctgtgtcgccccagttacaaaacactccattgttttctatatcaagggggaaaaaattatgagataccatggattttaagatacatcccaatttcagatgtgttcaaatgtggggaaaatatatgtatcttatagcagatggaatacagtgagaattaattaaaatggaaagccctagtccgggagtggtggctcacacctataatctcagcattttgagaggccgaggcgggaggattgcttgagcccagtagtgtgagactagcctgggcaatatagtgaggccttgtctctacaaataattgaaaaattagccaggcatggtggcatgcgcctatggtcccagctacttggaaggctgaggcaggaggctcggttaagcctgggtagttgaggctgcagtgaactgtgattgagccactgcactccagcctgtgtgagagagtaaaaccccatctcaaaaaaaaaaaaaaaaaaaagaaaaacagtaaaatggaaagccctcctggttatcacctgttcctctcctggcattcccccagtcctcaacacagctaattgacagaacggtgagatttgtgggtatgtatgagatgtgcctctgccttagggctgaatgcgtaactcagtcccatgtgttgtatactctgtgtatgcatgaagttgtggaactgagtcaaaaccaagaagggtggtgggaggtcctctgaactaaaatttacacaatcgaagtttctgaaaacagaacttaggaattttctttgggttacattgataagattcttgttacctttggaaggcatgatcaaagagggacatccaaggctctacatgcccctcgctgacctggcccatttgtaatggctcaatactgaagagaagatcccagttcctctaagttaatgcctctgcttatccattttctagtgaccacaggcctcagatccatggggaatccgtttcctcccctaccctaaaaggcagcatattaaatgttattgataatttcagtgtactcaggattctacctaattattactcttcataatctgaatgacttctaaccaactgtgtgtctccagcccttcttaatgctgtaaaaattttaagtagggggattatggtatttattttcctggtaaagataagtgctcacactttaggaaaagctatttcccagccaggtaaagtgacaaaagaattgattgaaaagtttcttctttatattagcggcattttcccttatatttacactgctttctttctttttcagtttttgggaataacatttcttggaattggactgtgggcatggaatgaaaaagtaagttgaatatcatgacaatgcacacatcgtggttgttagaggctgcacatcatattatgtattatccccctttctctttgacaaccacagagtataaacatggctctttaacaagaaaaagtgttggtggaagattaatgtcatactctcaaagacactttaggaattgtgcctaaattgatgactgcatcaaaataattactgaagtaacaatacacgtgctcaacagagaatataccttggaatttgatcagttagccaaagatcgatgttcctatgggatattttctcactcaggcacaagaattccagtaatgattataaatatcactaaaccacctgtagcctttttttctcttctgctttttttcttcaactctttggaagataactcaagataaaaacgattttttttagtgtgttatgtggtaaacaactattagcatgtggattgaaggaagtgggatataacttcatgtttgagtatcaaatacactcatcattaatgtaaataatgggaatgtttggctgctggtggcaagtattaagaaatattcagtttatgatcaaatacagtataataaaaggaaaatctggaaatacagagtaatctatgtgacagtgaagatacaatgttctgggcagtttctgctctaagcaacgcactcatgcagacaccccctgtgtccacacctctccttcccatcgcaccttctaatttttctctacagctccccctactgaggccaccagtggaattcaacagtgaatataaacacccgccccctcctcccagcttttttccttccttctttgcaagtgaaatcacctgcagcatttcatctatccttgtatctggctatacacaaaagctttattatctcccacgtaaggacaaggggatgtatagaatggttaaaagctgccataaactaaaatctagcttaaaatttcccagaagaccattctttgatcccgtaggtgtttcaccctctagcctgaccctggcctgaagctgagagttcctttgaagtggtaaatgcattaagaaaggagagaaaaactgggaaggtccagtcaacaaaagcccctcagaggccagtaggcatttccacaactaaaacaatgttcagacagaccatataaaacaaaactcaaagcaaatcctgagttttgcaaatgaaccatcctgtatttatttacaaaattcttctacagaatgtaaaatgttttatggaaaacaaactactttttagcaacaagagtaactgaggctacctggagttttgaggcagggcagtgattatgtatgaggggagacaaattaagttcccaaaacagagataatttcatctctagaaacttttacattgaatatcggttgatcttgtcttggattatggttaacttttgcctcaagcctattgtgaacttggaaatttgtggaatctgggaagttggttagatgccagataacacagctttttataactcctttaataagagtccatttctatctgctttgaaaaaatgctggaaggcattaaatgaactaattatctgttctagcaataaacagcagttggtaattttgaagttttttaattttctctttatgaaatataattatctttttgtttcatcagttgcctcaaatgtctcttctctgataaaatcacaaacttctaaaactggcagtgtcatacaaatatcagagcaaggggttgatgcggtctttagggagggatgaaatagcagttccttttttgtaagggccaccatcaagatttctcttgagatccgaagttaacctggccaaggtcacccagctccatgtagcagaactccataagcagggaacaaatagaggcagcagagggtgaagcgggtgttagccgtgcaccagcccagtttggtgagtgctggccatgtgtctggggcctgagtgtggggaatacgacaatgagggatgcagagtccatgcctcatggagcttgcattctggtgggtcaccaatgagaagcagttactgcccaagtatgtttgtccagatactggtaagttctggcaggaaacatcaagttagagagtggtgggaaaaggagtctcttttagatgaagtagttgccaacagcctctctaaggaggtggcatgggagcagagacctggatgaaggaagaaggatctgcagggtatgggggaagaacattctaggaagagggaagagcaagtgcagtggccctgaggcagggactttggtgactccagggaacaacaagaaggccagtaggcctagaagggagaaagcaaggacaagaagaggtgggttgtgttgccaggtagaggccagactgggcagagtcctgcaagaagtttggatatattctaggtacaaggggaagccactggagcattttgaaaagtctaatatgactttttttttaagatcactctggttgctgggtgggaaaagagcacagctttgtggctttgctatggactgaatatttgtgtctccccaccctgccaaattcatatgctgaggccctcatccccaatgtaatgatatttggaggtgaagctttggcggggaggtaattaggtcatgagggcagagccatcatgaatagggttattaatgcccttctgataacagaagagacaagagagattatttctctgtctgccaggtaaggacatagccaggaagaaagccctcactggacaccaaatcttggcgccttgatcatggacttcccagcatccagaactatgagaagtagatgtttgttgtttaagtcacccagtttatgatcagtgttatacagccgactaagacaggggtaaacagacctgagttcaaatactggctcctccagtatttgacatgtgtggaatacacacatctcatctgtgtgatgttggccaactgagttaacttctctgagatgccatttccttgtttggcaataggtatactgttctcaccttatagaattgttgtgaagattaaatgagacctccctcagcacagtgtctgctctaaggcagatgcccactggagacatggctccctcccctggacacatgaccataggctgtccactcttaatatggggcaagagcacaaaggtagttttgaaaggcagcctcaaattttaggagagtttcaggctccaatccatggaccagagaattgggtttgttttgtggtctcttgaggaggatgtgaagtgtgttgatctccttggtaactgcagagactgctctctcaaagccctttgggttaatttctgagttcggccaggcctctgctggagtaagttttcaaggtgaaccccagcctggtagacagtgtggtgaacactgcacctgctgagctgacaccatcagcccatgaatcagtacatcccctagacccagatgtggcgacatttacttgtaagaggcctggagggtaaatccccaaactggatcatagctggaaggatgagatttccactggaagaaacacattttcttagcagataggactttcagcatattcatgtgaagtacagaagcattgaaagcaaaaatgattaccccatacttaatatcagtctgagttttaaacctagggctaatattgcagttcaacattagacataataatttaaagaattcattttgtctgagttttaaatcaactgtaaaaatgcaaaggatgagtgtctccaagggaagctgatttatgtgcaattgttcagagatcataggatctgctgtttggaaggaacattaacaattatgtgacatgaatcacctccacaacacccttgacaacatccagtgacagtcaactcattcattcagataacatttattgagcacatagcatgggcagggcttgtgctgaattctagggaaatgtggatgaagtgacctagtttcagtcttcatggagtttatccagttgtaggaagggtgtgtgcatatacctaaaataatacactgcaataaatgctacttaggggtgtatatatgtttaatggttcccacagcaaagtgctcagcatttctgtctctttaggttgcccttcctgttggaaagaccttcattccaccgaattagaatcatgtcccactagttttcactcattgattctggatctaccctgttggatcccacagaataagtctttccacatgttagcccgggaggtatgtcagggtgagggcctggttccttctgagtttccaggctaaacatctgcttctctctaggtggtcctcacaggatgtgggctggagccccttgtccattttgttggtgctcatctggccccgctctggtgtcttttctgcaccatggagaggaagctttaggggctgtagagagtgtggctggattgcgtcctttctcccctcatcaatctagcttgggatccactgtagatcacggtgtctgcagctcactgagagtcccaagtaggttgcagacccaactggttaccccatccacctcacctatggctgattttcataggcagttgcaggattccacaatgacacagtgatatttcagcccacctgtccacctgctgagatcactccagagcctctatctagcatcttccccattccgcccagcttgatttcagctatacattttgatcaacctcctccctctattccttctgctaaggcagactgtccttttgccccaccatgccacctgggaaaattctgattcagtaggtccaggatagacactgcgatgctctattttaacaggcctactagattgttgtgactgcagtcaagtttagttatcattgataaaagccagtgacatgctgttgagcaggccaaggacagagcccaatgacatgtcactagaaatttcctttggggttgacactcattcacttatgtgtgcccttgggtgtcatcagtcaaggagtttctcatccatctacttgtcattacatcagactatatttctgcatcttgtctttgtagatagatggtatctttcactttttcactggttaactggcctaggcacttaactgaacctagcactttcttattgaacccatgctgggtcctgaagcacatcattttctcatccaggtacttgggaacctttatcagcaaagcaaggactaaggcataatacatcactcctcaattcgagaaacgttttcctcacttggcttccaggatatcacactctcctggtttccatacctcacaggtggtgccttctcacatgtgtttgctagttccacctcatttccctgacctctaaattttggagtgcccaaggctcagtctgagctttgactcgtcttaagaaatctcatctagacttggggctttacatgccatctgtcactgatgacttccaaatgaatatttttgcttccaacctcatctgaattctagacttgcatagccagcatccacactgaaatgcctggtaggcttctgaaacttaacacattcaaaacaacacaagtgattctcatgccctcccaacctgctcttcccaattgcggtaaagaaacaactccactcttctacttgctcattcctgacactctgctttcttttctcctcataccatattcagcccatcagcaaatactgtcagctctactttgaaactatattgaaaatccgatttcttccaccacctccgctgttataccctgttctaagtggccaccacatcttgcctgcatttgtgcagaagcctccaattatctccctgcctctgctcttgcaccctgaccctcaccctagggctgtctctgtgcagcagctggagtgatcctttggaaatgtaagacagatccttttacttctctgcttctagccctccagtgagcttatcttctcactcaaagccatatatggtgcccatggcctgtgtgacatttgctttcatactgtgtgcttcctcactgtgtcctatggtcctacttatcaacttgctattcctcccgcatcccaaacatacccccacaaccccagggcctttgcacttgcccctgactggcatgctcttccccagaaaaccacatgagtgctatcttctacttcctggtttcttctcaaatgtcacctttgacctagccctttcttccccttccttgtgtttttccttctcatgcgactcatcacttagacgctaacaagtttattgcctggactttttatttattaccacactctagtacctagaatgttagatggcacatagcaagtattcaagaggtattgcttatgaaagaatgaatgagcaaatgagcaatgacagcattctttaaaacactggctatgtcatggagttatagaagtcagtacttgcctcacatctccagtaagcatactatattagcgattcttacagaataaaaggaggtaaatacgtgtggtttctgaagtctgatttgagaataatacggggttagaaacaaaatatatatattgtctatatcagaaaagaagaaaattacttctctcgtaaaagtggaaatctatatatgattatctcatttcatggaaaaattagggatgccattccttttccgttttgctcaactcttatgcttattacttagttcttaagtgggagcaagagggagagtgatcactcacaattagaaataaaggtattggggcgagggaggactcagcttttcagaggagggaaaatgcctttccctggtccttagtgtgaattgaatgttcccattctgcccctgcctccctaatacagcacctagcccactaagcagagtggatacctactcctggcttgtctggcctggaaactccttgaggacaggagcctgtctttgccctttattctcagttcctaccacaatgcctcctacacaatggatgcccagaagctgtttgtgactaagccaatgagaacatgcaaaaagagctttacacgttgtaaaatgctacacaggaaaaaaataccactttttataaaggagttgcatttgcacttccctgacttctggatcccctcaagttaactttaagagaatgacattctatttcataggtggggaaaccaaggcacagagatgtcaaactggaagtctggccctctccctcccagtcctctggccagtcccctgtcatcctccattgcactcactacgctgggttctctaggggtgattggaaggaaagaactggtgcccagtgctgatcccagtagggagaagggggaattagaggagctctagcccccatattgcttttctccttggctttgctgtagatgatgtttctttttcctggagggtttttcccagcccactgtctgtgattttaggtctcaatgcagaacactccagttcttcctgtcacaattatacaggagactcaccttggaaaacctttccctatttgccgaggaaggaaaattcagtgagattcattgattcaggaatgtcatagcagtacaggccagtttctgttgcctgagggaggcaatagaggaaaatggttactcagatgacttgagcagaaaaaaatagatttcttaacattgaaacttctttaaggagacattactgagatgctgaaaatacttctatgaagacttggttttattgactgaaagtagattgtgattcttttcctcaattatcccaatgattccctcaagttctctgttgtatctaaagagctggaaaccggccgggcgcggtggctcacacctgtaatcccagcactttgggaggccgaggcgagcagatcacgaggtcaggagatcgaaaccatgctggctaacacggtgaaaccccatctctactaaaaatacaaaaaatcagccaggcatggtggcaggcgcctgtagtcccagctacttgggaggctgaggcaggagaatggtatgaacccaggaggcggagcttgcagtgagcccagatcacgccactgcactccagcctgggcagcagagtgagactccatctcaaaaaaaaaaaaaaaaaaaaagagctggaaaccaaacagctcatggtcagtacctggaagctatgtgatctgatgtgctctaatcagtaatgtttcacacacacatgaagtatatgggaagaaaatttaatgtttctctatgtattcccctttaaactgtattcagtggggtttcttagggatgaaaatttagttgggtcaaaaattcaatgactttgttgttcactctcagatatcacagtccttctctcactttgaggcacagatccaggcccagtgattagacagggctggataataaaactgcaaacctaactttgcattaaaatgttctccctgccgagcccatcagccttggcccctgaggagggaagggaacatgggcccttgccctctgcatcctccttctggcccctggccctgcccagatgcctctgcccaccgcctgcccgggcagaagctggggtgggctgtgctctctgggcctggtggaagttaaagaggagaatatcctggtctttgtgaagctcccctgctgagtccctgtgcctagtgatttccttgagcttggtagccatctcaattccaggtgaccacctggcagccctgctcatccctggccaccttcctcagccagtgcacctctgagctctgccctctgaggtcacttcttcacacgcctgcaggcagccctatctgacagcgtccaggatgacctcaggccacctcttccgtgctgtccccgtgttttctccaggacatactcatctgggagcgaggtcagtgcccccagaacagcccattgcctgtcctcacctacttctgataccagagcagccagccggcccttctctctctaggttgcaagggcaggaggcagcccacagccccttcctaggcagagtcgggccctaatggctgtgcgggtcaagtgcagagaaccacttcagagctcccgggaggtgcccttggaactcctcctaaggtttagggtgagaaagaggctatccacactccacccccaggccctgggcagtggtgtcacagcacagcaactgctttctccagagaaaccttgcctctcagtcctcctctgaccccttttgtccctgccagatttcaccgaggcgcacaaaagaaagatgtcctttgtcggcggtggtggaggtggggtgtggttgggaggtcttgtctcctactcactttggttttcagatagtgatcagtgaaatcagaggcaagaatgttataacatattgtgtatatttttcttaaaattttagaaacatatgtatgatgttacgttggaaataagaatcctcctgccagctgctaccccaacttccagcaatagatcacagggagtggtgtgaaccctgctcttgggtcaggcggcccaggctcagaaccctgctctgtcacttcctgacctgggctacctgggcatgttagttcctctctgtgtctgtctcctcacatgggtaagagtgcctgcctggctggtttctggtgagggtgaagtagtccaggtagcccagtgcctggctggagtcactgctgagaagtgtagttcttttggtgctgcttttattcaggccttcagcagatctcacccggatcaccccagagcctgctagctgcttccacagcacgtgactgccacctgagcgggcttctaaattcagaaatggcctggagcttcctctgctccaaatgccctcagatacaaacccagcctcgcccaaccagcctcttcatctcttctcaccgcttgtcacatagaggccccactgggccagatcctgtcgctttgtctgcactcttactgatgggaccttctgcccctccccatgcacccccataacacccactgcttgtgcctctgctccatgcactctgttcttaaccgtctcccctctagactcagctcctgagggtgtcactggatgttttgctagaaataacccttgactgacataatacctggcaactcacaggtgatcctcatgaaagtatttgctcaataaatgaacgagtctcatatttttgaggtcccagaatagagggtcacctgccgctagtccagacttcaccttttttcacttgagtttaggggcaccatgatcagagcctgttttagctcaggctgctgtaacaaaatactatagactgggtggcttaaataacaaacatttctctctcacagttcgccaggctgggaagtccaagatcaaggtggtgacagattcagttcctggcgagggccctcggtttgcagccgcctttttgctgtgtgctggcatggcagagtgagagagggagggccctggtctcttccttttctttttttttttttttttttgagatggagtctctctgtgtcacccaagctggagtgcagtggcacgatctcggctcactgcaacctccgcctcctggattcaagcagttctcctgctcagccttccgagtagctgggactacaaggcgcacgcctggctgatttttgtatttttagtagagacggggtttcactgtgttggccaggctggtctcaaactcctgacctcatgatctgcccgcctcagtctcccaaagtgctgggattacaggtgtgagccactgtgcccagcctcttccttttcttataaagacactaatcccatcatgggggtcccaccctcatgacatcttccaaacctaattacctcccaaaggccccacctcaaaatactaccacacgggggcttagggtatcagaatgtgaatttgggggagtcacgaacatttagtccataccagaacctctattaaatctttcagcttaaactttacacctaggctggaatgtttctaggtatgtctcccgtcttctgaatgtaaatgaaaatatctgggaatggctgagaacatgggtgatttctgaaaggctgcgcttttgcatgtggctgtttccacgctgatggggcagtggctctcaccagagtgtgtagagatggtagtttccctgcctgtgagcagtgccacctgatggaacttggtaccgctggcctccccagcagctacttgattgcaggattgtatggagacctaaaagatgactacccctccttctcctcttctcctcaaaggcaggtcatggccactttttaatctgcaaaaaaaggattacttgagtttcactaatgaccttttttgacaagaaaaaatgggaaggagccatgcacctttgaagcagctagtcgtcttttatccttgtatctctttgccaggcatgaactaagctgctcttgctcccttacatctccctggactgttcagggcctgacaggctttcttctcattcctagtcgtcactctggcctctgcagcagttccttagatagatggatgtttggagttttacagagtggcggagcatctttgacaagtttttataggggcaggttcctctgtggccctgtggtctctatttgttcttactgtgcatactgtttagaaccacatttctaactctccaggatcacccctcgctgagtagctgtattttctttgaaatgtcattcctcgttaccctttctcactagggaaatccttctctatctcttactctaggaaaactgttgtcagtaggatctggtttatggaggggttggtgaatcaagagctagtctcataaatctcaaaggggtccatctggcccagctttgggtacacatttcataggcctgtctctctctctttcttatccagcagttggaaggaatgtgcttgtatatgcaaaagcagaagagtcccagaccttggggtttattaatgctatttttgtatttcttttctgtgtgggttgcgagaagaagcttgccaggtggcacacagaggctcctctgtgctggtgatgaaaaaaaaaaacacagacactcctgaagtttattggtgtggaacccttctggagttttgtttgccttttcgtttctgcatgtgcatagaaacctctttcaagaagaaatagttactcagaacatattcctttattgcagaagcatggggaagaagctgcttaaattccagagacagctgaatgaataaggcactaatgaggagagggaaggttagctggtttgtccttttttttttttttttttttgagacggaggctctctctgtctcccgggctgtagtgcagtttcgcagtctcagctcactggcgtgggcaaggtccgcctcccgggttcatgccattctcctgcctcagcctcccgagtagctgggactactcccaccaccacacctggctaattttttgtatttttagtagagacaggatttcaccacgttagccaggatggtctcgatctcctgacctcttgatccacccgcctcggcctcccagagtgctgggattacaggcatgagccactgcgcctggccggttggctggtttttcacattcttactgagacatactgtgttcatcaaaccactgaacagccagatctaacggggatagaacatagttcagccactggaaggtcactccagagtggtgactgacaaccagtgtgccagtcagcaccccagcaacagaggtatccttgctcctggttccatgtgccaccatcgtggcagcaccactgctgtcttaccgcagtcactgactcctccctgctttcttctctgctgcaccacttctcagtaccctaagcttccaccactcatggcttctgcctactcctggcttcagcttcctcatggcctccctcttctgccttttctctccatgtcttagattatttccaattccccccaaaagaagatcttattaacaagttagtgactgtcacctctgttaggcatgatcatcaactgtggccatggctttccttagagggggtcaggcagggcaagtacccagagcaaaacagtttcttctccagtgcagttgggttagacactcctcctgggtgcctctacagtgtctggtgtcttcttcttgttctaataattatattattaatataatagtgataacagtgattatggcaatatacttttatttaattcttattatattcgaagcacttcacatcgtgtttggatttacttggattgtttccatcatcctcataataaccttaggacatagagtaccattttcacagatacagaaattgaggcttaggcagatgaggtaatctgcctaagatgacacaggtagtaagtgcgatcttaggcaggttacttcatctgcctaagcctcaatttggcttagcattgggattcaagacaagctagtctgtattagtgtctgtctgtttgtctgtctcccccattgtccaggctaccccactttctgagttttggatttacttggatcccaggggatattggaggtgagcctcattggcttaagtacagttcaggatggtttgttcaggaggaggttgattctggaatgctctctctgccccactctagagcaggctagtctaagtggctggaatatcagagtctcccttgtaccacgatgggtgcaaatggatacattgttgcttgttggctctctaaacttctgttacaatcctattgcctcagacatggaccactaatgtgtcttatttcttcttagacatatactggtctctttgctaagttatgagagatgctgtctggtacctagtggataatggaaatctcctattgcagaatcatctcttaaaggcttcaagtggatatgccagagttagttgtccaaaagctaatttgcagaatggccaatttgttgaatatatttttttctttcaactttttaaattgactgctattcattttgtctttatagcagcactttatgttatggtcaatttgttttttgcctctgctgcctgctgcaacaacagctgtagacctcagaggcaggagaagagaagattaaggatcctaagaagaatattgacatagcatatagtctgcatacgaagaattcttatgaatatattcatttatatcagttcttactaataaaattttaatgtattaataagatatatgtagaggaattcttcccacatagcattctgaatcgatcatcttgaatatatttttctcatcacctgcagtcttggtctctggctctctctcattctgaatctttctgtttctgctactactgttcagaatctcactttcatatgtcaactaaaacggatggaaataactgtgtgtggcccgttactctgcttctcactcatttatccttgttccagttaggttcagcttcatgggatattttctgatgttatctgcgaagtctagtacccttgacatctttagcccccagggcttgctatgcttgtaggattcaggtaggagaaggatgagaacttcctatggaatatagatgccaagctctgtgtgtgcacttctggcataaacaggtacagaagagagtagtcaaataacattttgtatttatttacttatttatgttttattactttttgagatgtgatttcactctgttgcccaggctggagtgcagtgatgtgatcatggctcactgcagcctccaactcgtgggctcaagtgatctttctgcctcagcctcccaagtagctaggactacaggcacacaccagtgtacctgacttatgtttaaattttttctagagatggggtcttgttttattgcccaggctggtctcaacttctggcttcaggcaatccccctacctcggcctcccaatgtattgatttttttccgtgtttgaggttttaaaagttggtatttaaactcaagggctgaacattcaagtttacatgcagaattggaggttaaaccatgttatgcattatttgtcagtaacatagacaaatcacctaaaagttccataagagttccacagaactgctcatttcattgatgatgctgaattcatagtgagttaacatgaatgagactgtttacaccggcttaattactacgttgacttgaaatatcagccagctggggaaaatgaccatttaaaacctggcacatccctttgctccctatacccacattttttcccagcttcgaccacgtgcgtgtgtctgtgtgtctatgtgcatgtctgtgtgtgcgtttacgtgcatggaggactgaagcatagtgtattcaaagcttttgtgttgtgcaggacttcgcagatgcaaatgaagacccaaagagaaccagcataagcaatcaagggagtgtatctaaggctcctggagtgacacatagagctctagggcaggcctcaggaaccactggactggggatttataatgctgtctggattttccctccctactcttgttctttgtttcttcttgagcgcggttttctgcttctcactgctgtctgactttctccacttggtaggaaatatgacatgcttcacaaggctctggagtttggcattttagagtctcagccactagagaaaggtgcctgttctaaatcctggcactttaggaagggaatccaggcttctcagccctcaccaggccagcaggattgtatgagatcttggcagctctgaggggtcatggagtgaaaggaggggcgaaggcatccttacaaggaggaggtggtgctgttcccagaagaggcgggggcctcaggttcccagaagactaggtgtctgctggtggtgttcttgcacattcctaaggatttactgtgaatctggtgcctgttttaaattgcttggcagacttaactgtaatcttagattttttttcttacagcttcttgtcaactacaaggtttaattataattactcttcagcaggcatatactagcacttcttactcatctgtcaaattgagctgaatgaaattaaaaagtccagaaagagaccccatctttaggacaacagaagactgaacagtcaactccctatcatttttgtaatccaaatcactgttgtcaggattatgttcccccccacctttttttttttttttagacagagtcttgctctgtcaccaggctggagtgcagtggctcaatctcagctcactgcaacctctgcctcctgggttcaagcgattctcctgcctcagcctctcgagtagctgggattacaggcaggtaccaccacgtgcagctcatttgtgtatttttagttgagactgggtttcactgtgttggccaggatggtctcgatttcttgacctcatgatctgtccgccttggcctcccaatccctctgtgtagtcaaaagcaataaaactgctgctcttcagtgaatgttgggaaattgtgcacagatgaaagaataagtctgttttttttctcctgctaggtaagtaatccctaattttccctaatcccaaggggaaaaatactggccattgggcattgacttccacattcacttcttgtgtttcaagatttgaggtagtgatgatggctaataatatattcttgaaaaatgccgagtggatgtaaagtgttctcaccacaaaaatgataactatgtgaggtaatgcacatgctaactagccagatttagtcattccactatttatatatacacgcacctcaaaacatggacatgtacaatacatacaattttttttttttctgaggcagagtctcgctttgtcacccaggctggagtgcagtggtgcgatatcggctcactgcaagctccgcctcccgggttcacgccattcttctgcctcagcctcccgagttgctggaactacaggcgcgtgctgccacgcccggctaattttttgcatttttagtagagacggggggtttcaccatgttagccaggatggtctcgatttcctgacctcgtgatctgcccgcctcggcctcccaaagtgctgggattacaggcgtgagccatcaagccgggccaatacatacaattttatgtccatttcagttttttaaaattttaaaataattttaaataagtagataaaggatatattcttttcacccaggaaaaaaaagatttgagttagttttcaactgataactacgtgggtatattctgaatccattaaaaataaagttcttggtagtctttcctatgctttgtgggagattagttccccccagcacgctgtagtatctgtttgcagctctatctttgccagaatttaggattaaataagtagaatctgcagtccagctcagccccccaatgattgttgtttccgtggaaacagttgaaggctctcaattaaaactgcctctgaaggctggagagagtaagtattaaaatgagtttgtctgagaagccaatttttatcctccaaattaaacccagagagtgcagatgatctaggaatctcctgacagttgggatcatacttctttgtctttgggggagggattattttgctatttcgggcataggtatgtttgctagcttgttgcttgctttgctgagttgctcagatcatcgtctttgttacccactgagctctttatgtacaaccatggatcatgggcaagggtttgggagcaatctgatctttgttcagacttgtgagccgcaactaaaaagcccattaaaaatggatgaaatcatagaacggtctcaaagttgaaaggaatcctaaaggtcattaaggcctaatttcccatccactttgggaatctttcctagaatgctgttgacaaaggttcacagcatcagcaaccctgttggggaatcccgtatttctcagggcagccttctttggttcattgaacagacttggtggtattgttaccgggggtccttgttcttagagctcccaagatggtggcgggccgcttccaaggtggcggcaagcctcttgttctctgacctggggttcttggcctcacggattccaaggaatggaatcttgggccatgcatgcggtgagtgttatagctctatccagctcgattaggatgaaccctgggcacttagaccgtgcaggaacaatggcgagcctctagcccgattaggagtggcagtgggcacctcgctggatcaggagcacagcggataccctgccggatccggaggggtggaagtcagtggtggcttctacaacgacggcaatcagcagtggtggacggcgagtgaaagctcagttcgaaccagaacaaacacagaccagagagtgtgcagtttgcaagatttaatagagtgaaaacagagctcccatacaacgggaggggacccaaaggggttgcccactccctgcttgaatgcctgagtttatatctcgatcattgtccctccccctgtgctctcaggcgatatatgatttgacaatttctttacctcctgctttagcctaatttgtattttagtgagcctatttactacctgattggttgggtgtgagctgagtagttacaagccccatgtttaaaagtgggtgcggtcacctttcccagctaggcttaggaattcttattcggcctgggaaatccagctagtcctgtctctcagtattagaaatgcctctttatgatggaactgacatttctctctgtcaattctgctactgctacctcttctttctggtgccaagttagctgtgtcttcttctcccataattaagcttaaagtcttttaagaatgtcttcatgtatccccaaagtcttctctctcttccggtggctgagaaggtccataacctgaaagcttcaggtactaacatctgtggttaaaggcattgtcagaggagaggctggtttcctaacaaccctgggcctttagcactgttgcttggattttttattttaagtttatttttgtagagaaagggtctcgctatactgcccaggctggtctcaaactcctggcctcaagcgatcctcccacttcagcctcccaaagtgttgggattacaggtgtgagccactccacccagcctgttgcttggattttgtccgacttctctggcaagttttttctcagcatcatttgtataggtggagaatttggtttgagtatttctgttttccttcaaccttttcccccggagtaaatattcatagttcactgcttggaaacccaagaaacaaaattggatcaaacctttggtctatgcagacttgtgaagggtgtggttgccttctttgatgtcacctcagaagttaatgaatacaacctcaatcctaactgctttaatagcctttcaaccatttgtctgtgacattaaaccttagactttttaaaattaggtttaagttttacattataagagttctttatttccccatatacattctgttcttaatatcctattattgttcgtaagttgacacccccctaaaggaagaaacagacagaaaaatagaacaaacgaaatacgcttctccaaatgttcctacctacaacctttaaatggattaaaacttaaaactcctaagttcagatgttggttagtgctgactgggaagtactgggaagcaagtgtgtggcccctgcttggtactgaaatagacattgtgtactggtttcaaagaagcgatggcgtctgtcaccttcagcccatcaccaaactgctctgagttccattttcctcaagtataaaatcagatgattgcttcctgttcttacaggttattgggagtgctttgaaaacaatttttttttattattaaggctttacagcaaactatactgtgattctctggaggtattttgatttgagagtaccaaacaacttcaataaaattaaaatattggtgatattggctgtttaaggcccatgcacatccacagtttcaaaataatcttgtaacataggttctgggtggtatttaatatggtatcacacataagggaagaggggatttcagtaaagaaatgtcattttttgtggaaaagtgaaattactcgaggtccgtttggtgttcttgtggaagaagaataagagttgaaagtgaggaagtaacctttgatttgtaaatcatttaaatttcaactcgaagggggtaagaaataccccaacagcaagccacagaacagccaccagagcaaaccacacaaggcttttgggatctcagcctaataaaggtctcccatggagctcaagagtagatcctgaggtacgatattttcttggaaaaaaaaaacttgtaggtgtttgtagccggaccgggtgctgtgttagttttcagcttctagctcgatcctatttcctgagaaatgccaagggctttgcaataggcatttgtctaacttctgcgtgaattgggtcttacagaagatgacctcccccctctctgggggtcagggggtgtgtgtgttttttatacatctgtctttttttgtttgtttgtttttactgaagacctcttatatttgcagacactgaaaccaaaggtaacaccacgtcttctccttacagggtctaatgacagtttcttgggctcttcttttcttttttttttttttttctctacatatagttttcccaaaaatatgaacacgtttagatgttggaaagaaagcagtttccctccctccttccctccatccccccctccctcccttcctcgcttcctcccttcctcccttttgtttctctcttttctctttctctctctttctctttctttctcactctttctttctctttctctttctctctctctttctttcctctcttaagtattaatcacatacctgataatcagatgccctctgaaggttttctttgggaggggaaaggacaaatgcaataatctttacatgttggaaaactgaccccacatccccgtgccttgttgtgtgttcttttctgctcccagggagttctgtccaacatctcttccatcaccgatctcggcggctttgacccagtttggctcttccttgtggtgggaggagtgatgttcattttgggatttgcagggtgcattggagcgctacgggaaaacactttccttctcaagtttgtaagtattccactctctactctcagattgagagccaaaactttaccttccatcaggaggtcaccctatctacaggcaagacagtgagctgtaccaaaggcactggccaaagtagggcccaggtcattattttcttttgagagagctctctagccctgattcccagttgtgcctccttaataagtacaacaccacccccaccaccccaccatgccatccatggaggttttgtgcatatatatcacagacttggattccattccctaagatatctttaggactaaggtaggtatatatatatattttcttctaagtgattccttcccaccgttttaatgcacatagtaagtggggagctgtgcaggctgttggtttggagaaaccaggcaaaagcacagtgactgtggcctgtccagattaaatctgttaagcagtaggttttgctaaatatggagaaacagtaaaaggtaaagcttctttgtccttagctggtacaaagttctcctttgtaatttttagatgtggtgcggttggcgtgatcactgtctgagtgaatgtttgtagaggagaggtttcaccagggggttcactggtatttaaagttaaaatagagaatgaaaagtgaaagcctttgcgttggagactcgtttcaaaggagaagaaaatggcatgtgccgtttatgtatcttatatagggttgttgaatgtagccaaatgtgcctgtcagcatggagcttggcactctgatgggcgtctgaatcatagctctctatacgaagcatccattcccctttctaagaacagagaaaggatccaaagcacccaccttcatttgctgaggaaggatggggatggtggagatttctagagaacagttgtagtgtaatatttcctgttaccacagttattcccaacttttgttgacacatcatcatccagggacattctcattaaaaaaaaaaaaaaaaaaaaaaagcatatccaagaagtagcccaatagtcatgtaatgtgtgattctcttccccagcatttctgccacatcatcctccagcgtcttttcttaaacatccctgagaagagggtacacggtgtgccccacccagggcagcccatttctgagcagctctgtctcggagaagtttttggaggctatttaacctgaaaattagcatgacttattctaacaaggagaaccgaggggtacctggtcttacagataagttcacaagcagctggttctctcttgtggatacatgggaccacagtggctgtagctagtttcctaagactccatctgccttatctgccagatccttcctttgccacacacacacacacagtgtctctctctctctccctccctctctcatacacacacaaccaaatgcttcattcttcacctagtcagaaacctggggagcccccaggagagctctgtccctgattgccacctgccaacctgccagtcttcttggcttgaggcatctcagtgctccagtgctcagctcaccttgccagctttcctgtagcctgattgggtcctggtcatactcatctgttgccactatttcatcagtttcggcctccatgccccaaaatgtgggatccttttttttttttttttagatggagtttcactcttgttgcccaggctggagtgcaatggtgtgatctcggctcactgcaacctctgcctcctggattcaagcgattctcctgcctcagcctcccgggtagctgggattacaggagcctaccaccgtgcctggctaattttttcatttttagtagagatggggtttcaccatgttggccaggctggtctcaaactcccgacctcaggtgatccacccgcctcagcctcccaaagtgctgggattacaggcgtgagccaccatacctggctgggatcctctgaattgtattttttttttttaagtaaagatggggtttcaccatgttggccaggctggtcttgaactccggacctcaagtgatccaccttgctcagcctcccagaatgctgggattacaggcatgagccactgcacctgctcagtccccttaattgtgatttactttaatatagtttcatttatagtggtggcccctttaatatagtttatcatttcttacagttgaagagtccagtgttaactgaacaggcagaaaactacacatttctctaaatcagcaccttaatttataaagtctcatgttggaaatgaagagaattgtgttgtttcttggcttttaagacttggaaaatatcttaaatggcctctctccatttaggacaaacaataaaaacttgcctggaataatcttcgaacagaaggtatgagataagtagtaagtaaacgtccacaggactccaaatagctctaaagatctgattcccctaggagacttgctgagggaaaatctaggaactaagatactgcaaaatggaaatagaccttcttggttgaccgaggctctagggtgaagcctgtgagtcagtgtctgcacctttggaaatagaggaaattagctcaacagggcttggggcatgtaggtatctgccaaatattttatatgaattgaatttggactcaatttttggtatgtataatatgtaacatgaagagaaaatttaccaggggaactggaaaatgcacttaacttttatggaggtgagaacaaaaactgaattaaaatctttccctgacttggtgtttcctgtgtatgctcatgcatgctagctataattttgtcatttctgtactgtgataattcataattcatatttacatgcttaaggtggggcctaatacagggcagggcgttatttacactgtagggtaggcattgagcagaagtggtgtgatattttttctgttcatttttctagattggggaaagtttaaattgaaattattggcatcactgatgataattaagaactgtttaaattccatttctggcgaattcctgaaggatatataatcaggaactctagggaaacctgaagggctgagctggagggtctagaattggggccttaacctgggagtccaaaaactttgccaaacacttatttccaccttccactcctcctcccgtgcccaccctcacagagcagtacttggcaccctagacaaatactgccagatctacagacatctaatgtctgcagatacccactccctgcctagcctccctaatcacataagactgggacatcttcgaaggcaaggataccccttgttcttactcatccttgtttctgcaaagcccacctacctcagggcctgactcattgtgggtcattcagtagatgtttgctgaatgaataaacattgtttgtcttttgttcttttaatgagtaactgctgtttcctttgcacccctccccaatacatttttctcttggctggcagctccttgtctgcttgctgaagatagaaccgcagaccacctgagcaccccctgcctcctcagctgctcactgttcttctgcatgtggccttcaggacctctgcccagcagttgtggcccatgtcaccctctctgctgttgtcaccagaaatttacccgcactgtaccctctggtccttcacagctcatttctcataatctattttaacaacaaagtttgagaaggttaagaatacaggatggtaggaggtggaaaaaacagtgggcgtgagcagtaagtcgatatgactaagctgagactcttctgagtcttctagatggaaggggaatttctccagagttacgggcagttaccacgttgcctcatggtcttgagcccctcttttaaaacccctgttgtctacattaagcggaagtctccccttggctgcattttgatgtcacttaaaatgttgctggggcccatgcttcctagaggaaggcaagcacagctagcattcccaggaaagccctcaactcaggggtttcattttgtttttatgatgggaaataactttcatttcgcggtcactgcccaccccactacttcctctttgaccccttcatctaagatgaacacatctgttattttaccctgtatagcaggtgcaaaagagaattaaaatggtgtctgaatccataaaaggaatatattgcatagagaatcaaggccacagtaacaagtgacaggcgatcttaaaatattggaataatctatctttcaagttacagaagcttactagagataggggcaggtcattgttacaagcatctggcagtacattaatcatgagaaattaattaggccttaatgtgggtctaatgagaaatccttattatccatgtttgcttatgggctttgttggttaattatcaaatggaacactagagaccctaaaatgtgattataaaatgatttttaaaagtcctttcttggagtgtaatattctattaatgaatcagcagaaactgaagattatctgctttggagatgtgtaacaatccaatgtaattacaaacctgtttagagaggaaccatttagctatatatgatcaaaatagcccttataactgttctctgtgtatgtgtcttttatcttagttttctgtgttcctgggaattattttcttcctggagctcactgccggagttctagcatttgttttcaaagactggatcaaagaccagctgtatttctttataaacaacaacatcagagcatatcgggatgacattgatttgcaaaacctcatagacttcacccaggaatatgtaagtttaaagtggtttgttttcaagttgaaagttctctgaacgatgaccccagtgaatttcatccctcctggtttctgcatctgccagctggaaactacctgactattctgcatgggtgtttgtttgtttgtttattattttccgacttgctctgtgacttacaggatttgtattctaaatggaaatttcctattttcacttgtttcaacttctgttaagttagaggaacaaagaagaaaatgcttgagcaaaacgttataatcatggctgtcctttcctatttgcatttgaggaacattgttttgctccgggtttaaagttttctttggttattaaatatggattctttcttatcccttgcccccttttttggtaatccttgatatttcacagctcataataatctacttatcaacagaataatttgccacaaagttcctaaaatgtgcctatccaaatattattattgcacatgcagttaaaagcaaaagcttagaaactcctaagtcctagtggcttctaacaagtgaagaatctgtgcagtggaatccgggccactctctcctatccctgagcattggagtccaggccactccctcccgtctctgagcatgcctgtgaaatggctctttcagtgccagcaaagcagcagatgtcccgtttcactcagaatgcaagggaccaaaagacacaggtctagtgccaaaatctgataagggaccctgggctcacaggaccttgacctatttccccaatagcaaaatggaaataatactagctactgtctaactcacagggatattatgacactaatgagacatacatgtttttatattaggctaaggtgttagggtcctacaaacttgcaggtctttatatacctgcactgaaaagtcgggtaggctgagcttggacttggacagcggtgtctgtggcattcatgtatatggcaggaccggagggcaagcagaagcccagtgaacggtagccttcttggggttggatagttgtctgcctgtgatgaagggaggcagcagccatgttgacactctttatgagggaggccatccccttccttaggcactcaggactgagcagggttatgtggttttgttcagtggcagcaacatttcgtcctggagtaagctgccccttaagtgggaaattaagccctgattcatgtcctcagccgacttcactgttttattaggtcctaatgggtgcaggctccctaataatccctttcctggcattattcctgactagtttgcatgacacattgatggagctttgtggacacacctcgaaatgcatgacccaagccctggaaggaccatgttgtcttgggatgctgtgtgctttaaacggaaatactacagtttcatgtgattttctttttgcatcatggaatgtaatgtttagaagtagctgttggtccggaaggtcttcaaatggttgagacttgatatttatttaactcagagaagtagagaaagtgcatcccagggaagtgaggaaggggcttgtgtagtagcctttgactccggccccatttaagaaccactgaatttaaccgcttgttttaatatattttaattggaagactgactttttaaagttgaaaatgtaaaacacatgcacttgtttttaaacaaactcagagtagaaacaaatatgatgaaaagttaacctctaaaatttttggtggtaatggatatatcaactatatatccattgattgtggtgacatttttgtgatgtatacagatgtcaaaatttatcaaattgtatactttaaaatgtgcaatttattgtatgtcagttatacctccattattgcgggatctggccagcagcctgcaatgcaacagggatctctctgttcccaggcggatcggcaggtcgagaaataatagacacacacaagatagtgaaagctgggtccaggggggtcaccgccttctggtcacgcagtgccaacaatgcactggatataccagaatttattattaagtttagtgagggtgggggtaggttagtgagggatttaggtcatttgattatgaggtgagatggtcacatggggatgaagtaattctttaacataacatctgtatgcaaaagtacagtatacagggataagaatttacaatatagtgtgtgcttcagtaatttctaacagagccttaaaacagaaacacagtctttccacaacctatgattagcaagatattagtcagcagtaacagttgcagcaaaagccagttacaaacaatccatagaaacaggacgtgaagctacacaaccagttagaccagaaattctcagaagggagtatgccttaaccctaaagaggtctagaagagccgtggcaagatgagggcatttatagccctgtcttatacatatggacaggtgcccctcatgtgtctgtttataggctctccacaaaggtcgcattctattcccagagctatgaacatctgcttttctgggataggaatcttggtgatgtgaaacctccctgactgcacgtccattcataggctctctgcagggggaagcacatcacgcactgttggctcattctggcagtccaacctggcattgtctttacacaatcctgcatgcaattttgtatttccagtaatcaggagcatttcatcttttattccatagcaatagtttcagggggtctccctgcgctccataaaacaaaacagatctttaaaaaaactattagaatgtagagatcaaaactttgaaaaagtaagctatagttagcccacccataaccccagttgcctccttcagtcactaccactgtcgttagtgtcttatttacccttctagaatgttcttgtttctccttctagaatgacgtgcccaagccaaacagatcttgttctaactgagccctgctgtacagctgctctgcccttcttccacctaacaccacaggtctcatcagttgtttaaatcacgtgccaacacatccctacaaaccttcagccctaattaatttggaagattttatatgggccatttaggttcagtttggcttaaaaataaagtctaggacagaaaagaaggtcagagctggcagaagctggtgtcgttcggcgggtgtgagtgtaggtgactgcttgcctccaagttgggatgttctaattctttcctgtttgctctagtggcagtgctgtggggcttttggagctgatgattggaacctaaatatttacttcaattgcacagattccaatgcaagtcgagagcgatgtggcgttccattctcctgctgcactaaagatcccgcagtaagtgaatgccagcgaactattggcctactctgtacatcatgccgagagtgtgcatgggacgagcagagtgattttttggttgaaccctcttcttacctggttactcgtatttgtagctcctgtagggggttatggtgctcaaatcttcctagtaggagtaataattgctggcattaatttagcagtgtgtgctggttcctattctaagcctttatgtgtgttggctcatttaagttgggcacattcctactggcagataccaccattaccctcccttttcaggggaagaaatcaaggcacatgaggtgtaagtgactttcccaagcttgcactgctagcaggcaatggagtggaatatgagacccaggcaacttgcctgtatcatctgttagcctttcttcatgagaagggcaggctcatatgagagctctctgcattggtttggggttagtaacccttttctttttggcttagttctaggggaactattaggagtaggaggagagtttgagacaagataggcctggactgctgtgtaggaagaccacagctgcccagactcctgaatgtcatcatgactatagtcatgcagtttgcattttattataaaaaagaataaaatataaaatctatttgtaagtcactcacttttgccacaggtttgattatattttgtgtcaaatcgtgcctggtatatagaatgacttaaaatgcaattcttaagccaggcatagtagttcacacctgtaatcccagcactttggcaggctgaggtgggaggatcccttgagcccaggagttaaagaccagcctgagcaacatagtgagaccccatctctacaaaaaaattaaaaaattagccatgtgtggtggcacacacccgtggtcccatctactctggaggctgaaacaggatcacttgagcccaggagtttgaggctgcagtgagccatgatcatgccactgccctccatcctggtgacagagtgagaccacaattcttaaaaaaaaaaaaaaaaggtaactctctagtgttagaatgacaaacatgagaggttactccacgcatctctgtgtgctcctagctgcagaacccttctgggactcctcaactgttctctggccctgcagtctccagatgtactccccaaggctcgcccttacccctcagaagcagagccgagtgggtgctgatgagctcagtggggatgctccttcttatggtggaggctgtggggctcttaaaaggagctatggtcttggagtggaaaagcagaacttccctgtgggcttcctccaggggaccacctcagctgtttctcttggtctgaaagaggagacaaagtcactaaggactgtgctgccccgccagctgcccttcccaccagctcaaacctcctctcccttctgaggagagccacatggcagcagagtgcccactcagagcttgaggggctcatcctggtggccttgcactggccagcgggtgccgcacagtgcgcctcctgtcgccagttcctgtcccacattaacactcccttgggagaattctgtattctcagaggcattaatgcttcccctttcacctacagatcctctgggcagagctagctcattccttgcgctctaagctaataaaatctgccccacaccccgcagagaaggaaaataaacaacccgaaaaagtggaaccatgtttctgatcagaccctgtgagacgtcaggttgtctgtgtgattatgtggtcggggcattgttttgttttttaattattaaaagctcattgaaaaacaatttaagtaacatggaagtacatagattaaaaagtagcagtccatccaaaagagcatacatgaagattcactgtgccctttatgttttttatctgtgtctccagttccctaaatcccataagcttcttgaggttggcaccactttgaatcttgagcctcctgtgtgatagacttgctgtcttttctgatattccccaagccttagttttccttatttgtaaaatagggcatattttaatacctacttctgaagattgtcgcaataatgacatgggatcatgtatataaagtgtttaacatagtgctgcagtctttgtgcccagatacacattttattactaatgcgtaacagaagtcttctgctcatttctaggtgggctttctgtctaatgagtaaatttcacttttctctttcctttcttcaccaggaagatgtcatcaacactcagtgtggctatgatgccaggcaaaaaccagtaagtggaatctcatgttgttgcttagcacgaagggtgttggaggagctttggcctgtgcctggtgctctatctgtgacaatgtgctctcctcttctcttgtgaaggaagttgaccagcagattgtaatctacacgaaaggctgtgtgccccagtttgagaagtggttgcaggacaatttaaccatcgttgctggtattttcataggcattgcattgctgcaggtaagataagggtcctttatggatatcacagggaaataatgccctgggagagcccttgccaggatcggagctttgcttaaaaaccttgattgtcatagtttttaagacacattggagggctgaggaacagacctaaacgatttggtttgtgttttattttattcatttatttatttattttatttattaatttttttttgagatggagtcttgctctgtcgcccaggctagagtgcagtggcatgatcttggctcactgaaagctccgcctcttgggttcatgccattctcctgcctcagcctcccgagtagctgggactacaggtgcccgccactacgcccggctaatttttttgtatttttaatagagacggggtttcaccgtgttagctaggatggtctcgatctcctgacctcgtgatccgcccatctcggcctcccaaagtgctgggattacaggagtgatccaccgtgcctggcctgatttgtgttttattaaagctctgagtttagatgctactatcatgaaatactttaggaaaccttgtctttttctaagatggagacattaattagatagtggttgcctactggcattccatcgtttacatgggctcaaaaatactgcattgtggcaactgagtcaaacatgcatagttagaagtagatctcagtggtgacgttaaggttttgggaagtttcacagagatgtcatacccctttctctccctaaactaccttgccaaagtgctagtgaaggaagggagcacccacttttcctcctggccagtcttaagagctggactcttcatgttgttggtgtgatactttccaaagagcacatagttgaaacaaattaaagaagacctaagtaaatataaagatatcctgtgttcacaattgcaaaacttcatattattaaggtaacaacactcatcaagttgatctacagattcagtgtaatccctatcaaaattgtaaccacctttttagcaaaaatggacaagctgatcctaaaattcatatggaaaagcaagggacccataatagccaaaacaaatttgcaaaagtaaaacaaagttggagaattcacactacccagttcaaaacttagtacaaagctatatagtaatcaacatagtgtgtacttgagtaagattagccatatagagaagtggaataaaattgaaaaatcaagaaataaaaccaggccaggtgtggtagctcatggatgtaatcccagcactttgagagaccaaggcaggaggatggcttgagcccaggagttcaagaccagcctgagcaacatagcaagtccttgtctctacaaaaagtaaaaataaaaaaattagccaaatgtaatggcacatgcctgtggtcctagctactcagcaggctgaagtgggaggattgcttgagcccagaaggttgaagctgcagtgagtcgtgattatgcaactgcactctaacctgggtgacagagcaagaccttgtctcaaaaaaataagaaaaaaatatatatgattaaaaagaagaaataaggccgggtgcagtggctcatgcctgtaattccagaactttgggaggctgagtcaggtggatcacttgagctcaggagtttcaaaacagcctgggcaacatgacaaaaccctgtctctacaaaatatacaaaagttagctgggcatgatggcgcatgcctgtggtcccagctacttggggggctgaggagggaggatcacttgagcctgggaggttgcagtgagctgagatcatgccattgcactccagcctgggtgacagagcaagatcctatctcaaaaaagaagatgaaataagctcgtacgtatatggtcagttgatttttgacaagggaaccaaaaccattcaatagggaaagagcagtcatttcaacaaatggtactgggaaaactagatatgcaaaataatgaatttagactaactcacaccatatgtaaaaattaactcaaaataaagcaaagacctaaatataagagctaatgctatagaactccagaagaaaacataggcataaatatttgtgactttggattaagcagtgtcttcttagatatgacatcaaaagcataagcaatgaaacaaatgtaaataaattggacttcaaaatttaaaactgtgctgaaaatgataccatcaagacagtgaaaagataactcctagtatctagaaaaataaagaactttaaaaagtcaacaataaaaagacaaacaacttaaaaatgggcagccaggcatggtgacttgtccctgtaatcccagctgcttgggaagcagaggcaggagcctgcactgagctatgatcacgccactgtactccagcctgggcaacagagcaaaacccagtcccttaaattattaaaaaacaaacaaacaaacaaaaatacgggcagaggatctgaacagacatttctctaaagattaaaattgctaataaaggccgaggcgggtggatcatgaggtcaggagatcgagaccatcctggctaacaaggtgaaaccccgtctctactaaaaatacaaaaaattagccgggcgcggtggcgggcgcctgtagtcccagctactcgggaggctgaggcaggagaatggcgtgaacccgggaagcggagcttgcagtgagccgagattgcgccactgcagtccgcagtccggcctgggcgacagagcgagactccgtctcaaaaaaaaaaaaaaaaaatggctaataagcacatgaaaagatgccaacgtcagtagtcattaaggaaatgcaattcaaagccacatatttcatactcgttaaagcggttagaataaaaaagacagacaataacaagtatcggcaaggatgtggagaaaacgaaaccctcatatgttgctaatggaaatgaaaatgttgcaacctctttgggaaacaatttagcagtttctcaaaagttaaatatagtgctaccatatgagtcagcaattctactcctagaggagtacccaaaagaattgagaaagtgtttacccaaaaacttgtatgctcatgttcatagcagaattattcataattgccaaaatgtgagagcaatgcaaatacacatcaactgaggagtagataaacaaaatggggcatatccatgccatggaatatcattcaaccatcaaaaggaataaattaatagcacatgtatatgaaccttgaaaatattttgctacatgaaaaagacagccacaaaagccccatattatatgattcccttgatatgaaatgtccagaagaggcaaatccacagaggcaggaagtagattagtggttgctaggtctgtagggatggtgggatgggaatgactgctcacaggtacagggtttctttttggggtaatgaaatgttctgtgattagatagtggtgatagttgcatagctttgtgaatatactaaaagcccctgaattatacacatttcaaggatgctttttaccacatatgaattacatcttaaatttcaaaaatcaatgatttaaaaaaatgggacacagtggccagggaaacaagttacaagtgtcactgtttcactcacattttcttcctttctcagatatttgggatatgcctggcccagaatttggttagcgatatcgaagctgtcagggcgagctggtagaccccctgcaaccgctgctgcaagacactggacagacccagctttcgggaccctcccgcgtgccgaactgatcttcgagctgcatggacctaatcacagatgcagcctgcagtctcgcctaatggagctgccattaggggagtgtaaaactgggaaatgctgctcactgacagaattaaaaaaaaaaataaccagtatgaaagtcgttgcgccgtgaatctctactgtagccatgaatttatggacagttagatgcttaccaaaaaagaaaaaaagggagggtaggggacccagatgtacttgaatgtgcagaaaatacattcttgtcctcatcttccgtaattggagggctgggagaggcagctttgctcttcaccacaccttggacggaccaccttctttctgttccatggcctgaaggagtgcatctcctcaaagactcagcccctcacctgggagggcagtggtttgtgggcatccctccatgtacattttaggaaacacttgcaactctcatctgaagaagaaaacaactcatctttgggttcagattttgtgatggtattcagcaagtcacttgggcgagcacacttggtctatcctggaaagtctccttataagagaagttgtgtatttcatgtgcaccgagcaagggcattggaagacgtcatgaggctgtattttagcaggactgatcgtttttctaagtagacctgagctttgtttatcagtgaaattcaaggagaaaatgaggttaatgaagaggtatcagttaaatatccccttcttctcaccctgccaaaattagcagttggatttttggaaactctggaatattctgggtcattttgttttgtatgtttgttgtttttcgtcttccaaaggtgaaagctatgatacagttccacttaaattttagtgttttcttactcagctcaagcattaatttttgattaagtcttaatctgcatgacctgtgaatctgaatccatcatctccctttcctgccagcttttctacaaacattgaaatatgttatttggtcagcacttatttcctaggttcacagccttgggaggttgtggcatgtcctcccagtctggctgggaagagaccagctgtaccatccaaatgcttccctggtcttgatgatctcttccagagtcgatctgagtggccttttctgcaccctccccttctttctctttgaatggaattaaacccaatttggaaacaacattgacccagtcaaaagcttctaatggtttctttttcttcctccagttttagtttgcttttattaaaaaaagaaaatagtgcatggccatagctccttcagttctcttattgcagactaaccatcaggatggtatcaaagcacaaatactttggaggggaatgcgttgaactggggcaagtactctgtaacacaaagtgggaaaccacttcctggtgctgccgctcctgcccccactttaggtgggagggacgagttttgccctctagattttaatccagctggtgtccaccggatgttgccctcctggggagcagatatcagtctgtggaactctgggaaaaccacaggcacatttttcggtgcggacagatttgccagcacataactgggcagccagctagaatactttgtggaaattaagcgaggttttccatttcagccccatggtgcatggtggtggccgatgaatgtgtcagtctgctcagagaaaggacaaaaaggaaattattttcaaaactgtgttcactgtttgggtgtgtgtatggctctgcatgtgtgtgtttttgtctctgtataggtagaggtattcacatcttactccgactgtaaggttgtcttacttcatctctgcccccaccacagttgccattttgtaatgtccttccaacatggagaagacacgagctctctccagttggcatcatttgtcttttttgttgattgcctcattctccagtgaactccatctggccaattgattcagaatcaggcaagatccctgccctttggcacatccactgaaaggccaaacagcaagtccgagtgagttttaaatattaattaatcaccctttattttttacacttgagagtgattgtaataaaggctgtcattaataaacttggttctaccttacatggtgtgtctttcttcattacttctttcttgaaattgtgaaattttcgaatccagtggttctcaaactttagcaggtgtcagaatcactgggaggacttgttaaaacacatgaatgcatttgctccgtgcccataatttctaacttagtaggtctggggtggggctggagaatttgtattctgataagatcgtaggtgatgctgtttgcggcttgtttggggactacactttgagaagcattgttctgatccagttttctaggaggggaaacagaaaggtaagattttgtagttgggaagggaaaggttcctttgtacttaaaaatgctgactgacaagacacagaggccagagcctcgtatgtaggaaatccctgcccatgaggtcatctgctggttacaatcacttggggaccatgtgaaatacagattccccagaccttacccctagcagttctggagtgggagacagggtaatctatgttttaaaagctcccttgaaaatttaatgcctggtgggatttatgacttatgggcttagataaatgttgataatattcacaaccttttatataagaaaataatttctcacagtcccttggagctggaatcttaaaaacccattagagaaacgtcagcttaaatgtctttcattgtgaattatcactgcagaagaagacttccgtcgttagaactgattaaatacttttttcaaagatcaaatgaaaacaaattttaaggttcatatagcacacttagatcctgacaacatagtgtcagacttgttcaagaaacgttttgcctcatatctcagatatttgaaacaacgttattttgattttaaggaaatttatcagtgatgattggagatggccaatccctgcttcttgagttttcttattgtctacattggccctctttgcttgttgcaaactataagccaacaaaggaaaaaaaaatgacagctcagaagtaaaaggatgctttgtctataaaactcaaaaacttggaggaagtttcttcaatgtgtagaaggtagactttaggggaagcttattaaatttctctttatttctgttgttgggctggttaccactaacatcattgctcctataatttaaaaatatacagtttttaaatgtgaactcaggaatttaaaaatattttgcatcatgaagtacttaaagaagtgcatttcctttgttcttcctcttccttctcccagggagtaataaacctggacttttctttcagccttcttcctgccacaggtcccagttgtcctttcctcaaggggatcctcaaagtgtctcttggaggtttcttgtgcaaagtgatcattcatttccccgtgtttgtgtgggcaggaatggagtgattttgcagtttcgtctgtttccggctggcttggacaggcgccctgggaagcctgtgggctgaacaatgaggagctggagcccagtgacctggcaggccaccccaactccctttgtcatttattccacgaagccctccttctctagggaaatcctgtttagacctccaatgaagaactgggaagccctctataaacgctggccagcagggtttcatggccagagctctctccagtgaggccatggggctgcttctaggtgctgcccaattccagagtgagaagcctagtctttgaggaggaaaatgcagcatttgcctgaaaaatacattaacattggctttatcatgatgacacaataaaatccatagaaaatctacacatgataacagacaaggcagtcagatgggggtgggggggtgggtgggggcagggagcacggcggagaagccaaactctgaacttggagcaaagccatccttacactcacccgagcctttttgtttggaggggtttgccacaaagagtttataaaattacagttttaggccagacaaggtggctggctcacacctgtaatcccagcactttgggaggccaaaacaggatgattgcttgaggacaggaattcaagattagcctgggcaacatagcaagaccccgtgtcttaaaaaaatgaaaaaaaaaattttttttaattagctggacctggcgtcatgcacctgtactcccagcgactctggaggctggggcaggaggacagcttgagcccaggagtgaagtatgatcgcaccactgcactccatcctggttggcagaggaagaccctgtctctaacttaataaaattacagtttttaggacttcttgagggattaagtacagcttgctttggcgttttcatgctgagtggttctcttgtaaacttgccgctggtgagaggaggctgatttagtcccttcctgttatccattagccggggctaaacctctggggacccgcactggccattgtgatttatttttccacttctaggaattcccaagtaaagtaaatctaagggaagagcaggcgagttcacgggctttcactgtaaatatgccccgaaaggaaagcagtagcaggcttcccacgctcttgccccataccgaacgcacgcttgcattctccgtgggggaaagctacttttcagatacggagcggaccttcaggtgctgtgtcagctcttgcatttgcagagcaactcgtttgaacgggaacgttttaatggcctgccctctagtgtcgactgcgtaaaaccactccggactggagttggaatagttcagggataaaaacactgtatgttcagaggcgcttgtgctttggagaaacttgaaggtacacagcttatgttgcctgcttagggcgggtaggtgttttatttcctttacacgctcctgaaaatggcaaggcttgttttggaaagatgagagaacaggacgttttgctcccatcaccatctatcctgcttgggatcttgctgctgggagtttatcgcggcaggatggagctgggccttgtcctcccaccagttttcaaatgtggtttctagacgacgatggtgactgcctaaagctgctcatcttccaggcagaggcactgtcctaaaggtgtcctcaatggggctgggaggacaatgctctgcaccctccctcccagggaacaccaccctccattggaacttcagaggtttttgtgacaaaaggccccaggaccctggtttgcacttcaattcctcttcaaaatgagcaactctccagaaacaaggaatagaacatctttatatttcttctaaaaccaccagtgtgttacttctacacactgtacttagaaatacacacatatatgcatacataccaccagtgtgaatcacctggattttgctttggtcttgtcagaagcgtttgaaccagaacaactccattgtgaataggacctgggtaaaatgaggctgaaacctactgggctatgttcccagatggctaggcattctaagtcacaggataagatagaaggttggcacaagacacaggtcatagacaccttgctgataaaacaggttgcagtaaagaagcccacaaaaaccaagatggcgatgagagtgacctctggtcgtcctcactgttacactcccaccaacgccatgacagtttacaaatgccatggcaatgtcaggaagttaccctacatggtctagaaaggcgagacatgactaatccacccctcgtttagcacatcatcaaaaaatgaccataaaaatgggcaattggcaaccctgagaactcctctgtctatggagtagccattcttttattccttttttttgttaataaatttgctttcactttatagactcaccctgaggatggcttgagcccaggagtttgagaccagcctgggcaacatagtgagaccgtctccctacaaaaaatttttctaattggtggacatggtgacacaagcctataattccagctatgttggaggctgaggtgggaggattgcttgagcctaggagatggaggctgcagtgagccatgattgcactgctgcattccagcctgagcaacagagcaagatcctgactcaaacaaaaaaaatacgtaaaaaagaaaacaatcagctgggtgtggtggctcacacctgtaatcccagcactttgggaggcctaggcaggcagatcatgaggtcaggagatcaagaccatcctggtaacacagtgaaaccccgtctctactaaaaatacaaaaaattagccgggtgtggtggcgggcacctgtagtcccagctactctggaggctgaggcaggagaatggtgtgaacccaggagggagagcttgcagtgagccaagatcacgccactgcactctagcctgggagacagactgagactccaactcaaaaaaacaaaaaaagaaaacaatcaacattttgtgggacattttaaacatagagaatgatttattatgattaagtcatagtctgcattctgtatttatttgaagtaaattatcttaaattcaagttgttagagtgactcaagttttataaagaaaatagccatatttccacacttgtgctgtctttagtcttgttactttgcaactgaatcaggcccactagttctctggctacctgttgcaggctgggtactaggggtgaatatatcatctatcccttgaaataacaggtcacatttattgactagaagtttactgtgttccaggcaggtgttataagcacgctgcataagttcctgaggaaatgtaaactgatggaggggaaaaccccacatgtggaaaatttccaattcatcaagagctaaactgacatctctcaaaatggtgcctggttgagatacaggaagaacacaggggttaatggaagatggtctcaagaaggaagagaggtttggtctgggcccctggggaatgtggaaggggccataataaagcctatgctgctggggaggttgggaagggcccagaacctccagacgaaagagtggggaaaagctcagataagcagcaaggtccagtatagagagtcttggaattgtggcccagtacttggcatataccaggcacttgaaagtttgctgaatgacagcagtggtaattgaggtgatcagtaactacctcatccacaatgaaggtgtgttagtctgttctcacgctgctaataaagacatacccaagactgggtaatttataaaggaaagagttttaatggactcacagcttcacatggctaaggagaactcacaatcatggcagaaggtgaatgaggagcaaagtcacatcttacatagcagtaggcaaaagaacttgtgcgggggatctcccatttataaaaccatcagatctcatgagacttattcattaccaggagaacagtatgagagagaccacccccgtgattcaattatctctacctggccctgcccttgacatatggggattattacaattcatggtgagatttggacggggacacagccgaaccatatcagaaggtgatgtgaaaagtagaatttttttgtaaaattggacaacataggtacaagctctgtgctgttagggttgaaacctaatccctaccgtggtagtattaacaggtggggcctttaggaggtgattagatcatgattgcagagccctcattaacagagttagtgcccttataaaagaggcttgtgggcgctcgtttgccttcttccaccatgtgaggacacagcgagaaggaagcagtctgcaacccagaaaagagctgtcactggaatccagttatgctgacaccctgatcttagacttcctagcctccagaactgtgagcatatttctactgtttataaattacccagttgacggcattttgttatagtagcctgaacaaactatattaccagctgttttctccatctggttctgctgttcctgtgaaattctaggacccgggaactggcagggaggtcactacatgttgcagtgggaggatattttttaaagtaggtagagattggggtaacaatcttgttcttttttagattcaagccaggcccctgcattagagcagcagtttctcagccctagatgcacattagaatcacctgagagcattagaaaagacaaaaaatagccaggcgtggtggctcacacctacagtcccagcactttaggaggccaaggtgggtggatcacttgaggtcaggagttggagaccagcctggccaacatggtgaaaccccgtctctattaaaaacacaaacaaaaaattagcggggcatggtggcacaggcctctagtccgagctactagagaggctgaggcaggagaatcgcttgaacctgggagacagtgtttgcagtgagctgagattgtgccactgcactccagcctgggtgacagagcgagaccccgtttccaaaaaaaaaaaagacaaaaaacatgtgctctcttccacactgtttctaaaattcccaggtcattctaacgtacccccatggtttctcaaattctgttgtgcacacaaatcatctgggtcttaatgcaggtcctgattctgtaggtcttgattgaggctgaagaatccatggttctagcgtgctcccaggtgatactgatgctgtggtctgcagaccgcactttaagaggcaaggacaatctacaagtaggcctcatttagagctgtgcaaaactaataccttgtattaatattttttagtgatacatttcctaaagctactaagctgaaattttcaggtctgggaaggaaaatacaggtgactgtaaataggcattaagtatatgtttggtaaatgcgttttattctaattacaaaagaaaaatctcagccaggcacagtggctcacacctgtaatcccagtactttgggaggctgaggtgacaggatcacttgagcccaggagttggataccagctgtattagttagggttccctagagggacagaactaataggatatagatatatatggggagtctattaagtattaactcatatgatcacaaggtcccacaataggccatctgtaggctgaggagcaaggagagccagtcagagttccaaaactgaagaacttggagtctgatgttaaagggcaggaagcatccagcatgggagaaagatgtaggttggaaggttagggcaatctctcttttcacatttttctgcctgcttatattgtagccatgctggcagctgatcagatgctgcctacccagattgagggtgggtctgccttcccagtccactcactcaaatgttaatctactttggcaacaccctcacagacatacccaggatcaatactttgtatccttcaatccaatcaagttgacacacagtattaaccatcacactagcctaatcgacaaagcaagactctgtctcaaaaaaataaaaataaagaaaaatctcaatgcagaaaaaaaactagtattttcaccatctagagatatatacttgtaaaatattagtgtgtctttccattgctttttaaatttgttttaaatcgtataatcctgttcatactgttctgtggtctgcttttttaaaaattgggatttttcagtgtcagtgaatgctttatacaacatttttttggtggaatcttattctattttatagatcaagggtttccctaagatgccaagggttcacaaggtcaaaactatttcttaatactaagacattatttcccattttgttcttaattttgggtttgctgatgtggtgatgtcatcactctgacagctacatgatgtgatgtcatcactctgacaactaatggaatgtgtgcttgtgtatttctgtgtcttaaacttttctcccttttcatttctaatatgataaatattcacatagataacccacataaaccaaagctcttcagggggctcaaacattcttaaaagtgtaatggagtcttgagaccacaaagtttgagagctgctggtatagataaaccactattttactagccaattcatcactgaaatggtttggctctgtgtccctacccaaatctcatctcgaattgtaatccccacatgttaggggagggatctaacctaacccctaatcacctaacaccatgattggatcatgggggtggtttccccatgctgttctcgtgatagtgagtgagttctcacaagatctgatggcttaaaactgtggcacttctcccctcacttgctctctctcctgctgccttgtgaagaagttgttgcttctcgtttgtcttctgccaccattgtaagtttcctgaggcttccccagccatgtggaactgtgagtcaattaaacctcttttctttatagattacccagtctcaggtagttctttatagcagtgtgagaatggactaatacaattactattagaaatttgggctgtcttgaattaaatacagttgcaatgacctttttttaaaaaatttaagttctggagtacatgtgcggaacgtgcaggtttgttacataggtatacacatgccatggtggtttgctgcacccatcaacctgtcatttacattaggtattactcctaatgctacccctccctaacccccgacaggtcctggtgtgtgatgttccccttactgtgaccctgtgttctcattgttcaactcacacttatgagtgagaacatgcagtgtttggttttctgttcttgtgttagtttgctgagaatgatggtttccagcttcatccatgtccctgcaaaggacatgaactcatccttttttatggctgcatagtattccatggtatatatgtgccacatttgcttaatccattctatcattgatgggcatttgggttggttccaagactttgctgttgtgtacagtgcctcaaacatacatgtgcatgtatctttatagtagaatgatttataatcctctgggtatatacctgataatgggattgctgggtcaaatggtatttctagttctagatacttgaggaattgccacactgtcttccccagtggttgaactaatttacaatcccaccaacagtgtaaaagcattcctatttctccacatcctctctagcatctgttgtttcctgacttttaatgatagtcattctaactagcgtgagatggtatctcattgtggttttgatttgcatttctctaatgactagtgaggatgagctttttttcctatgtttcttggccacataaatgtcttcatttgagaagtgtctgttcatatcctttgcccactttttgattgggttgtttttttcttgtaaatttaaattctttgtagattctggatattagccctttgtcagatggatagaatgcaaaaattttatcccattctgtaggttgcctgttcactctgatgctagtttcttttgctgtgcagaagctctttagtttaattagatcccatttgtcaattttggctttcattgccattgcttttgatgttttagtcatgaagtctttgcccatggctatgtcctgaatggtattgcctaggttttcttctagggtttttatggttttaggtcttacgtttaagtctttagtccatcttgagttaatttttgtataaggtgtaaggaagggatccagtctcagctttctgcatatggctagccagttttcccaacaccatttattaaataggaaatccttgcaatgacctttcttatgcatttcctatactttgcacataactctagttatttccttaagatagattgttaataatggaataactggatcaaaggattaaaaacatttaatttgtgatacctagagttaagccttatttaaagctgtgcaaaattaatactttatcattgatacttaggttttaaattgaaaattgttaattttgagtcaagatttgcgcctagattaaaagaggaaaaaatgtcattaatgtcttttatctgttccagattaccatttctgttaacttaatacgatattaaaatgccagttaaagaagccaaaagtatagtgatggaggtatttaatcgccactgagacatttagagcaaggaagtacctgtaccccaaacctcccccaaaataacttgattagagggaatgaaataagaaaatgactctcagctgggcgcggtggctcaggcctgcaatcccagcactttgggaggccaaggcaggtggatcatgaggtcaggagttcaagaccagcctggccaacatggtgaatccctgtctgtactaaagatacaaaaaattagccaggcatggtggcgtgtacctgtagtcccagctactcaggaggctgaggcaggagaatcgcttgaacctgggaggcagaggctgcagtgagctgagatcacgccattgcactccagcctgggcaacagagcaagactccatctcaaaaaaaagaaaatgactctaaagggtatgtcatggctttttagaaaagatcatctcaagactctggctgcaggttctaatttaatttctactgatattttattctgcttttttgaacaattgctagcactgactctcaacacaggggtctcttgagcctcatgtatagcaaacattctactaagttctagggtgggaaagggaggtattaaataagaagagacagagaccactcatttatctgcagtgcagaggatgctttgacaggtgttgattccattattgactctgtcatgaaaggaattaaagtcaacggactgtacatttgaatgtatgccttatttggtatctatgaaggctctaggaggttgttcactcactaagcctgaagaatattgcacagactttacacagggaaaaagctcctttggtagctttaagaaaaaaggaaacccatttgtggtatatgaggtgagtatccctaatccaaaactccaaatgctccaaaatccaaacctttttgagtgctgataatgatgctcaaaggaaatgctcattagagatgtcagattttggattttcagattatgaatgctcaacgaaatggcaagaataatgcaaatgtttttgatccttcaataatgcagaaggtaaagatgccaacctcctttttagtcaaaatgcctgtataactttagacttccccaaaacttaattactgttgaccagaagccttacctataacagtcaattaacacacatttcatgtgatatatatatttatatatttataacatactacatcttacaagggagggcaccaaggatgggaaagataaagtaacttgtctaaggccatgaagtaagcagcagccaagctctaagtgtcactcaggtctaactggcacacagattagtctgagactttcttaggaccagaactgttttggattgttttgaattttggattacagctgacccttgaacaacatgggtttgaagtgaatgagtccacgtgtacatggattttctttcttctctgccatccctgaaacagcaagatcaattcttcctctttcttcccttcctcagcttcctctacatgaatatgaggaggatgaagactgaggaggggcagaaagaggaagaattgatcttgctgtttcagggatggcagagaagaaagaaaatccatgtacccatggactcattcacttcaaacccatgttgttcaagggtcagctgtattccaaaattcaaaacaatccaaaacagttcgggtcgtaagaaagtctcagactagtctgtgtgccagttagacctgagtgacacttagagcttatccattgcttacttcatggccttagacaacttatctttcccatccttgatgccttcccttataagatgtagtgtgttataagctagagatagtaatatctatatcataggggtgttgctaagattaaaagggttgaaatgcttttctctaaatctcatttattcctcagatctcacctgaaatgactttgagggaggtcctctcagaacttggcccctctccaccccactaagatgtgttcctgcaactttctctttagaagaactcatcacacctaaactaactcgaatggcatcttttctgttaaaatgcaagctccatggaattggcctgtattgttaacctctatgtctctagcacccagatgtttggtagcgctatggactgaatgtttgtgtcctccctaaaatcatatgttgaagccccagtccctaatgtgatggtatttggaggtggaacctttgggatgtaattaggattagaggaagtaatgagggtagagccctcatgatgggatctctctctctctctcctctctctctctcctctctctcttctctctctcctcttgatgtacccaccaaggaggccattgaggtcataaccaggaagaggggcctcatgaaaaacccaacaatgctggctccctaatcttggacttcccagcctccagaaccatgagaaatgtttctttaacccacccagtctatggtaatttgttatagcagcctgaactaagacagctaggctgtttctttgagcatgttacaagatattgagcataactttgttttagatagcgagcatatgctcacctaaaagacagacttctattttgtaaaatataactatttctggccaaacatggtggctcacgcctgcaatcccagcagtttgggaggccgaggcaggcggatcacgaggtaggagatcgagaccatcctggccaacatggtgaaaccctatctctgtaaaacatacaaaaattagctgggcgtggtggcacatgcctgtagtcccagctactcggggggctgaggcaggagaattgcttgagcccgggaggcggaggttgtagtgagccaagattgcgccactgcactccagcctgttgacagagtgagactctggctcaaaaaaaaaaaaaaaaaaaagtaactatttctacctgcctgtaagatgttttagatgtgtgtgcatgtgtgtgtgtgtgtttttttttcttttttttttgttgttgttgttttgtttgtttgtttttttgagatggaatcttgccctgtcacccaggctggagtgcagtggcatgatttcagctcactgcaacctctgcctcccaggttcaagcaattctcatgcctcagcctcctgagtagctgggattacaagcgtgtgccaccacacccagctaacttttgtatttttagtagagaaggggtttcaccatgttggccaggctggtctcaaactcctgatcacctcggcctcccaaagtgctgggattacaggggtgagccactgtgcctggccgccaagatgtattttttaaagctgaactgagcctggcatctgtcagtcaacactgcatgagctcaggcctacatcctgagtacagcaaatgtattaaccctctgatctggtttggatttgtgtccccacccaaacctcatgtcgaattggaggagggacgtggcaggggctgattggatcatgggggcagatttcccccttgctgttcccgtgatagttctcatgatggtttaaaagtgtgtggcacttgccccttacctctctttctctctcctgccaccatgtgaagaaggtgctcacatccccttcaccttctgtcatgattgtaagtttccggaggcctcccagtcattcttcctgtgcagcctgtagaactgcaagtcagttaaacctcatttcttcataaattacccagtctcaggtagttatttaaagcagtgtgaagacagactaatacaccctcctagggcatctccacattcctccactccctaattatgtttaagcatcaaacagaaaaaacaaatgtgtgtagagattcaacctttgaataaactattttgctaataaattctgagtttctcccaggcttgaaggattccttaaatgaccatattttggaatagctatgttactagaagggggatcaaggttaagctgagaaaactcttatgatattgccagtagagattcttatgaatctcattagtttaggttcgaatggtagtaagaatatgtgtgctgaactacatggctacccatcaggggccctgcaagggaaagggagaacaaacttttctttttaaaacttttattttaggttttggggtacatgtgaaggtttcttatacaggtaaacttgtgtcatgggtgtttgttgtatagattattttgtcacccaggtattaaacatagtatgcaatagttatttttctgcttctttccctcctcccaccctctactctcaagtagaccccaatgtctattgttccattctgtattcatgagttctcatcatttacctcccacttataagtaagaacatgtggtatttggtacatacacaccacgaagtgtgtatgtatttttcagagaacaaccttttgttcattttcaaaaatttcagtaggtttttaaggaagaggtggtgtttggttacatgaataagttatttagtggtgatttctgagattttggtgcacccatcacccgagcagtgtacactgtacccaatgtgtagtcttatctctcaccctgtcccaccttttccctccgagtccccaaagtccattgtattattcttatgcctttgcatcctcatagctcagcttccacttatgaatgagaatatacaatgtttggttttccattcctgagttacttcacttagaataatggtctccaattttatccagtttgctgcaaatgccaccatttcattcctttttatggctgagtagtacttcatggtgtgtatgtatacatacgtgtgtatatgtgtgtgtgtgtatacaccacattatctactaattgatgcacatttgagctggttccatatttttgcaattgtgaattgtgctgctataaacatgcatatgcaagtatctttttcatataatgacttcttttcttctgggtagatggctagatcaaagggtagatctacttttagttctttaaggaatctccatactgttttccatagtggcactagtttacattcccaccaacagtgtaaaagtgttcccttttcatcatatccatgccgacatctattattttttgattatggccattcttgcaggactaacatggtatcgcattgtggttttgatttgcatttccctgatcataggtgatgagcattttttcatatgcttgttgtctatttatatatcatcttttgagaattgtctattcatgtccttagctcacttttttatcgtttttttttttcttgctgatttgtttgagttccctgtagattctggatattagtcctttgtcagatatataaattataaagattttcttccactctgtaggtcatctgtttactaattatttcttttactgtgcagaagctttttagtttaatgaagtcccatctatttgtctctgtttttgttgcatttgcttttgggttcttgaagtctttgatacataaggactcaaataaacttaaggtaaagtggcagaaaaagatgtcccatgcaaatagacaccaaaaatgagaaggaatacctatacttatatcacacgaaacaaactttaaagcaacagcagttaaaaaagacaaagagggacattatataatgataaaaggactagtcccacaggaaaatatcacaatcctagatatatattcacctaaaaccggagctcccagatttagaaaacaatttctattagacctaagaaatgagatagacagcagcacaataatattggggagcttcaataccccactgacagcactggacaggtcatcaaggcagaaagtcaacaaagaaacaatggacttaaactgtaccctagaagaaacgaacttaacagatatttacagaacattctacccaacagctgcagaatatacattctattcatcagcacatggaacattctctaagatagaccatatgacaggccactaaacaagtctcaacaaatttaagaaaatcagaattataacaagtactctctcagaccacagtagaataaaattggaaatcaacgccaaaaggaaccctcaaagccatgcaaatacatgggacttaaataacctgctcctgaatgaccattgggtcaacaatgaaatcaagatagaaattaaaaaattctttgaactcggctgggtgcagtggctcacgcctgtaatcccagcactttgggagactgaggtgggcggatcatgaggtcaggagatcaagaccatcctggctaacatggtgaaaccccgtctgtaccaaaaatacaaaatattagctgggtgtggtggtgggtgcctgtagtcccagctactggggaggctgaggcaggagaatggtgtgaacctgggaggcagagcttgcagtgagccaagttcatgccactgcactccagcctgggtgacagagcgagactccgtctcaaaaaaaaaaaaaaaattctttgaactcaatgataacagtgacacaacctatcaaaatctctgggatacagcaaaggtggtgggtgataagaggaaagttcatagcattaaatgcctatgtcaaaaaatctgaaagaacacaaatagaaaatctaaggtcacatgtcaaggagctacagaaacaagaacaaaccaaaccccaactcagcagaagaaaggaaataacaaagagcggaactaaatgaaattgaaacaaacaaacaaaaaaatacaaaaggtaaatgaaacaaaaagctgattctttgaaaagatgaataaagttgatagcccattagtgaaattaaccatgaagagagaagatccaaataagctcaattagaaatgaaatgggagatgttataatccataccacagaaatacaaaagataattcaagactactaagaacacctttatgcacataaactagaaaacctaaaggagatgggtaaattcctggaaatatacaactcacctagattaaaccaggaagaaataaaaactctgaacagaccaatagcaagcagcgataaatggtaataaaaagttaccaagaaaaaaaaaaaagtccaggaccatacaggttcatagctgaattctattagacattcaaagatttggtaccaatactattgacactattccaaaacacagagaaagagggaatcctccctaggtcattctgtgaagccagtatcaccccaataccaaaaccaggaaaggacataacaaaaaaggaaactacagaccaatatccctgataaacgtagatgtaaaaatcctcaagaaaatactagctaaccaaattcaacagcatatcagaaagataatccaacatgatcaagtggttttcataccagggatgtattctgcatccctgcatacttaacatatgcaagtcaaaaagtgtgatacaccacataaacagaattaaaaacaaaaatcacatgatcatctcaatagatgcagaagaagcatttgacaaaatccagcatcctttatgattaaaaccctcagcaaaattggcatagaagggaaataccttaaggtaataaaagccatcctgacaaacccacagtcaacattatactgaatgggaagaagttgaaagcattccccctgagaactgggacaagacaaggatgcctacttccagtacttctattcaacatagtgctagaaatcctagccagagcaattaggcaagagaaagaaataaagggcatccaaattggtaaagaggaagccacactgttgctgtttgctggtgacatgatcatatggagagaaaagccttttcaagataggaggaagtcatgccagcacatggaagggctatgaggtacacatgggcacttggaaagctaaggagaaaggctatgagctaaccaagcacacgaccatcccctctgccttctctaagagctcaaagtctcagactatcagcaaaagactttggatgtctgagagaacatgcttttcataaggatgatgggggtaggggatggttgtgtccggggctatgccccatatgctgggcatgagggtatcctgatgattaatccagaggatgtgtcaggcaggattccagaaagtttaggggagcagaaaaatctctgaaccatcctgggatataatgtctcctttacagcaacatctgggagctgggtggctcaggatatctgatctctttaagtatggtgctttacttggcaagtgattattagtctctgagtcagaactcagt

SEQ ID NO: 5649 - DNA, 95650 bp, Homo sapiens
  LOC152586 gene - 141721480 - 141777129 of chr4; NCBI Entrez Gene ID: 152586; Build 35; sequence includes 20,000 bases upstream of initiation codon and 20,000 bases downstream of termination codon of the gene
aagggttgttgaattttgtcaaaggccttttctgcatctattgagataatcatgtggtttttgtctttggttctgtttatatgctggattacatttattgatttgcgtatattgaaccagccttgcatcccagggatgaagcccacttgatcatggtggataagctttttgatgtgttgctggattcggtttgccagtattttattgaggatttttgcatcaatgttcatcaaggatattggtctagtatgactactaatcatcaacttgtcacagtgtacagtatttgatccacagaagacccaaattaaatatcaatgcccctttgggagtgtgtgaaaaggggcattgatatttaatttatactgaaaaggaaaactttatatccattttgttaacagtgaaactgttgcttctgtggaagcattaaaaatataaagggcagtggcaaccctgcttggttttatgatgattagtgttgagcttccctgaataatatgcctctgccccaaactattgcagaaattgtgattagggggaatccctcatgcataggttcccagtatgatacttttagtgagaaaacaaggattcgaatatacagaatgccaaggcagatttgttctcacagctaccgataatgggttttatcaataaaaagaaagtttaagctgttcagaagaaagctaatgggctggggtgaagatactgaccagaataagagaaataaacatttaatgaggtagaatgatctttaaaaattttttgaagggcaagtgaagggagaaaatagagaaggaagaaattgacgggatccctacaaagggtttgacagcacattaacaatagcttacagaagggaaacctactctagctcctgcatccagctcacctaagctaccctatcagatctgttccagttatcccagcctggaggagtttaaaggcagcaatgatgaaaaaaataggaaaatacagtgtgtttagcacagggtaatgattttaacttgtctattaaggttgtgggtaaaaggataaataatgagggaaggatgggcacagtggcacatatctataatcccagcactttgggaggctgaggtaggaagatcactagagctcaggagttcatgaccagcctagtgagacctcttctctacaaaaaatagaaaaaattattcaggtgtggtggtgcgcacctgtagccccagctactcaggaggctaaggtgggatcacttgagcctgggaagtcaaggctacagtgatccatgacggcaccactgcactctagcctgggcaacagaatgaaaccctgtctgaaaaaaaaaaaaaagaaaaagaaaaagaaaaacttgagagagaagaaatcctcatatgacccctggcggggggtccaaggttgtataatataagttaatgttgagtggcagatgatagtggaaaccttttttggaattattggatgtaccataatgatggtgcaaaatgtaccataatagcaggggaataaaaagacaatattaaggtatgaaaatggaagtttggagcatatcgaaatattacagtagataacaccagaatcactgtgaagctacagatgaagaaataaaaaacaaaaatcaaattcctgcctttacctgtgttgatggaaagccaaactcagtaaaatattttaagacatttactctgagccacatgtgaggaccatcacctgtgacatacccccagaggtctgagaacatgtacccaaggccactgggttacaacttgattttatacattctagggagacataaggcatcagtcaatacatgtcaggtatatattggcttggtccagaaatgtgggagaatttgaagttctggtggggaggggtttataggtcatgggtagattcaaagattttctgattgataattgcttgaaagagttgagttattatctaaagacctggaatcaacagaaaggagtgtctgggttaagataagggattgtggagaccaaggttcttattatgtagatgaaatctcataggtggccgcccttagaggcaatagatggcaaatgttttttctatttagacatttaaaaggtgctagactctcagctaatctctttaggatcacaaaaacacctggaaagggaaggagattctctacagaatgcaaatttgtccataagaaacagctttgcagggacatctcaaaatattttggggtaaaatactttgatacttccagggcctgctatatctgttgtgtgatgctatactagagtaaggttggaatttggtatcgtactgctacaaagagtctgctttttcagtcttaagatctctgttttaatattaatgctgatcagttgtgcctgaattccaaaggaggagagtataatgagggatgtttgactccccacttcccatcatgagcttaactagtttttcaggtttctttgacatccccttgaccaagaggagggggtccattcagttggttgcaggtgcttagaattttgtttttggtctacacctgaatatgtaatgagaatggatgtgatgaaaggtcttgtccttaccagcttaaagccaagcaaaatgtctttaaaaggtagagaagtctgccctccacttggttttaattagtcaggcaatatagaagccttgagactcgcacagaccctcctttgtagtaaataatcaggcagtgtcagattctggaaggacacaagaaatcttatctttcattaagaaacaatgggagggagagtgctaatccccactaatgctttctattaatcctatgtggcccaggagaaaaagaacaggctttggaaagaacagttaactatcatgttttaaataaggtagtttccatgatttaaacaagtgtctgttgtgctaggcattgcacaagctgtacaagaggtccagcaagataaatttgacttttttttgtgctagattaggctaatgctatccttttgatctcactcagagaagtcaagcacagtttgctgttacatgagaaggaatgtaatatatctttagggtccttccccaaggataaccaactgctccaactcactgctacaatttggtgagattatcatcattatcatcatcaaaatgaagttaattcattatattgacactgtgaggatttcctgctttgaggaaaaaactcaaggagagttgagggctacagtggcaaataagactagtgggatggttaatcaatctagctgagattcagactttagcccagtccataaaatttctaaaaataactttgggccaccagagatattccacaaacagtattatgttccctttaggaccctgccaatagaaagaagacacaatatcttgagggactgtttgacgagctgtgaaaatttgtaatgggcagtggcccaagtatgctactgggaccttaggattctagcacattcacacatgattttagaagtttctgacactggaatacagtacatgcaaaccaccttgtggcagccactgagattttttttaactcaagaagttcctgataatggggctagagagcccacttgctggcatgctactggactccactgaaatcagtccccataacttaagagcatcaaattatattaagacttgaactaactgttatatcacaagtgatataaaaattaggttgtaataaagaggaagctgcacaacacaattttcaaaaggattcatgtcaggagaggtgtctctggggagttataattcatatgtgagcaggtggcatccttgctttagaactaactaattaggagaccccttctgttgctgaatgatctaaacctcatgactctccaccaaatagaacgagtttctcggtttgtccatgagagttcctgtatagcaggaatgccaatataaaagtctgctattatttgcctatgcccagtaaaaactcagtcaaataacacaaggtaagttcaggcaatgggctgagagcaatgttcatgacagtggaggaagaaccacttagttgtttacctcagggcaatgtttggatatttacagagtcagatagtaaccaatagtctagctatgtggtcaggaatttgatttttttcattatactttaagttctaaggtacatgtgcacgacgtgccggtttgttacatatgtatacatgtgccatgtcgctgtgctgcagcctttaactcgtcatttacattaggtatatctcctaatgctatccctccccactcccccaactccatgacaggccccggtgtgtgatgttccccatcctgtgtccaagtgttctcattgttcaattcccacctgtgagtgagaacatgcggtgtttggttttctgaccttgcgatagtttgctcagaatgatggtttccagcttcgtccatgtcatccttttttatggctgcatagtattccatggtgtatatgtgccacattttcttaatccagtctatcattgatggacatttgggttgcttccaagtctttgctattgtgaatagtgctgcaataaacatacgtgtgcatgtgtctttacagcagcatgatttataatcctttgggtatatacccagtaatgggatggctgggtcaaaagtcccaccaacagtgtaaaagcattcctatttctctacatcctctccagcacctgttgtttcctgactttttaatgatcgccattctaactggtgtgagatggtatctcattgtggttttgatttgcatttctctgatggccagtgatgatgagcattttttcatgtgtcttttggctgcataaatgtctccttttgagaaatgtctgttcatatccttcgcccactttttgatggagttgtttgatttttttcttgtaaatttgttgaagttctttatagattctggacattagccctttgtcagatgggtagattgtaaaaattttctcccattctgtaggtggcctgttcactctgatggtagtttcttttactgtgcagaagctctttagtttaattagatcccatttgtcaattttggcttttgttgccattgcttttggtgttttagacatgaagtccttgcccatgcctatgtcctgaatggtattgcctaggttttcttctagggtttttatggttttatgactaatatttaagcctttaatccatcttgaattaatttttgtataaggtgtaaggaagggatccggtttcagctttctacatatggctagccagttttcccagcaccatttattaaatagggaatcctttccccatttcttgtttttgtcaggtttgtcaaagatcagatggttgtggatgcgtggtattatttctgagggctctgttctggtccattgatctatatctgtgtgttggtaccagtaccatgctgttttggttactgtagccttgtagtatagtttgaagtcaggtagcgtgatgcctccagctttgttcttttgccttaggattgacttgacaatgcaggctctttttcggttccatatgaactttaaagtcgttttttccaattctgtgaagaaagtcattggtagcttgatggggatggcattgaatctataaattaccttgggcagtatggccattttcaagatattgattcttcctatccatgagcatggaatgttcttccatttgtttgtatcctcttttatttccttgagcagtggtttgtagttctccttgaagaggtccttcacatcccttgtaagttggattcctaggtattttattcactttgaagcaattgtgaatgggagttcattcatgatttggctctctgtttgtctgttattggtgtataggaatgcttgtgatttttgcacattgattttgtatcctgagactttgctgaatttgcttatcagcttaaggagattttgggctgagacgatggggttttctagatatacaatcatgtcatctgcaaacagggacaatttggctgtctcttttcctaattgaataccctttatttccttctcctgcctgattgccctggccagaacttccaacactatgttgaataggagtggtgagagagggcatccctgtcttgtgccagttttcaaagggaatgcttccagtttttgcccattcagtatgatactggctgtgggtctgtcataaataactcttattattttgagatatgtcccatcaatacctagtttattgagagtttttagtatgaaggactgttgaattttgtcaaaggccttttctgcatctattgagataatcatgtggtttttgtctttggttcagtttatatgatggattacgtttattgatttgcatatgttgaaccagccttgcatcccagggatgaagccaacttgatcgtggtggataagctctttgatgtgctgctggattcagtttgccagtattttattgaggatttttgcatccatgttcatcagggatattagtctaaaattctgtctctttgttgtgtctctgccaggctttggtatcaggatgatgctggcctcataaaatgagttagggaggattccctctttttctattgattggaatagtttcagaaggaatggtaccagctcctctttgtacctctggtagaattcagctatgaatccatgtggtcctgggcttttttttggttggtaggctattaattattgcctcaattttagagcctgtttttggtgtattcagggattcaacttcttcctggtttagtcttaggagggtgtatgtgttgaggaatttatccatttcttctaggttttctattttatttgcatagaggtgtttatagtattctctgatggtagtttgtatttctgtgggatcagtggtgatattccctttatcattttttatgacgtctatttgattcttctctcttttcttctttattagtgttgctagcaggctatcagtttggttgatcttttcaaaaaaccagctcctggattcactgatcttttttgaagggttttttgtgtctctatcttctttagttctgctctgatcttagttatttcttgccttctgctagcttttgaatgtgtttgctcttgcttctccaggtcttttaattgtgatggtagggtgtcaattttagatctttcctgctttctcttgtgcacatttagtgctataaatttccctctacacactgctttaaatgtgtcccagagattctgtatgttgtgtctttgttcttattgctttcaaagaacatctttatttctgccttcattttgttatgtacccagtagtcattcaggagcaggttgttcagattccatgtagttgagcagttttgagtgagtttcttaatcctgagttctagtttttgattgcactgtggtctgagagacagtttgttataatttctgttcttttacatttgctgaggagtgctttactcccaactatgtggtcaattttggaataagtgcgatgtggtgctgagaagaatgtatattctgttgatttggggtggagagttctatagatgtctgttaggtctgcttggtgcagagctgagttcaattcctggatatccttgttaactttctgtctcgttgctctgtctaatgttgacagtggggttttaaagtctcccattattattgtgtgggagtctaagtctctttataggtctctaaggacttactttatgaatctgggtgctcctgtattgggtgcatatatatttaggatagttagttcttcttgttgaattgatccctttaccattatgtaatggccttctttgtctcttttgatctttgttggttcaaagtctgttttatcacagactaggatggcaaccactgcttttttttgttttccatttgcttggtagatcttcctccatccctttatttggagcctatgtgtgtctctgcacgtgagatgggtctcctgaatacagcacactgatgggtcttgactctttatccaattttccagtctgtgtcttttaattggagcatttagcccatttacatttaaggttaatattgttatgtgtgaatttgatcctgtcattatgatgttagctggttattttgcttgttagttgatgcggtttcttcctagcattgatagtctttacaatttggcatgtttttgcagtggctggtactggttattcctttccacgtttagtgctcccttcaggagccatgtaaggctggcctggtggtgacaaaatctctcagcatttgcatgtctgtaaaggattttatttctccttcacttatgaagcttagtttggtcgggtgtgaaattctgggttgaaaattcttttctttacgaatgttgagtattggcccccactctcttctggcttgtagagtttctgcggagagatccactgttagtctgatgggcttccctttgtgggcaacccgacctttctctctggcttcccttaacattttttccttcatttccactttggtgaatctgacaattatgtgtcttggagttgctcttctcacggagtatctttgtggcattctctctatttcctgaatttgaatgttggcctgccttgctagattggggaaattctcctggataatatcctgaagagtattttccaacttggttccattctccctgtcactttcaggtacaccaatcagacatagatttggtcttttcacatagtcccgtatttcttggaggctttgttcatttctttttattcttttttctctacacttctcttctcgctgcatttcattcatttgatcttcaatcactgataccctttcttccacttgatcgtatcggctactaaagcttgtgcatgcattatgtagttctcatgccatggttttcagctccatccagtcatttaaggacttctctacactgtttattctagttagccatttgtctaatcttttttcaaggtttttagcttctttgtgatgggtttgaacatcctcctttagctcggagaagtttgttattaccgatcgtctgaagccttcttctctcaactcatcaaagtcattctccatgcagctttgttctgttgctggtgaggaggtgcgttcctttggaggagaagaagcactctgattttttagaattttcagcttttctgctctggtttctccccatgtttgtggttttatctacttttagtctttgatgatggtgatgtacagatggagttttggtatggatgtcatttccgtttgttagttttccttctaacagtcaggaccctcagctgcaggtctgttggagtttgctagaggtccactgcagaccctgttcgcctcagtatcaccagcagaggctgcagaacagcaaatattgcagaacagcaaatgttgctgcctgattcttcttctggaagcttcatctcagaggggcacccggccatatgaggtatgagtcagcccctactgggaggttcctcccagttacgctacttgggggtcagggacccacttgaggaggcagtctgtctgttctcaaatctcaaactccatgctgggagaaccactactctcttcaaagctgtcagacagggacatttaagtctgcagaagtttctgctgccttttcctcaggtatgccctgcccctagaggtggagtccacaggggcacgcaggcctccttgagctgggtgggctccacccagtttgagtttcctggctgctttgtttacctactcaagcctcagcaattgtggatgcccctcccccagcctcgctggggccttgcagttcgatcttagaccgctgtgctagcagtgagtgaggctcagtgggcatgggaccctctgagccatgtgcgggatataatctcctggtgtgccatttgctaagaacattggaaaagtgcagtgttagggtgggagtgacccgattttccaggtaccatctgtcacggcttctcttggctaggaaagggaattccccaaccccttgtgcttcccgggtgaggcgatgacccgttctgctttggctcaccctccttgggctgcacccactgtcctgcacccactgtctgacactccccagtgagatgaacctggtacctcagttggaaatgcagaaatcacccatcttctgtgtcactcacgctgggagctgcagactggagctgttcctattcggccatcttggaaccttcctgtttgtttttttttttaagaaatgttgtctttctctgtcacccagagtggagtacagtggcacaatcataactcactacaaccctgaactcctgggcttgagcactcctcccacctcagcctctcaagtagccaggattacaggtatgagccaccatacccaggagtctgagaatcttggtaagttaacattaagaataccccagtgcaggggatttgactgtggaaggccctacgggatttccaaggaaggatgatagtgggtcaaacagatgcccaagataaaaatcaaattgattctgaagatgaagaaaatgtgaagatgatcacctgccattccctagaagtagtcaccttggcaatttccaaagccatgcaagaatgtgtgaaataattatatattccacctgttccttacctaagccactaatacgacaagagaccaatgaatgctaacccaaaaatagccatttaaaaacaccatttgggaaaatctcctgggcacagaagtctgagcatatgggccagtgaactatataggattactatttgtagcccccccagaggattcaagtaagcttaacacatatgtcatcttgagctaaggctgcagccacaaacactatcaaggacttggaacagtgtattatacaaccatttggttccctatcatacatctcactgtacaaaagaaggtattttatgcagccactgtgcagaactagccctctccccagaaagaatcctaacatgatatggtcatgtcaatatcatattccacctatggagtaactgtcaaattacttttgacatgagaacagataattgaaatatttattattgaaaatacagtataaaacatgggatatgaagggctggctggctcattcaggtgactgtgtgctctgtccacatacgaggggaagtaagggagaaacagatttaaaaaggctttttagtgctagaggagggaaggaagaggtggaggatgctgctctgctagaactctctctctttctctcttgcatttggatgatccagtggaagaaaaaattgctgcccaagacacaacttctattgctttgaacatatatgtacatatttttcaggaaacccctatgctgggtagtgacttcatatcatgtggccaaacaaggattggctgtaagttcacccatttttccactcaccccatgtagtgggaatatagctatgttgcacttgactgaggcagccctgccacttcttcccaagaatggacaaaaggcaaggccctggcaagtttcctactgctgtcttctttatgggttgatggtatgactgaaccagaggcccctgcctgggagaccacatctatgttctgacaggtgacaaatggaaaaaaggtgaaatattaagagaaggaaaacaggagaacaagtaaatgatgactctggggaaagtactgtcactcttagccccctagagtgtctcagggtgagaaaataatacacctgtggctcaggtgtaaggacacatcatggttgatgatggaataaatcttcagaactgttctcctcccaaatcaaattaaagctgatttccatgactcaggatccctgaacccctgcctgaatggttgcagattggcactgttttttcggttgtgatttatgggttatgcttatttttctagttcttttctaggtactctatgtggtttcctagccttcattgggaccagggatgtgccttaggcttctctcactgcttccaggggcagttgaggcttcaggcagcctacacgatgcttttttgttaattagaaaaagatgcactccttactctaaacagacacagtcctgcaccacagtttatttggagcaagtgccaatctttagccttcaccttagccttccttcagggcccctttggtaggacacaactcatataactatactcagtgatcctggggcctgatgtcttatttcagaatgccaaccttgctggaaattgtgtgtgtttgtttcttcctggtgctgactgcacctagctgaatctccaagttgtctcttatttatagattttctattactgtcctatacttacctgctaggttccctgtattagtcagaagtctttcaggtacaacctatagaaaccttacctcaagctgatttaattgatgaaagaaatgcattagctcatgcaactaaaataaccatatattaatatagatttaggcatgactggatttggtaggtaatcaaatgaaatccttcagagctgcttccaccctagtcagcattaccctctggcaagctctcacttcctacagacaagatggccctaaaaactcccggtctagattgaaaggtctcataatttagcctcttttggctgatttaagtcaagtgctgaactaatctctgtgtaaagggtcagagactatgatgattggtcggagctaggatgtttgtgaacccttcctgcataaagttggcagagagggcattagttcctctatcactcacctgttgctgcaaaacaaaccattccatatgttgtggcctaaaataacaatttcttataagtaggtgggtttgctgagctcaggcaggcagtttttctgctggtttttctggaggtctcctatacagctgcattcagttggagcttggcttgtgctggagtattcaggttgacctctcatcacagtgctcctctccaaggagcttctaatcagtcagtcgtttgacttagacttcttcatagcatggcaattgggctccaagaaggaggatgcaaaagtttccagtcctcttaaagcctggttcaggagacccagaatatctcttctgataatatgtattcattaaggcaaattataaggtcaacacggagacttcgcctcttcttgcgaggcgcagcacacagagatgagaattgttagtgaactaccacagttcccctaagaaaaaccaaagtcatgttacagtgggaaggacagttaaaagaccacatcagggctgggcacggtggcttacgcctgtaatctcagcacttcgggaggcggatgcaggtggatcacgaggtcaggagttcaagaccagcctgaccaacatggtgaaaccctgtctctactaaaaatacaaaaattagctgggcgtggtggtgcacacctgtaatcccagctactcagcagcctgaggcaggagaatcacttgaacctgggaggtggaagttgcagtgagccgatatcgcaccactgcactccagcctgcgcgacagagcaagactgtcaaaaaaaaaagaaaaagaaaagaaaaaaaaatcagtccctgtcactctctgttggacgctctgatgcttattactggtctgtaccctattcctgtttctgttcatccagttgttggaccacacgttctgctgactggaaggggcatcctccttttgtctgcagctcggactttcaatttgggacaatcctagaacctgatgcctctaaaattactgtgtcttttttcagctaatcaggccagtcttggtatgtccaaggatagtagagataaatttttgtaaatattgttaaattccagaatataatggccaagggacatgatgaaatgtccctcactggcagcaagaaatgtggtgttgttattaaataggtgtttggggatcattttgccaaaggggatggactgggtttttctaagtctgatctatgattctatggaatgctattgtgcaatgattctcaaagtatggtttctggaccagctgcattaatagcatgtgagacctgttagaaatgcaaattttggggccccaacattaacttactgaatcagaaattctgagggtgggaccaaccatcaccttgtgtttaacaaggtgattcttatgcatgctgaagtttaagaagaatggctgtccaaagtcattatctttcagattgttttcaccttcaggatcctacatacagatgacactagaaagatctgtctccactaagtttacttttctgtgctaataatagttatgagaccaccatttagattaaggttaactaaagaagccttgatgggtgtttgtgacactggtaatatcctcagaggatactctttccattcctattattttagcaaatatttatctttagcctgacagttcttgacttcccatggtctagatgtaatgttaacttagacaaaaatcacaaaggagaactctgaaggtccttgaggatgttactgcatcctctatctggatttcctggagtaaaatttactgttggcttaactggttttaggtaggttgactgtaggtggaggcttatgtttcaatcaatacctttgatctgtaaggcaccttgaaatatgtagtgtggaatatggtatgaaaatgtcagccaggcacggtggctcacgctggtaatcccagcactttgggaggccggggcgggcagatcccttgaggtcacaagttcgagaccagcctggccaaaatggtaaaaccccatctctaataaaaatacaaaaattagccaggtatgatggcacatgcctgtagtgccagctactcaggaggctgaggcaggagaattgcttgaacctgagaggctgatattgcagtgagccaagattgcgccactgtactccagcctgggtgacagagcaagactccatctcaaaaaaaaaaaaagaaaaagaaagaaagaaaatgtcatgatctctgtcttctagggactcataacatggtagaggaaataaaacgtgcataacaattatatataatgcagattgagggctctgagaaagggtccaagggctacaggagttcaaaaaatgcttcatggaggaagtcccatttcagctcagtcctgactagttttgataggcaggaatatgaatgtgtttggggtgcagtctacatttgagcataaagaggaagctgaagtcaagaactagcaggtgaatatttatatccccagcacctcattccataattggcacagagtagatgctcaataaatatcatgtgtcctggttcatagacaaaccattgacccattggctgagtagcagatttttttgttttttgtttttgggaaaaaaaagaagaaataatatgttaaatgtaaacattgattggaagatacattctgatttcaaaaaccttaaaatgtgaaaggaaagtgcttttctgaattttgaaaacatggtatttagtgagtttgagcagagtagaacttttgagtactccaacagaggcatatgcagctggaaaggcagatggaatcagattatggaagacccaggactctaggataacacttttgatttttcagaaggaatcacgggaggatttttgaacaggtagtctgctgtaggagaagtaatagagtcaataagaaaattataactgctttgtatgaatagcaacagagaaaaaaagaacaagaacgtattgagcacttacattaagacaggaagtatgcatatgctaagttcattttttaaaaaattaaacaatgttaacattttgccttttcctcccaatgtacttgtgtatgtacatgtgtgtatttgtgtgtgtgtgctgcatcatatgtatatatatttgatacagaatatttgtacatatttatggagtacttgtggtatcttgttacatgtctagaatgtgtaatggtcaagtcagggtatttaggatattcatcacctcaagtatgtatcatttctatatattgggaatatttcatgtcttctgttttgaaacatgcaatacactattgttaactatagtcaccctactctgctgtcaaacattagaacttattccttatatgtaactgtatgtttgtacccattaaccaacctcacttcatcctccttaccattccaagcctctggtatctatcattctactctctgcttccatgaaatcaacttttttagcttccaaatatgagtgaaaacatggatatttgtctttctgtgtgcctggcttatttcacttaacacaatgacctctggttccatccagagtgttgttgcaaatgatatgatttcattctttttaatcgccaaatagcatttcattgctgaattattatgaatgttatttaatctcagccaatttgaacagatattgtctatcccctcttactgatcaggaacccaaatttagggaggattaaaaactcttcccaacactatgttgctagtgaatgatgacactgtttaccttcaaacaaagtgtaaaaaatagttacatatttaatatggacattctgttttcctttctaatagcactgtactccttagttatactaatttcttgaatccagaaactagtaattgacttatttgggaaagagggagatattttgagaaacattatcattttgatttcagttaaggtgatgtgtcagagatggatggctgaccaccaaagttttgtaattggcttgtgtggtagaggtgtgcaggggaagcagctagccaaccagaaactagagtttccacttcttttgcctctagttttctcaccaatagaatttgagcagaattaagttgtgtcaattctggtcaaactttcttctccacattctttttcctaatcctctggtggaatgaagaggatttctaaaccttagaggagagaggaagcaacaaaatggaaggggctgtgcctctgactgatcacgtggaaagctacaaaccaactggaaactctgggattagacattacttgagcaagaaaaaaaaacaactctattacgccatggaggtttaggagtttagttgttcctggagcaggtattaactaatttgttgctgatatgtttgaatcaaagttaggaagcaaataaatagcaaatatgaagaaaacgtgtttatttggatttgtgacttgtattagttataaagatttgacttataatggtatatagtttatattaaaatgccaaatgtatagaaaattttaaaaagcagtaagctttccttttcactctttggatctaaaaatattgatccagttctagtgtctctgcatttaaagagttttgtcacataaggtctcagtggtttgattaattattcttctgtgcttagcaccatggtctcttcaggttttccagtagagatggactatgtggataaactaaagcactagctttagataattctactggttttctccctctgataccaatgaaaatctactgacactcagaagcaattagaaaatctattgatattcccgaagcaacttagaaagatttaataaccagaacctcttgattattaaactaattttcctcaacttagcagtggaaatgatcccagaactttatttttttaggcatatgtacttgtcctagtaaaccttttaacactgcagtttttcttcatacaacattggccttgtaagctatcgagatgattaagcttatcaaaattttgtttggttcccactgtttggactgaccctacccacattatgtatgccgtcttgtttcaattatttattgtttacttgatggcattagttctcttttagaaatttctttatttttaatagacaataattgtatacatgtatggggtatagtgtgaagttttgaggcatgtatacattgtttaatgatcaaatcgggctaattaacatatccatcatgtcacatacttatttctttgtggtgagaacatttcaagtccactcttttaggactttagaaatgtacaatacattataattgactatagtcaccatgctgtgcaagagatcagtggaaattattcctcctgtccatctgaaactttgttgggagggttaattcttaagcagcttttccttctctgtttcccatgctcccttgtagaaatgggatgtcagcttctgcccacagccaggtctttttagaacttgtgtatcatgcatgactacacagcaaaggaatgagggaaccctcttttctcaggcatctaccgcaactatccttccctagacctccataaccatttatgctaacacgtgtaagtacatttctttggacaactaccagtaattcaatctgctttgaatatatttctccctcaaccatgggtgtaacttaggatcattttggaagctcctatctgcaagtacctagggatatatatcaaaatgaaaggcagaggctttacatcaccttgtccaacccatggctggtgggcagcatgtagctcaagacagcttcgaatgcggcccaaaccaaattcgtaaactttctcaaaacattatgaaatgtgtgtgtgtgtctgtgtatgtgtgtgtgtgttttagctcatcagctatcattagtgttagtgtattttatttgtggcccaagacaattttccttccaatgtggcccagggaagccaaaagattggacatccctgccctacatactaaataaattcagagaaggggaaatcagagtggtctgctgtagccaggttttgattcatgaaacagatgaaacatgagacctgacgatgtggaaaaaatttcaatggtcagagaggacactggacattgtgggcagggggcagacataaagagaaaaggcacagaaggagagaagtgaacatgacatgttcagagtaggattgaaaaaagagtctggcaggtgccagaggcatgtaagggcgccctgggagatgagaaagcagtgagtggccttcgattgagtgggtccattttcattcaggagtggagctacgtaaacaacagtgacagctgactgtggtgaactaggaagagtatctggtattgaagtgtggattgcagagggtagatcctgcagacagtgagaccagtttgaatgtcactgtgatcatctgagtattggggatagtagctagcaacagaaacacaatcctttaggtaactaaagattttataaataatgagatataatgaaccagagtccaaatgattgtaagaagaactatgatgccactgataaaatcaagggactctgggaaaacagctattaatagcttggtgaggaagtttggacatcttgaatctgatgtgggacattcaagctgaagggctgggtaggcaactgaaaatgcaaaaactggacctcaagtaagaaggcagtgaaatgctgagtatggagatctctctttatgctgaatagcttccttctcccaccctaatcttccctacgttttctccaacctgctccacagcctagaagccaggtttggaccatccagtacatcaagctgaactttcttgtcttctggttttcagtagagctcagccaaaggcaagcaccggcaacagactgaaggggtgaaggagaacatagttgaggtgtctctcctggctccttgttttgagatctggctgggtcccggctcaatggaaagtcacagctcctagccattagcacatgagaacacgcaggctatagtggcatcctcaggctggggtatgttcaaatctttcttccccttcaaggggacagaagccagcccttccaacgtgcagggctgatttgaagtagaatgttcagatattataacagactgccagtgagtcctcaatgagaggagagcttagaggggagagatcaaggagtccatagagagtctcatcctactgatgctctagtgtttctcagcttgggtaaagctttgataagccactcgaggaaagtcacctaacagttattgcgcacccaccacgtgccaggcaatggggcgctttccctagtttatcgtttttaacgaccagtagccctggccagcggtttatagcacgcgctgaaccctagagcaggaagcaaaaggtgcagaagttctgtggcaaggcggcttcccagggcgggtgtgctggggacccacgcggcaccgcggggagggggctctgcgcgctcaaccccgtccctggcattatccgccgcctccacccgccggcctcccgcagcctggccagggccatgaggaccaagcaggtgaacttgctgatcaccctggtcgccgtcgcgttgttcagcttctcttgcttctccatctacaggataactcaaaccagtaagcggcgggccctcctcccgcctcctttcccgccgcgggggcttcggggctgcaggaatgcaggcggggcagggtcggcgggtgcggaggcgatgcgggaagctggcggcggccgcccgcgctggcactgggaggcccgcgtcggtgccttcccgaggccgcgcctaccccggtcagcggcggctgggctgtaacccgcgccccgacctcctcctccagggccgcgtccggcctgcacgcgcgctaacgcatctggcccagggtacccgccgctcccttttcctcaaaggttcaaggaccccgtctgtgcactgcttttcccctctcctgttcttccttctcgaaactatggctgtctgaccccaagaactgctcttacacagccagcatctgtccgcatctttcctccttcgtggtctgggttacatcaccaggccccgcttcatgcctccctcctccctggagtgttttttgcgtacctgaaaagaggtggtagaaaggagagggacgtccctgaccacctacagcgccggcccagcgcctggacttctccgatggaccgcaggcctgtgttccgctcccacacacactcaagatgcaatttctcctggcccatagaagtgccaatttaggaaacaaaggtacaggttgcccagtttaatttcaatttcagataaacaattatatattagtataaaaaattgcatgggacataattattctaaaatatttacgtcttttttattttaatttcaaatttaaccaggtatcctatatttgatcttttaaccctagttgtccgcggtgtaaaattttagcattcaagtagttaaatttttcagtttaagacttaggaaccctgtaaattatgaacccagccttccacgattgctcttacgttgttttcagttaaattttcgtttatttacacatgtatgacttaagtgcacacaaggtaatcttggtaggagtgctgaggttgaagtttgggagtggcttcatgttttagccctccagttaatactagattttatcatcatatacacaaaatattctatatcctgcttgtttcaaagattaggaatgcatattaatttatctgcattataatatttctactaatctttatagtcatttgacatagtttccctcctcttcattttctataaagaacatcatccaaatgtctattttagcacaatgaacaataagcacacttataacaaaaaataaatgatttcttttaattagaaagcaaaatgtaaagttttatagtaattttttttttaagacagagttttcactcttgttgcccaggctggagtgtagtggccactgcactgcaacctgtgcctcccaggttcaagcaattctcatgcctcagtctcctgagtagctgggattacaggcatgtgccaccatgcccggataatttttgtatttttagtagagatagggtttcaccatgttgggcaggctggtcacaaactcctgccctcaggtgatccacccacctaggcctcccaaagtgctgggattacaggcatgagccaccacacccagcctagtaattttggaaggtaatttagaatgttaacctcagaagttttaataccattaatgattttataatgaaactgtagactttgagatccttacaatcattttggtgtgttttctggttatgacagggaaaaagaagttcgattcctcaaagcatttatgtcatcatcattcatatgttcaagttcagaagcaagatactgttcttgagaatgaaacactcttaaaataacagacaaatcagattttttcattttttaggtatgcctttctgtggaacttagctctaaaataattaggatatcaatcctataatgagctgttctcacatcaacaaaagaaaacacatacttcacttagtttctgaagtaatgatttttataaagcaccagagatagtcccaatgtcttaaaaatttaatctatagttgtcattcctatcagtgaaaatttgggaacgtttattagaaagatggccaccacctagtgctttattttttctccctctttaaaattaactaaattttgccaggcgcagtggggtggctcacacctgtaatcccaacactttgggagactgaggcaggtggatcacaaggtcaggagtttgagaccagccaggccaacatggtgaaacctagtctctactaaaaatacaaaaattagctgggcatggtggtgtgcctgtaatcccagctactcaggaggctgaggcaggaggattgcttgaacccaggagacagaggttgcagtgagccgagatcacgccactgcccttcagcctgggtgacagagcaagactccatcttggaaaaaataaaaactaaaaaataaattaaattaaattaacaaaattttatggatagataacctttttgttcatttttatgagctcatagtattaacagttcataatttgatgaacaaatatgcaagctctgtgaggacagaacatacttcctgtttttacctgttctgttgtgttcactactgtgtcccagcatgtggaaaactacatggcatgtaatgagcatgctaaatattggatgaataaatgaatggttgaaataatgaaagactcaatgagtttaataactacctattcatgttgtaggcaccaagtgaacggcatcaaaggacaccccctccctttcatgaagcttacattctgcttacgggaagtaaacaacaaacaaatgatataattactatatgatatcaggtgttggcagggttagggaaaggaaagtgctgttttaaaggaaagggctgtcagagaaggattacctgagcaagttatatttgaatagattctcaaatgaaacgaggaagcatcatgtgtggatatctgggggaagagtatttcagacaaagggaaaagcaagtacaaaggccctgcggtggaatctccttgatttgttcgagaaacagccaggaggccaatgtgaacaggggggagagtgttagaagtattatatcatggggaccatagtaaggactctgcattttattgtgagtaagatcggaagccatcagagttttgtgcagaagagtaacatgatctcacacatacatttaaatattattggatgtgtgctatgaaagaaagaagagaattgcgggatgctccaagaatttttaatttaaactagggtttctcaaccttagcgctgttgacattttgggttgggtaattctttgcggggagagggcagtcctatatattgtagaatgtttagcagcatccatgggttctatccaggatatgccaggagcaacaccccctctcccgttgtgacagtgtctccaggcattggcaaatgtctcctgagggagaaatcatccctggttgagaatgagtggcttaaataattagataaatggagctgccatttaccgaaatagcaaaggctggggtaggagcaggtttgggggtaaggtcactatttctcttatgtatgaagtgcttattagagatcccagtgaaagtgttgaataggcagttggatatatcagtctgcatcaggattagcagtataaagttgagaactgttagcatataaagccatgaaatgggatgagatcccctagggagtgaacaaaaggagtaagtcttggggaatttcagtatttcaaagtaaaggaaaagctagaaaactgaaagagctaaaccaagaagatatttcaaagaggagcgtgcaatagtgtcaaataatgctgcgagaacattctctagtaatgaaaagccatctcactcacaatctttgaagttatcattcccacattcttagtgaatgcagcaggcccttgatcgccagagtctcagtttgagtagtacttcatccgggtcacctggagatgataattaaggtaactgttttgccagtgcctgtcatggaattctagtgtcctgttttccatgggcagtgtggtgggttgtcattgcatttaagctcaagtacatcaggtaaccaattccagattttcttctttgagagtgtttcctgggtaatgcaaccactccaggagcccctagtcatctgctagctacctcccttggaaaagccaacacttgcctgccacttccattgacaatcctggccctgtggctggcctgctactactcttgcctctggccactgcctcaatgtctgacaccccagcaaaggctggcagtttggtggaagaatcaccaaaaggagaaatactacctcctttcatacaccctctattttagcacaactgcctcccattggcaaaatataatgagaataccacttgcaaggaaatctgggacaagcaacaggtttccagtttgaccatacaaaggaaatttagaggggcctataaagacagagtgtcaacagacacaatttttagaaactcttggaacaaagaaaactaaacagcatcttatatagggacatccataagtatgataaaattacattttaaaaaataaaggaacaggccaggcacggtggctcatgcctgtaatctcagcactttgggaggccgaggtgggcagatcacgaggtcaggagatcgagaccatcctggctaacacagtgaaaccccatctctactaaaaatacaaaaaattagccgggcatggtcgtgggcgactgtagtcccagctactggggaggctgaggcaggagaatggtgtgaacccgggaggcagagcttgcagtaagccgagatcgcaccactgcactccaacctgggtgacagaacgagactccatctcaggaaaaaaaaaaaaaaaaaaaaaaagtaaaggaacaataaacagatacagtttgggagagtaccgtagtatcatcatgagatggggtgggagaggaatcagaggtggtagccgaggcatcgggtaactttcagttattagcttgagtgatgagctattaattttacattatgttgcggaacttacctatgtattacatgtcttcttttgcatatataactttttaatcagttaaaagaatttgtatagtgggaataaggaagcaagaaaatggaaatgatagacatacagtacccaattcacttaaagatgtaaaaacaataagaatgtatttttgaaaaagttcaacttgggatataaatacaaatgactttttatttttccagtaactcctcatatgtgttctattgagcccccttctctgcttagatgtttagagagacaatgaagacttattatgtgtcttttttggtcactttcggttattcagtctcattcctgtttttaaagagcctgtttcattatttttaaaactttaatctcctagtcaacttgaaactttcttttcctttccctgctggacaggcaagacttgtggttcaaggaaaatggaatggcaaatgagaaaatggcaaaacttccacaaacactagtggctttaaacaatcaattttttttttttttttgagacagagtcttgctctgtcatccaggctagagggcggtggtgcaatcttggctcactgtaatctccacctcccaggtccaagcaattctcctgcctcagcctcctgagtagctgggactacaggcgcgtgccaccactcccagctaatgtttgtatttttcatagagacaggtttcaccatgttggccaggctggtctcaatctcctgatctcgaacaatcacttattttaaactcttgatttagtaatcagaaattcacgaagggctccactgggcagtttatctataatctgaggtggtgtcaactgggacatttggagctgaaggctctactactaagaagtctttttccctcacagctccagcatctctctctcctctcccgacacagtggtgcatcctccaaagcctctcctcgtggcttgtgtttgtttctcacaacattgtggtcttagcaatattatacattttcccccccacaaggcaactaccttttaaaaggcaggaagtggaaactgccaagccagttaaaggctgtaccccaagctagtactgcattacttttgctatatattactatagtgaaagcagtcatagggtgaactcagattcaaggaggtagagaaattgacttcttgatgactgactgggaaggtcaaagtgcacaacaccatttgacctggaggctatctttggagaaacagtctgctgcacccccctcctcctttcttgtgcttcccttgtggtactagggtgggaaagagctggggggacagaggttttcttccatgacaggagcctggtggtttcaatttctctggaagacacttggatgtggcagatatctgatgctcttgtaggggtagtttgtggctgcttctgagggcctgctgtggtgtctccgctctctgttcccttaagggatatccatctcctgcttgaattcttcctccctacctctgcctttgccagagccccttgttgctgggaatcttctgcctggcagatgaccttcttgtagatgacctgcaatattcacttgagccacagccgactcctatgtctttggtgcttcaagctgcatgcctgcaggctacttcatatgttccccctcttggcttagtaggatctctccctttctcctgccccttttcatctggcagcatgagaattttggtaggtctagcagttccacaattttcagggtaaaaatgttcctcagcccctgaattggtgaggagagggctcattctagagcacccaactttatttcttggggatctctcttcccttgatggaagggaaacaccctcatctccatccagttgggggagtgtttcaccaatgtgtatgaccttgtgggaatatgccgacaaaatagattgttattactgtccatggggcagaagaggagttctcagacgcagctgtaagtaagcagaatccaaggtccaaatgtgggttattcaagagaataattgaaatgtcctgtggaatttaaaatacatgtacaataacagtgtatgccagcaattacaagaaaaggtaagagagggaaatggagttaaattgtactagacttgtagaactattgagaagtgagaatgtaagaattggtatttgactattaagtcgaggattcatgttggaatatctagttgaaccactaaaataatagtacaatagcataactatatcactaattgcattaagtgtcccaaaaaagaaattaaaatatttcctgattggatatatgacaaaattcaacttgatggttactaaaagagacatatttgaattttaaagacagaaattttggaagaaaagggatggaaaaatacccacaaacccaaaccaaaataaagttgatgtagctgcattatgttatcaagcaaatgggctcatggcccaatgtatacagaagccaataactttaacactggcttttgagaaaagaaatttttttttgcaaaaccagccagcaaggagatcagactcaggctcaaatgtttgtctcttattgggtctgggccaagttttaaggaatcataggacaagggaaaagatttaggaactttggcttggcagggtctaattggagggcttccagtctggccattgatggtaaggtatgttgaggcaaattttagctccagatcttctgggccaacagacccatcgcatatgaaagagttccagcgttcaggttctggtcacgtcccaggcttcttgattcagagggaggattctttggttctgggtgtggttagaggtcaaagattttgctattgcacttgcccaggctatatgaattgcaattttgggctctgctacacctacaaggtaactggacacctttcaacaaagtaggtctggtttgggctggtcttgtggtttatcaatatcagcaaagaagactctaaaacaaagtgcaacataaatgttgaataaacatagaaaaaccactagcaatcaagaaaatgcaagtttaaaacatgagttaccagttcatgctattctgttccttaaatcaggaaattggacatttagtgagaatgtggagctttgggaattcaaacttcccttggaggagtacacattcagtctcttccgttatgaaacatatgcctttcctatgtcttaggaattccactactagtagggttgaaatgagtgtacagccttatcaatggtttatggccaacatatgttctcactgatcagtacctataccatatatgttgttaaatattttaaataacatctctaccaccagatatatcctagggaagctcttgaacatgtttactaggagacatgtaccagaatattcttggtagcatttcttataattgttaccaacaatagaagagacaaacatgttgtggtatattcagtacattggaacattttacatcagtaaaaatgaataaactacagcttgattcgtcaatataaataaatctcaaaagcataaattgagctaaagaagcaagtacagagttttatttattaaggtataaaaccaagtgtaagtcagcttgcaaaaatagtaaaactgtaaaggaaagcaataaatgattaatacaaaattcaggattctgcttatctgggggtagggaggaaggggaattggatctgggaaggaaacaagtagaatatctaaggctaaggtagtttgtgatgggttcatggatgttcatttttattattatcctttaaactgtcttatatacgctttgtaatgtctaatatattctgcaataaaacctaatgcacagaggggccactcacagggaatttaaagggcttagtacatagtttgatttgattattgcaaagcatacatggggggagtaatctgaaatgtactttatgtttttagtttcatcttctagtaattaccttagatattctttatttggaaccacattgggtacaagtatactaataataaatttaaagtgacctgccaatgctttatcattataccttttgcccttctatttaccccctgagtgacttacgtacgttccccatgataaactgtagtaggccattcttgcattgctataaagaaatatctgagactgggtaatgtataaagaaaagaggtttaattggctcccagttctgcaggccctacaaacatggtgctgacatatgcttggcttctaggaaggtctcagggagcttttactcataacagaaggctaggccagagcaggcaggcatgtcacatggaaaaagcaggagtgagagagagtggcagggaggtgccacacacttaaccagatcccaagagaactcactatcatgaggatagcaccaagccatgagggatcatcttcccccatgactcaaatgcctcccacattggggattacaattcaacatgagatttggtggggatagatattcaaactatatcacataccataccatttcacactctatgcacttatggtgttgttttctgaggctggaatgcccttcccttctttctgctgtaggcaagcttctgtacatacaagttcacaagtcttccttcttctctgaaaccttctccacctctcctactcctcagttctccttaagaattaatcattcctgccttcctgtgcctgtggcactttgaggataattccattttaacaatatattataattagtaaagtttaaatatatgcaccattcccacattccttgcagtctgattgtcaggagccagattttattcatatcaatttaatttagagcagaaaccagattttattcatgtttatttacctaccacatacatagcacatggcaagtatttaatggaagaatagaaatctcagcatgcttcttgctactggaggtgtttagtgaatgaagtgaggtcaagtcacgttcatggccatgttgtataggacctggtagaccagggcaagtaagcactcagggaactatttataatctttgagcagtgtttccagaagattaatcattgattggagatgagagaccaattaagaggcaattataatagtgcagctaaaggcaataaagcttgagctatggtagtatcaatgatgataaagagaaaaccatgaaagtggtctgtcacagcccttctcaaattttaatgtgcatagtagtcaactgggaatcttattaaaatgcacaatctgattgtctgcatctgaagtctggggtgaggcctgagatactgcatttctaacaagctcacagctgatgccggagacttatgccatccagtgtggtagtcaggtggctttgaagcacttgaaatgcagctagtgagtgcacctgagaaacagcattttttattttatgttaactagtttgagtctacatttaataactgaaattgtgcaaaatatttctccattaagcaaaactgtactgttttggtaggattacatttcactgtaattattaaaatttagcatctgaattgagatgtactgtgagtgtaaaatacacgcaggatttagaatatttagtacaaaaatgtaaaatagcccattgtttacttttatgttgaaacattttggatatattgtattaaataaaatatattgtttaaaattactttcacttgtttcattcgtttcttttcactttttaaaatgtgactactagcaaattttaaattacagatgtggcttgcattttatttctactggaacacaatgccttggagccttgctgtgagaggcacaaatcagtggcacttaggatctagcctggaacctatttttaatgtgcagaagtcacattcacccattgcacacttgaactggtgtttgttttcataatttcactacagagatgcccaattgactcaaagcatctaattattgtttatttcaaacctttgcaaaatagtgttataacatttcatcctcactaaatacctgggtaaatatgcaagtaatttcaatattttaaatagaatattgatgaatgaattaccagggaaaaatgtacaagaagcagatctaagattagagattatgtcctttaacatttctttatgattgttgctgtaaatactgcttcctctggagaaaactctttcttttcatgtttaccaaattgatccctagggactgacctacaatgtagaaacccacataggttgcatcacccatgatatattaactcggaacacacaatccattttgcagagagaacattacctgggaaaccctaatatcatgagcttaaactacatctccctctaaggtttgtaagcatcttcaaatagtatctacaatatgaatatttaaggcttatctggataggtgcagttcttttgattaaagcatgattcagtttaagaatcactaaaattagttcttatactgacaagtccattcatttcattatttattcatcgagcatatatttgtataagaactatatgcaaatcgctgtttcagatagttggaatttagtagtaaaatgttctcgctgctctcattctagaaatctctggagtgaaacatgaaagcagtcaatacataatatgaagtggtggtgataagttatttgaacaatgagaacacatggacacagggaggggaacatcacacaccggggcctgtttcggggtgggtggctaggggagggatagcattaggagaaatacctaatgtagatgacaggttgatgtgtgcagcacatgtatatctatgtaacaaacctgcacattctgcacatgtaccccagaacttaaagtataattaaaaaaataataataagggaaagacggctgtgctatcttacaaaggatggcagggtaggcttccctgaggtggtaatgtcttagcagaaaacaatgaaattagggaccttctgccacaacaggatatgtgataaaacaatgaaaggatatgggggaagagcattcagtgctgagaacactgcaaaagccaaagccctaaggtaggagagtgtttggctcgtgtgaggaacagcaaggaggccagtgtgggtgatgctgggctccctcagagtgaggcaggaagggtaggaaatgagaccagggaggaactcaggactgatcacacagggctttgtgggtcatggtaaggactttggttatttttctaagtgtgatgagaaatattttggagggttttgagcaggggagaggaattatccaatttttgccacaggctgtccacttgtgtgctcttcttcagaaaaaacagataagtgaaaaaatattaaatgtttcaacccaaatgtatcatcattgcttttttttttttttttttttttttttttttttttttttaagacagggtcttgctctgttgctcaggctggagtgcagcagtgcagtcatggctccactgtggccttgatctcctgagctcaagcagtcctctcaccttgacctcccaaagtgctgggtttacaggtgtgagccataacatccatccaacatactgactttatttcctttgaatacataaccaacagtgggattgctgcgttatgcagttctatttttaatttttttaataaaatttatttttattttttaattattattatacttttaagttttagggtacatgagcacaatatgcaggttagttacatatgtatacatgtgccatgctggtatgctgcacccactatctcgtcatttagcattaggtatatctcctaatgctatccctaccccctacccccaccccacaacagtccccagagtgtgatgttccccttcctgtgtccatgtgttctcattgttcaattcccatctatgactgagaacatgcagtgtttggttttttgtccttgtgatagtttactgagaatgatgatttccaatttcatccatatccctacaaaggacatgaactcatcattttttatggctgcatagtattccatggtgtatatgtgccacattttcttaatctagtctatcattgttggacatttgggttggttccaagtctttgctattgtgaatagtgccgcagtaaacatacgtgtgcatgtgtctttatagcagcatgatttataatcctttgggtatatacccagtaatgggatggctgggtcaaatggtatttccagttctagatccctgaggaatcgccacactgacttccacaatggttgaactagtttacagtcccaccaacagtgtaaaagtgttcctatttctccacatcctctccagcactgttgtttcctgactttttaatgatcgccattctaactggtgtgaaatggtatctcattgtgtttttgatttgcatttctctgatggccagtaatgatgagcattttttcatgtgtctgttggctgcataaatgtcttcttctgagaagtgtctgttcatatcctttgcccactttttgatggggttgtttgtttttttcttgtaaatttgtttgagttcattgtagattctggatattagccctttgtcagatgagtaggttgtgaaaattttctcccattctgtaggttgcctgttcgctctgatggtagtttcttttgctgtgcagaagctctttagtttaattagatcccatttgtcaattttggcttttgttgctattgcttttggtgttttagacatgaagtccttgcccatgcctatgtcctgaaggtaaggagcctccatattgtgttccataatggctacactaatttatattcctgccaacagtgtgcaagagtttctttctctccatattctcaccttttgtctctgataatagccattctaacaggtgtgagatggtaccttgttttaatttgcattttgctgatgattagtggtatcaagcacttttttatgtacttggccatattcatgtcttgttttgacaaatatctatttgaatcttttgccaattttttacttttttttgctattgtttgagtttcttatatattttagatattaacctcttttcagatgtatggtttgcaaatattttctcccactggacaaattttaacccatagattgtctcttgggttgaaatattttcaatccatgttgtctcttcactctgttaattgtttactttgctgtacataagcttgtttaacttgatgtaatcccattcatttattttgtcttttgttatctgttattttggagtcatatctgaaaaatcattgctcagaccaggtcaataagctttttcctaatggtttcttctagtaatcttacagtttcaggtcttacacttaagtctttcatccatttttagttgattttttatgcgagttgaaataaagatctaatttcgttcttctgcatgtggatatccagttttccaaacacgtttttattgaagacactgttctttccctattgtgtgttcttggaaactttgtcaaagatcaagttactgtaaatgcgtgaatttctgggttccctattttgttccattggtctatgtgtctgttattatgccagtaccatgctgttttgattaccatagctttgcaatatattttgaagtcaggtagtgtgatgtctccagctttgttctttcattcaagattgctttggctttttggggtcttttgtggtttcatatgaattgcaggggttgtttttctgtttctgtgaaaaacgtaattggatttttttaaggattgcattgaatctgtagattgttttgtgtagtatagacattttaacaatattcttctaatctacgaacatgtgatatctttccatttatttgtgtcttcaatttctttcacccagattatatagttttcagtgcaccattctttcacctccttggttaaatttattcccaagtattttattgttgccattgtaaatggtgtggtttgactgatttctttcctggatagtttgctgttagtggatagaaactctactgttgattttgtatcctgaaactttagtttatgtgcatcagcactacatcttcacaacagctctgaggcagagatttttatgtatgcatttacaccagaaggagcagaggcaaataaaaattaagcaattttccccagataacacaaatattaagtatattatacatgatttgacatcagagccatcagaactcttaaaagaatattctgtaatttatttagcaaatgtcctactgttgggcactttggtcagttccaatttttaaaaataatgctaaatactacggcctatgttaaatatccttagtccaaatctgtgtacatattcctcataattttcttcagataatttcttagatgtatttttggggggttaatgggattacactgtaatacaaatctgatacacgcacaccatggaaaatttgtaaaacaaagaagagcacagagtaataaaggaaaaaatcatttataatcccaccttcctcatatcactatatttaacattttgttctttctttccagtcttttatatttgtacctatgcacgtatttacacatgtggtatatactatatgtatatagtactgtatatatacacatataatacatatatagtactatatataactatattgaaacttatactttacattcttacctattatagaaaattgtgtgacaccattgctacatgtacaaatatatacatatgttttcattgcagataatcaattaattaactgtagaaaccatattttggagtttaaagaaaatatgctacacttaagaaacaaaactgaaaaaaatacccaagagatgatgaaagttttgaatcgaatgaagtatgaaattacaaagagagaaattttgtcaggaaacttaggtttgtgttgattttgtttgttttgttttgtttttggaaatgtagattcaatgtcttatgattttagggcctcttctctctataaacttaactatatcagtactggttcttttattgtgagacgtgcaaaaatcaggtaagagatatcactgacctacttcttctcatcttgacctcgaaagtagtcttcctgtgctttgtggctccgtgaattgcaccaccatccatgatccattcaagagatgcaaccagaaacctgaggatcacctctgacccctcgctctacctcttgcatacttccatgtcagtaaaagcaatcctggttgattcaccattctatatatctcaaaaatttgtccacattttccatcatcatttctgctacattagtcaggcaaccttcctgctttacctgagtgactagtaacatacagctaatttttctcatataaaccttcagtggctttccatttctgcaggacaaaaagtcctgccttatgcatcccctttgtactccaatcctccccctactcttaatccctggcaaccactgctcagatctctgttcttattgctttgccatttccagaagccatgcaaatgcaatcaaacaatgtgtaaccctttgaaacttgcttctatcacttagcatagattttcccaaattgtcatgtcaccaattgttctgtttatagtgctgagtagcatttcgttgtatcgatgttcaatggacatattgtttatcctctcaccagttgaaaggcatttgggttgttttcaggtttgggcaattacaaatagatgttactataagcattcatgtacatgtgtttggtatgaagagaagttttaatttttttagaattcatatgtagaagtaggattgacagggcatatgtaagtatatgtttaatgttataagaaactgccatactgttttccagagtggctgtgccatttttcactccctccagcaatgtatgagagtttagtcactccagtttattatagccatttttttttaaaacaggctcttgctctgttgcccaagctagagggcaatggtgcaatctggctcactgcagcctccacctcctgggcccaagcaatcctcctatctcagtctcccaagtagctgggactacagtcatgtgctaccacacctggctaattttattttttgtagagatggggtctctctatgttgcccaggctgatcttggactcctggcctcaagcaagcctcccacctcagccttccaaagtgctggaattacgggaccatgcctgtcctattatagccattctaatgtcatgatatctcatagctttatgttgtatttcccagaaactaatgatgttgaacatttttactatttgccatccagatatcttctttggtgaaatgtctgttcaaacggggaatgcaatggcacaatcatggctcactgcagcctccacctcctgagctcaagggatcttcccacctcagcttcctgagcagctgggactccaggcgcatgccactatgccccactgcgtgtgtgtgtgtgtgtgtgtgtgtgtgtgtgtgtgtgtgtgtgtgtgtgtgtgtgtgtttagagatgagggtcttgctatattgctcatgctgttctcaaactcctgttttgccagtttctttaactgggtgattttgttttctcattgagttttgaaagagttctacatattatcctggatacatatcagatggatatgtgatttggaaatactttctttcagttggtgacactctttcattctctttctgatgctttcagggggcaagcatttttaatttttgatgaagtctgatttgtgaatttttcttttatgtattgttttgttttttgtattgttatattgtatctaagatctctttacctatctcagggtcatgaaggttttcttttttgtttttaaaaaaattcataggtttatgttttacatttatgtctatgaacatttttagctaatttttataaacagcatgaaaaacaagtcaatgttcagttttttccatgtagatgtccaagtgttcaaacacctttatcaactgtcttttctgcattcaattacctttgcaactttgtcataagtcagtcaaccatatttttgtgaacctacttctgtattctatgatctgttccattgtttatatatctttttttatataatatcacactgttttgactacattgctatgtattatgaattaaaattgggcaatgtgcgtcctctaacattttctttttcaaaattgtagaggcaacttctaatgaagtttacaaatatagtcattaaattttaggggctacaaagcaaagttataaagatacaaatttaataaagtgatattaatcaaagtagcagagtaagccaattacagcatgtttcagttatacttttttcatttggaactgacagttccattgtcctctgtgtatcttataattctaggcttaaattacatattactttataaataaatatgaataaataatagttgagctatatttagcattattattttaataatttacattttagagtatttcttttatatattaaatgccaaattaatctgtgagtttattaacacctctttgaaaaaattattccagggggagaaaaatccctatgatcatatactcagaagcattatttttttctttcagttgcacagaaagcagacatattaaataaaaatgaaacagtatctaatacatttgaagacttaaagttcttttttcctcatctaaggaaagaaggtagaatttatcctgatgtaatcattggcaaagggaaaactggtggtaagaaaacttagaattggaaaattaaataaaggtattttgatctttggggacatacttttaagttttaagatgtaatccattattatcttagattgatatgcagactacagcctatctggcattaatttggattactggaagtcagtatattgtctggcagaaaataatagtttcataaacacttggtgacttgaattcaaatttagcataacacaaatgctttgaaaataagtaatataagtcaaatatacattaagtatatgccaaatgtttggcaaatcttttctcgttgtttttggtaaatctattcttacctggttattttactgtttcccagtctttctggagaccaaggtcagtaatagccttatacaacaggtgatgtttgaggtaagccttgacaaatgagttcaagttcaccaagtatacaagacaagaagaagctttggagtttgaagcaggaatattaagctaagtctcaggatacctgcctttcctataaacctcactcattccagtgagtgagtcactctaggccaggcccattggctccatgttttaacatacagttttgttggaacatagttatgcttatccatttacttgttgtctatgtctgcttttgtgctccaatggcagagctgagtagttgcaacagagatggtataacccaatagccaaaaatgcttactatctgcccctttatttaaaaaaaaaaaaaaagtttgctgacctctgctctaggcagttccttgggaataagtagtgttgttttgtatcatatgcctctgatgacatcgtttatctattgcattctgtgttccacttactgagttctatgttttcttacattatctcatttaatcttcacaatccaatgcaatagggcctattactgtcatctctgttttacacctgaaaaaactgaggcttagagaaattaagaaacttcttgagttcatacttgtaaaactctttacctgtatatacatatacatgcatatgtgttgtgtgaatgtatgagaaagtacatgctagacaaaagctgtagtttataggatgaggaaaagttgaaagacacacgcaagaaaaacaatgcatagaaatgataagatattagacaccaagaataaacataaccttgcataagcatcagcaaatgtaagtggaagcccatgacacagagtgaaaggaaggagagagagacatggtggtgtttgggtggagcaatagacctccttgtgtagggggttggagggttgagataacccagttatcagagctgtgttaaatccagaataattttctaattccccaacaatttattgatctccaatcatggtgtacgtatttatccttcttttgaggcccttttggtggcttttctcaattaccagaagggatttaaggaagattctgttccaggcaactaaaaaaatcctaacacatgaaacatatgtaagaggattgaagcctgtggcaaggcctactagggaatccatcatcagtcttgtttattctgtattctaatagatcttggataatttctgctctctgtagcccctctataactattttttattgagcccctcatcattttgtgcctggtttatggaaacatatttgtaatttatcttgtgattttagtatcaccaaagtcaatccattcttcatactttcctcgaagatatgttagtaaaattcatcactgatcatacttgactcttgcttaaaatccttcagtagaccctcagtgcacatgaggtgaagttagccccttggcagggtatatgcagaaaaggctgtatctttcaaatctcagtctctgccatgcctctcctttccagaaaccacaaaccacttgcagttctcacaaataggccaagctctttgagaacagataggacaagcttcatatattctgcatgtgctaaccactgcctataatgaacatacctcctctggcaaaccataactgatttgtaatgtgactcccttatccaatatgacttttcagcttaaatgacaacttctctgtgaattcttccacgtctcctcatttaataagcttctactctgttctgggcacttcttaggccctgggatatggggtgaataagacatagaccccaccttcatagagacaaatgataaggtaattataatataaagtgactggtgctgtgataagggaaataccagggtgaagccaaaatcctatgctatgctttctggaagaagtgtcatataagtgacatgaagggcaaaagaattggagtagactaagtagggaagtggtaggtggtggatagcggaaagtagagggtggtcatccagatagaggaaaagaaacatgcaaaagtcagatggcaagaaggcctagaaaggatgtgtgtcttgcatgcactattggggctggagggtattagtagcaagaccatggacacaggccaaataataaaggggcttgcccctttattatttattcaatttcaatttattatcattaccatgtatcagtctttatgttagtgctggatttataatataagcacacatgaaggtgtctgctgtcatcaagctgacattctagataggaatgagttacaacaaaaggagtgatgagtactatgaaagataaggtaagaattcatagctggtgaaaggattaagcatcaatttgtgatcaaaatgactaatatttagttgaatcctgagaaataagtagaattatcaaaggaaattagaggaataagagtattctaggcaaaaagaatggcgtgtgcaaaggcttcgaggtaagagtggtatttggtcaattcgaaaagtgtgggtagttgaaaaaaagggatagatcagtaccaggtcactaagggccttttaaattcttgtaaatgcattgtaaggcataggaagccattccaggaattgctttcatactgtatcttacagcttgaaacttgattcctgcctcaatctatccataaaaatcaattccaggtggattgcagctctaaatatgaaaggcaaacaataaactattagaaaatcactcagaagaatgtctttatgacctgaagataagcaaagatttcttaacaagacccagaaaacccaaacaacaaagaaaatggatgacaaattgcactacattacaattaagaatttctcttcatcaaggggcaaaacattgaaaagggaaccaagagtgggagataatatttaataacacatataactgacaaggggttcgtattcagaatatataaagagtatcaatacaatcaataagaaaaatgctgacaactcattagagaaatgggcaatagcttaaacaaggattttacaaaaaagaatagccaaaagccaataagtggccaggcacagtggcacatgcctgtaatcccagcactttgggaggctgaggtgggcagatcacttgaggtcaggagttcgagaccagcctggccaacatggtgaaaacctgtctgtactaaaactacaaaagttagccgggcatggtggtgcatgcctgtaatcccagctactcgggagactgagacaggagaatagcttgaacccgggaggtggaggttgcagtgagctgagattgagccattgcactccagccttggcaacagagtgagactccatctcaaaaaaaaaaaaaaaaaaaaaagaaagccaataaacatgtgaagatatgttcaaactcaatagcaatcagctgttccttccaaagttccatagtttttcttaagtaagtacttctcagtttatcagggccctgaaatgactgttttgacctttttttttttttttttttgcagttttattaccgctttctagaaagaggattttctgagtttctcacttagccattctggaagtccttatccctatcttaaagagggggacataaggctggagatgttgtgtatcttgcctaagcccatatggccaggtaccagtatagttacgattggtagcctcaatcttagctgcacctgtacagccaagatgtgtacatcttggagccctagtgctccagctattcttgggcaacaaaagttacttagagatgtggattcattccatcaaatcatttagaaattacttcatacattctttcacagatgaaaatatttcatagtaattttttcctgttttggattccagtgtcttgttaggaaaagaagagagaatcgaccaatatgtgacattttatactcagttagatgaacctatagtaagtggaaagtggttagttttatttttgctacaccaaaatcttttaacataagaacatcttggagtctgtttagtgcttttactaacaatccactgcaaatttcctcaaaaagaaaatgaaatatgtgataaaaattaacatagtttggattatttttgtaatacagtttcaaacactcattttgttaccgtaagactaacccaaacataggaataagcatagaatgaatggtaaactatgtttttctctgtggtatggaatgatgatttcatactcctatgtccacagtttcttttgcgctgggtatttccactgttaacagaggaaattatagttacctgaaacagacactgacctctgttgtctccaggatgacgctctcccaagagaaggattctgtagtgattgtcttggttgcagatgtacgtatacaaaataaggagctctccttatcctcaccctatggtctccaaattcccttcctcaatggtaataatcattgtaccatgttgaaaactgttttcttaattttaaaaagctacccatagatgccttttttggataccagacaacatacttaatacttcttcgatactgctgagaaggaattaaatatgtaaatctaaaaggacaacataatggcttcatgtgggaaatataagattgctaaatttgaattgcatttaatatagaatccctgaatccctgcctactatatggctcagaagttatatttacaaacaaaattaaaattattaaaatcgatgctagtaataaaatgtgcccagtccaataagagtttggtatatgaatcaagagataatttgtattaagcaacaacacctatgattgagagactttcttatgcttgagagattgtagatgatttttatacacatttataacctgcattacatccctgtgaggtagctattactgtcctgattttagggataatggacctagatcttacagaaggtaagtaacttgcccagtaattaacagagcagattcaagcctagatctctctaatgaccccaaagatttccactgttcctaataccatttaaaactatatagtactgtgtgaatattagcaccataagactttttggagagaaatttggcaatgtgtgttaaatttaaatgtatatgtactttgtctcagaaattcaaattctgggaacttatcctaaggaaataatcaggcaagtgtataaaaacagtaaaaatggtggggcatggtggttcatgcctgtaattccagcactttatggtgctggggcaggaagatcacttgagctcaggagtctgaaatcagcctgggcaacatagcgagacccccatctctactaaaaaaaaaaaatgcttagctagaaatgatggtgtgcacctgtagtcccagctacttggaaggctgcagcaggaggatcatttgagcccaggaggtagagcctgtaatgagccatgattgcaccactgcactccagcctgggctacagagcgaggccctgtctcaaaaaacaaacaaatgaacaagcaaacaaaaaccagtaaaaatatggcagtatagtatggaagttgagaacagactctggatttagaagtccaaggttaaaatgtcagcttctctacttcccaaccagtgaacttgagcaacttacttaattcatctatgcctcattttcttttatctctaaaattgtgataatcatattgcctatgccataaggttgttgggggatgaaattagctaatatatttaaagtacttagagtgatgtgtggcacatagtaagtgctcaataaataattatttcaggattttcagtgcattgttgggttatgaaagcataatattggaaacaaccaaaatatctacccataagaggctgataaaataccttgctatatatctccacaatgcaatactcgatagtcattgaaagaagaatgaatatctgtactcactgatacaaagtgatgttcatgtcctattgttaagtgaaaaaaagctgtaaagcatcatgtttaacataatgttatcattatgttaaataggaatgaaggaaagaaggaaaagatggagggaggggaaaatatatagaaacaaatgaaatatatgaagaaaaaagaaaatgagcaaactttggaatgatataaagatatcatcaatataaataatggttatctctaaatgctgggattaagaagaacctttattatcttttctttattctttttgttattgcttgaattttctataataaagatgtctttgaatgcagaaaaaactcgaaacagaacaagcaatagaagaactattagaaaaatagaaatgaaagattaaaatcattgcatcccagtttaatttattaatattaaaagaaagtatgcacataatctccaaaatgtttcatcctattgccttattttatatattagaatccttacttatttgctgttagcacaacccatgtctgtctaaaatgtttagatttgtaataaaacattggaggaagatttttaaatggaatataaaatgcttacgaaatatgactttgacgccgtgtttaaaatacaatatgtttcagtgtgagacaaatagctaatgattcaatttatggttaagagcctccagtactataagagatttatctacatcatgtctgctatttttaaacaagaaacctgagtacatacatctagagttgcctttcagagtactcagattcaacaacagaactgtgattgttcaaaatattttcaaaattttgtgttggaaatgcttatgggccctgaggctacatcttgtaaatgccacgttatttttttaaaaattatcccaagagggtaaaccatcaaaagctttttgcaggagtctgtcatctaatctagcgcactgttcaatgaagagcaggtccacaaagtttattgtcaggaaggcaaattggaatcaagctgagtaatactgtctggagaaatatgatgtaattttgaagtaggcttattgtcatataatactcaggaaatgaagagtagttttcaaaaggagtagttgtttgaaataagccattcacagatgaccatttttagactaaaaacatctttagatatataatattttatgtaatcttatatatctaaaaagtatataaatttaagggtaaattttggattgtaatatttcacattgtggcaaagggaaaagaatgaaatatttcctgtattcaagtcaaattttttaagaacatggatatttttaaatcttttaatagaaagtaaaaacactaaaaattattagtatgcaatagcatttcacacacaaattagatttatatgtagcaaaagaagttgtattaatagaactatgagacatgcttagtttcagtaaaatatttttctcatttttagagtaatgaagattatttacattctgttgttaaaatgattacaaaaaagtaagtactgtctgatatatttttacattagccattctttcatttttctatcttattttttctgtccaattgtataattattttcttagtgatcatattctttttaatgagtatagctggcagaaagaacctgtagtcctttctaagctgtgatgaagtatggcttaatggttttcccaattttgctggatatctaccaattagaatttatatttttcatgttatactgtttatcctgcatgataaccattggtaccgagagaagcccattgagttatttttaaaacattcctgtatcctttactgtatgaagttacttcaccacttctgcttataatctccttcagctgtaagcagccgaagcacgtacggattaaccaatatgaagctctttatcaagcaagatgctgtggaatggaccctgccttccaaatcctaagttcaaataggtgatacaacttgaaaaagaaacgaaaagaaaagagagagaaggaaggaaggaaggaaggaaggaaggaaggaaggaaggaaggaaggaaggaaggaaacaaaaaggagaaaggagaaacgaaaggaaaaggagggccaggcatggtgactcacacctgtaaggccagtactttgagaggccaaggtgggtggattgcttgagcccaggagttcgagatcagcctgggcaacatggccaaaccccgtctctactgaaaaaatggcccccaaaattaagccgagcctggtggtgtgcacctgtagtcctagctactagggaggctgaagtggaaggattgccagtgcctgggaggtggaggctttagtgagccaagatcatgccactgcactcctacctgagtgatagagggagactgtgtctcaaaaaaaaaaaaaaattataaaataaaggaaggaagaggctagcattgtcctagtggtgatggggaataaatatgacaacatgtagacgaagaggtatttaatttaactctacctgcaaatatcaagaaggactttcctgagaaggtaataattgagcagaatctgaaggaataagtagacattcttcaggcagacagggggaaaatgtcatgcctgataaatagaattgctgaggaaggcagagagaccaaaggagcatgctagacttttgaacatgtaagtctattttggaaatgggtatttggagttaaggcggaaggactggtgggagataaggcaggtgctgttgacatcacgcagggcctatgcaccatgctaagaaatatgcactctgtgctgtagaccagggctgcaaatgtggccttcaggctgaatctggctgacaggccgtgttttgtttagccagtaaagtgttttgctttgttttatttttcctcaccaaatagctctagtggctgaggcagttagttgttctagtcaaaacaattccagctagtaagtgtagaatgaatgaaattggagaatcaccgttttgaagcgcgtcattaagtgagagggttgggggaactttacgaggaaggtatgccggtcagtgtccgcacaggaaaactcctggtcgttcaaatagaggaaacaggcaatttcacacaaacaattggtcaaaacaagtttcagaggactgagagcacagaagggagaagaaagagcacacagcagcgggaaggagaggacattaaacccggggatcagaggccctggagataggcctcctcagcagctggaacctccgccaccgcgggagctgaaagaggaggcgcatccttggcttcgaccgccttccaggctcttgtcacttactgcttcccgcaggcagaggccaaccggtaccccgctagcaagggcgtcccgcaggacaggatgcactgcagagcagaggggtgcgatgtgcagtgtgagctgtgagcagccagggtccagggaccccaccctcacctccagcagctcggggtcgctgaaagtctggcgatggaaatgatgccaggaagaactattgagagttattcccccgacttaaacaaaacaacaaaacaaaaaaccctgaatgcaatcaagccttaggagctgaatttcagtttacaggatacacagcaaaaaaaggaagccatctggggcaaaacaatcaagaagtgggaccttctgtagaaaactgacccagagtctttaaaaagtggaatggggatgggggaagaaagaaaaatgacggttaccggtctagataataaattttaaaaagaaatagggataatcaattacaatgagcgaccttatttgggtacttgtttgagcgcctactcccccaaaataggcactttttagacgactggggacatttgaaaattgactaagtattatgtgatgttaagtaatcatttatagttttgcaaagtgtgaataataccattgtgcttattaaataaatgtcctttttaatattcacactgaagaatgtaagggcgaaatgatatccagcatttgttttaaaatacttaagcaaaaaaggggcagctgcgtagatgaaacaaacgtggcagaaaataaatgcttattgaaggaaactgatttggggttcattatatttctatttttgtggatgtttggtaatttttataatacatatttaaagaatgaatgtagactattatcagtaagttcaactgataggaagaaaagtcaaaacacctgtcttaagggacacaaatactgtttgggaggttttgaggtggaagcacctggagtttttacttgtgctgcagtagagagaggaggggctgatgaagcaaggcaggagggaactggagactcaggtggagggagctttagacagtactgagaccaaagaggagatgagagcaggtgaaagagtagaaaaattaatttgttgggggaaagacagtgtaatcatcttaaaaatccttttttaaagatttctcttttctctgtgaaggaggtaagcccctgtgttgagaaggagggattcattggcagtgaaggaacttagggtagtgaaggcttgaaataggtgatttatgtgaagggagagggattaaataaagattaaacaaaacaccatatacatgtagtttttcccctaaaagactccccaggaaaaaagttaccttatacttgaacccttaaaaaatcttctcatactcaaggatgccttctcagttgctttattctgaacaataaactactatttagagaagagaagacacattatcctgaagtggcttcaatctatgctagtttggtattcttataggagactcctgacagaatcaattaaaaagaaggcaaaggtgtaaaacaattcctgaagatatgaccgcatcattgtaagccttttgaagatcacttaaaaaaattagagtatgtggttacttgtaaagatctccaataaaaacattacctaatgtatgagaatacttctgatttgctacaaaattttcagagacaatgtcactggttttagaaattgccgtattgtagttagaattgaaaatcaaggatactggaaaactatgtcaggtgattcaaaaagtgattctagtggtgataattatattgataataccaatgcaggataaagagttagaataaaattattttttgtgaaagtagagtaaagcaataatttaaaatgtgaataatataatagtgaatattcactatttaatattcactatttttaatattcactattaaattataatagaataatttaatagtgaatattaaatttaaaacattatcaaaggtaatatagacatataacttttaaatttacatgtctaaacttttgcctattcaatttagctaaaaacccttttcctaggttttctcattagggtaatgagagattgttttatatttggattagtcctagattgaaactatataatttttaaaggactcatctatgtttgtatataacctcatatgaaactgtatataactatacactttacataaacctatagagttgtaagatttccactcttgtatgactataaggtaaaatcattcatttttaatggcaacaacctagagttatattattttctccagtcattggaaactagcaattcccatataattaagtcaagggcttttgatgctgtatataaataacctaacaagctataaaagttttagagagtcctagaaaggtgtcaacacacaaaatttcaagtatcttgcttaaaacagattgaataaaaccaagactggaatctttctctccaacatgactggggaattatatcatcaaagtagaaattgtaacgtaacttttggtgctttttggactttggatggaattttctagaggacaaaatttgtgtatctctgtaatctaaactttttgatgattgtgtatgctgcaacttgatgttatttccctttacctctactaaattgccgcacaagatcttgtagtttaaagttacacaaattcatttaaaaatttagatattatgttactaacttttaccacaaagcaaacaaccaaactctccattctttttttttctacgccagtattttctattccccaaggaacatattagaattcgttttttaaaaatcttttcatttgatatatcataaaatcagagggcagccagtaagactttcatccccttcactcctccacttatgctcccaccaaaataaatgaccaaaaacttttccactaatgtacagagcctgggaagaattccagcatgtattttgaacagttctttccccccaagtttttaagttactattccagttttacagatgaggaaattaaagatcagaaaaaataaattacttccttgaagttaggaagtaaaacaagcaaaattggcacagagacttttctaggtctaaaacccatattcgctctagcacaatatgctattccaaccccattttcgtgatacatacccattataaaacatgagctttcttccatgtgtgtttgtgtgtgtttatatatactcaggcaatccttgatttgcaagatagcatggggccatagaaatgattgtgcaagttgaaaccgtgcaagccaatattaacaaacaatgggaaaaaaatcacaattgttccatgacctttaaacgtatgttaaaacattactctctgtcaactataaatacatagaaaaatgaaaaatattgttaagctaatttattacactgtaatttaaaacattaaaattattgagtattaatgatttgatttcttttaaaaattttatcaagagtaatttaaatggtccttgcctttttcttatcacagaacttaaaatactgagcaaatgtcttttctatgcttcagcaaattgttatactcctttctaagtttggatcagttccagcattttatcatttgtgttttcaatgtcatgaaatatctctgagagttcctttaatgtgaagtttttcagcagcatcatttcctatgtgacataatttcaccacaaccatttttcttatttgtcagttaggttcaccttcactaagttccctttgttgcatctctagagtctctcaaatagaggaggtgtcaacattcccatgatcagctcttttacggcacatccaaattcactaccagcattcaccttctgcactttcatctgtcagccaatttcctctttggattacctacttttgttaaatatcatgtaggcttatcactgggaggcgaggcaagacaaccacatgttttgctgtcaacaggtgaactaaatagtagatgtacagtgaccagtcaccaaaagactttgaaagaagtgatgcaattagtcactaatgatgatgtgcatctgctatttatatagtgatttgtgcattgaagagctagcagtgaagtttgtactttacacaattgttcacaatatatcatgactacagtgttgttgtgggagactggtgttatttaactaaaacacagtaactgaagtttatacattcagaattgtacaaagcaaggactattttgcccataatggagattatgcatataaaactgtaagcttttaaattttttatgtagtacaaaataaacatttccttgaacctttaacatgttaataaataatgtaatgcctaaattccaatctcatttaaaatcacattatctctaaaggaagaccatttaaaattttctacttggtttcccatcctttaccttgatggtacaagatttatattggaatttttgtgatcatattttatgtagtttagtgatgaccttgttgatctatcacattaacgtttaaaaataaagatgctaaagagtacacatagtcctccaatgagtggtggacaagagtctgactaaatccttgcttgctggggtaatctagtttcaggagccacattgctattcagtaggactcttattaaattcaaaattatgcatttaaaaatcatcaaatattcttgctttcttgcagtcactgtgttctcataatccatgagtttcattgtttcaaatgtcagagtacacatctggctataaactttaaaaatgtcaaagtacctgtaatttttataagaagaaactaattttatattgtgtattttaatatgtctgttattaatttataaaaaaatgctttggctagttttatgatgctggtatcatgtatcaacatgtgaaataattcaaatcaaatattatgtggccatgcataagaaaattatttttaagtatttatgttattctggaaaattaaatattcaattataagtctgcatttacttctatttatagattcaaaaggcaagtgaggtctggatccttagaggtcatttcaatacctgcctttttatactcaagcatgttaaatgccaagcacttagctgaggcctcacaaaaattagccaggtatgtcatattagaaaatagtagccttaaataactaacttcatctgataaaatcttggaatcagctcatattagaaactatttcagacacagtggtgttctggagctggcttctactgggttgcaagacccaactatgtgcatcacttcccaactctgtattcaataacatcgagttgatagcattagccacagtaggagtatttataccgtggaaatgggcaaaagctacaaagcaggatgtccatccctccacccccaagtcagttgttaaacatttaccagcacaccactgatggtctatgttcacatttacagacaataattagcaaaggtataataatgaggagggggagagcctgggattataaatcattagagctggattctagtcccagctgtactgtttgctggtcattgtaggcaggtaatttcacctttttttcttagctttcctaactttctagtgtgtataatgacacctatattgcataattggaagagtcattatgagaataaaatacatttgtgaaagaatcttaaaaaattaaaagctctatacacatacaaaggattataatttggggtattagtgtggtaagtattatgggaaatgtaataatttggtccctcaaaacttaataaagaaaaagacatgccagaaatcagaaaaaggtcttatcccaggaaactgattagccttcttttgtgttaaaattataaatggtgtgtcagaatctaggaatcttttaagcgttttgttttgcttttaattagtggtccacattatgcccagtttttagagtcacaaaggtgggagtcatcctggatctttgtttttccttcagccttttatatctctgtcattgtttcttttttaaaatctctctacacattgtccctctcatcctccttccattggcttggatttagttcaggccttcaccattacagagtccctactcctagcctaacctagcctctcttacaattcattcttcatgctgtacccagaagaatattttctcatatgagatcaagtccaaagtttcccacatatcataaaatatccttcatgatctggtctgccaaccttgcaatcattaacttccttctgtcagctctctgtgccctaaaactaagtggcatgctcttccaccctttccacaactttgaaaacttactgtaagatagccaacattgttgatatcttcacgtagcacttatctaattgttataattttattattttttttcatatgaggttatgagacacagaagggcaagaatgaccttgggtactgctttttttatattcaggacctggtctggtttctagcttagtatgagaaaaaagtttctttgggtgagtttatatccaggcaaccctacgagcagggatgagctcttgccccagactacaagcctccccactgagaaagcaagcagggctctcatgcctcacccctccctgcctgcccacaccttcgcacctttggcagtggcttctgtgctcatatctgcatttcccattcaccctgcccccagattatgctcaagaaaatttgtgctcagtcaaaattattacaaagttcagctaggagtttccttcaccctgtgacccctccccagttccactggctgccttcccttccccaaagaactctgtgagataaggccaggaatgacgtccctgggctggggttggggaccaggagtgcctacagggctcttcccactgcttcgtctacttttatatttctcttggcttcctaaatccatttcagctctaggtaaggctaaatccttctctcgtgttctggattttcaggttcctcagtggggatgtgtgtatggaggccaacttttccccccttacactttgggaactcgcagtttttcagccatctcacagaggttgcagtggcaagccagttctttcaaagggtttgtgaattctttaggttttcctggtatgttgctgcagtgtttcttgaagcaaacgttcacaatgtgagtctccaggcactgttctgcctggccaagcaggagctgcgcattagtcctgtctcctatccgccatttttttgctataattctctccttaattcttttcagttatcattcaaaatttttgactccctagagttcaaattgccccaaatttggccacaatcaatccgctggagagtagtaattcatacaattactccattccctaggattgggagagttggggcaatgtgtgctcacgcatttcatcagaggccaaacataaagtcactttgtgaagggagttaacattgggtttcttcaagaggaccatgaagagttccagagcttgtggagactactttcaaaataaaaacaaaaaaagccacctttcctttccaagtaaaccaaggggtaagacttaggggaaatggtttaaagacccgtaaaaagaaatattaatactctgtagcagatagttaaccctaagaattggggagaaaactcttggatgatagaatcaataaagaaagctgttagtagagacattgaaaaaagaataaagtttctttatactttcatttgaacaagacctaaaatcagaaagaatattaacactattatctagatcaaaacttatctagatagaaatgtaaaacaaatgggttgtgcttatcctggtttagcaatggtagacactgttcattgaataaagatggaaaactttttagtataagatattcaattttacttaattgaaattaattaagtaaaattagttacttaattgtagctagtactgttagtaaactgccaaagagttttttaattactaaagtatgcttataaataaaaattaataatgacaaatattaacagatcttattgattacctttagttggcgaatcaaacaggtattggatttttgcattttgttgctgtatgcccaacccaaggccaagtattatttacaggtcagaaattgtgtgtgtgtgtgtgtgtgtgtgtgtgtgtgtgtgtgtatacaccaattatatctgtagatagatataatttaaattgaaagtgttactttctccctccttcctataatttcttcttcctcattgtattcctccaccttactttatattcagaaaatagaaaatactcactgtattaaaatgccaaaggaagtttaaaattgattatatatgaatattcttactaggttcactgttacagagaaaattatagttacctgaagcaaactgaaaagaaaatctcaaaaaaacgaaattgtatgcctatatttatttcttggcttacaattttattagattaagcaaatgcattttaagcatttgtcagacattgtatacacttatcattgctaccctaaatttactcataatactttatgagtaacacagttctcagtgccttactgtatttgtaaaagtaaataacttatatatagtttgtaccctataaatctctccacattgttaaataataatgttgtgtttctaaatagtaagtatggaccacactacatagacaatgtgctctcattcaaagaatttgcagaagagagttgtagactagagagaaagttagagaaaggcctaaagcaaggtcttctctttcattggaagaaaaaaaaggtctcttttgattcctagttagtggcaatgtcatgaaaacacaagatccagccaatgtactcttcccaatttgaaacaccacagttctattctgtgtcctcatagtgtgcctgaggactgccacatttttcttgattacttatgaggccctcttagtctacagattatgcataatatatattaaataaaaaagaaaactcatttccattgccctgtctctcttatggaggatatttttaggcttacaccattattctaaccagctagttgtggagttgtggatgagagtgctggttgctttttggcttctctttgctgggaactatctggagatagaacgtggcacctttcatcacaagcataaagctacttagtcttagctatggtctgaatgtttgcatctctcccaaagcctcccaaagttttgtttttgtttttttgtttgttttgttttgtttttgagacaatgtcttgctctatcgcccaggttggagtgcagtggcacaatcgcggctcactgaagcctcaagtagctgggactacaggtgcacaccacaacacccgactaattttttgtagtttttatataggcagggtttggccatgttgcccaggctggtctcaaactcctgggctcaagcaatctgcctgcctcatcctcccaaagtgcttggactataggcgtgagccacggctcctggcctccctcccaaaattaatatgttaaaattctcacccccaaggtgatagtatttggaggtggagcctgtgggagacaattagattatgcaggcagagcctcataaatgggattcgtgcccttataaaagatacctcagagagctagctagccccttttactgtgaggacacagtggaagacatcatctatgaggaataggccttcagcagacataagcctgctagcaccttgttcttggccttcccaggctccaggactatgaaatataaatgtttgttgtttataaactacccattctatggtattttgttataacagctcaaatggactaagacagtcttaaactagaaactgaagtatttgtgaggatgaaagtggatttagataaagagactctttcaaagagggatttagatggaatgtttagtatttaggaaagaaacagatactctcttgtctggttaatctcagaatcaaacatggagcagggtgtggtgtctcatacctgtaatctcggcactttgggaggccaaggcgggaggctcacttgagcccaggagttgggaggccaaggcaggaggatcgcttgagcccaggaattcgaaaccagcctgggcagcatggtaaaaccctatctctacaaataatgtaaaaattagccagacatggtggcacgtgcctgcagtcacgcaactgcactccagcctgggtaacagagtgagaccctgtctcaaaaaaaaaaaaaaaaaaaaaaaggaaatcaactaactgtaaataccttcaattaattgaaactgaaataaaattattattttataaaaccattttcttcagtatattcagttgtattttttattttcaagctaatatagctttactcaatggaagcgtcaaagatattaatgtctttttgggttttttttttcagctagaagatgatatcatagctaaagagatgtactttacaaaaataacagattttgtaggtaatatcagttcaaataattggttttttattgagttttcaatgcttggattcataggtaagcaatggatttactttgttggatcaagttttttagcacacaataatttaaaacattttaaacagtttatcagtttgtttattactaaatgaaaaagaatggcatgatttttataaagacactattatcttaacagtataatcagatgcaagtacctaaattccagataatgtattttcttaaccaaacttttttctagagagatcaaattgacatttagacacataagtcatagaaacataaaagagttaccatttattaaatgcttgctgtgagtctggcacacatgttagctgagtagctaagatgtacttttctctgctttacaagaatactgaaactcagataattaaaattgtagagaaagggactttaactcagtcgctgcaatttccagtatgctaaagctgacagtcttaaaaaatataaaaacataataaaaattatacccaccacagaaaatttccaaatactatacccattatgagatcttttttactacccttccttagattttccttttaaatccttcaatttttctttcttcacttccatgcttttttctttcctttgaacctcaagtattaccatactgcttatattatggtgcatgacattattgattcatacaggagctcttccttatgtattctttccttttattcccaatccctacaccctcttcctgccactcttcaatatattgttcactctaatatgttcaaaatacacttataaatatacaatatccatgtgaaatatttggtgcttttcatgtttgtatattcctattccttacatttttgtcctcaaaacttgatttctaaattatcagcatgttgttttatgttcatttagtttattggttttttactgctacataagtgctgcataatgatggtcactgaaatttatgcattcagaattgtgcaaagtgaggactacctgttttgcacatagagatcatgcatataaaactgtaacctgcttttaatttttttacgtcaacaatcccatgatcagctgtcttatagtcacatccaaattcacttccagcattcactgtctgtgctttcatctgtcatccagttctttcttttgattacctacttttgttaaatgtcatgtggatttatcatcagaaggcaaggcaaggcaaccacacgttttgctgtctacaagtgaactaaatctggatgcacagtgacccatcaccaaaagactttgaaagaagtgatgacttatcacttatcactcacatttggcttatctatttcctgagtggcagaccttaattgcttccaattttctgctgccatgaaaaaatgaagtgacatatatgtcccctagagtggaccactgaggattcacatagctctaagtactgccaattgctttacagattggttatacggtttacgctctcataagcagtgcgtaaaagttcgtgcttccccatatgcttgacaacacttggttttatctattattatatgtatatatttgccattctcagtataaagcatttctgggattgctagtgagatccatctgtttttcatatactcactcgatgacttttgtttttcatgttttctgtaaaattttaagggcccaaaggtttttcctcagccttggttaaaataagaaggaaaattattgttaacagtaatacccaaagtaaggcatgcagacaaagtaatcttgctgatggattagtctgagaatttaaaattctcaaaaaaatttatctttctcagcaaagtcaagtaagagacacatagagaatgcttacattctgatcacaagagcacattgaacaaggagcactatttatgggatgccaaatcttattcaagttttaacttacaaaagtttttcttttagttatcataatagcaattcggttattcattatttgctaaaaatatgagcttgccaactagaattttacagcatggtgacagcaggttaggaattgaatcagctattttatacatcattaaatcacttgctttggttactacataaataggtgcaaaaaattaaaaaattaaaatacaattatacattttattaagtgactcatataaacttaagttctagtgaagaatgaagcatgcttacatccgactttcatatttatcaaatcattagatgtattttacattatttactttgaagtgaatatgtacctgaatcttatcccttcaacttcattttaaaattaaagatgcagtatataagaaaaaaactattagacctaatggaataatatttaaaaatatagtaaatctttaagaataacaaatataaaagaaaaataacatcctgttaaaataatgctcaaatactgaaatgagagtactttaataaaattaagtactaacaacgaaaaatgtagtagattgataaagtgctacaaaaatcaggtaaaaaatacagtttgtacaaaattaagtaaaagattacaacgcctatatatttcattctattcacttgtctttcacttgatttagacaatcaatcctcatgagttatcacaattgatttcctgagagtattgactattctaaacctgcttatattctccttcagatgtggtaatccttaatacttaagcagatatagtgtttaattttatcattgtctaacttcagcagtgctttaatctttatttctaaggaatgggacatatttaaattttaataacttttgctttttcccatgttaaaggaatgaacaactacatatgaattatttgcatctaattgtatttttttccataggaaagctgtttagatctgaggacttaactcactttgtacggttttttttaatgttctacaaagagaaacccatagactggctcttgaatgacatttttcaggtaaaggtgtgtgacgcaggagaagatcttgtgagtatttactttatgaataccaaatattttaggaaaaatattatctatccaacgtaattacctaaaatttgtttaccaaaccaaatctgataaatgcaccaatttttaaaatttctaatatcccaaattttgatctttctacctattaaatgaagtaatgagagacccctaaaatgcagtgaaaagtagaaacagagggacaaaaacagagtgaacaaatagaaaaaaaaatgatagacgtaaattcaaacatgccaatacttacattaaatataaatgattaaaatacactattaagagttcatcagggtagatttttcaaatgatgcaactactgaagtcaatactcagttcaaatattatagataggttaaaacttgtggatgaaaaaaatatataccatacaaacacaaatcaaaggagatttgcagtagtagctatttatttatttattgagactcattctgtagcccaggctggattgcagtggcacaatcacagctcactgcagcctcaacctccctgggctcaggtgatcctcccacctcagcctcctcagtaactgggactataggtgcacgccaccatgcccagctaatttttgtattttatgcagagacaggtttttgccatgttgcccaggctggtctaaagctcctaggctcaagccatcagcccacgttgccctccaaaagtgttgagattacaggcataagccacaatgcccagcttgtagtagctatattaatatcagaatacacttaaaagcaaagaaaaaaacagtctagggatcaagaaagatgttatatataataaaagggttaatttaccaagaagacaacagagtcttgaaatacatgaagcaaaaactgacagaactaaaagaaaaaatagaccgatctacaattacagttggagatttcaactgtcctctctctcagtgatcaacagaactgataggcagaaacccagcaaggagacaaaagaactgaacaacaccatctgccaactggatttaattgacatttaaaaaccactacatccaataacagtagaaaatacattctcaaaaaacagatacaacattcaccaaaatagccacatcttggatcataaaacaaagcttaacaaatttaaactgaaatgatttttaatgtatgttcttgtaccacaatagaatcaaattagaaatcaacaacataaagataactgaaaaatctcaagcacttggcaattaaacacttctcaataaaccctaggtgaaggaagaagtttcaaaggaaattagacaactctttgaaatgaatgaaaatacagtgttacaacgcttctggaatgcagctaaagcactgcttagagagaaagcttatagacttaaatctatatcttagaagagaagaaagatctcatattcataatctccacttctacattaacaaactagaaaaaagaagggcaaaataaaaagcaaaggaagagagggaagaaaataataatagtaaaagaaaacagcaaaattaaaagcataaaaataatagagaaaaccaataaaaccaaaaggtaattttttaaaaagagcaataaaactgctaagtttctaataagagtgacaaaaaatacaggttatcaacattagtaagaaagtgggagttccacagcatactccacagatactaaaaggattttccataagggaatactgcaggcacttccatgcatataaaagagcaacttaaaaatgaaatccaccaaaaattgtaagctatcaaaactcatccaaaatgaaattggtaatctgagtagtcctatatctactaaagaaattaaattattatttttaaatcctgaaaaggaaatttccatgtccaaagggtttaaaggtgcattctactaaacagagatgaaataataacaattgtatataataccttctccaaaatagaagaggaaagggtacatcccaattcttttcatgaagctggcattatcatgacatgaaaaccagacaaaaacagagcaaaaagggaaaccaaggccacatatcccccaagtatatagacagaaaaatcttcccagtaatagtaaattgaatccagcaatatgtaaaaagaaaaatacaccatactaattggtatttatcctatgaatacaaaactggtttgtttgaaaatcatacagtgtaacccaccaatttaagattctgaagaagaaaagccacatgttaatatcaactgatgcagaaaaatcatttgacaaaattcaaaattcatacgtaataaaacctcccagccaattaggaatagaaagaaatgtctctgacatgttaaagagcatctagagaaatcccatagccaacttcatgtttaattgttgaaaactggatgctttctctctaagattaagaaaaaaataaccatgtccatcctcaccactcctattcaacattttactggaagttcaaaccagtgcaataaagggaaaaacaaaggcacgtgaattgaaaagcaaatgccatgattgtctatgtagaaaatcacaaagaataaacacacacacacacacacacacacacatacatcctagaactgataaatgggtttgagcaaagttgcaagatacaaggtctatacacacaaaactccatcatttttctgcaaaatagcaatgaaaagttgaaaaccaaatgtattagtccattttcacactgctataagtaactacctgagactgggtaatttataaagaaaagaggcttaattgattcacagttctgcatggctagggaggcctcagaaaacttacaatcatgacagaaggtgaagaggaggcaagggacatcttacatggcagcaggagagagaaagccagggggtaattgccacacataaaaccattagatctcatgagaactcactcactttcatgagaacagcatgggggaaatttaccccatgatccaatcacctctcaccaactccctcccctgaaatgtaagaattacaatttgacatgaaatttgggtggggacacagagacaaaccatctcaccaacattttaaaattacttacaatatttaaaaaacattatatataaaatatttatatatctatatgtgtatacatttaacaaaatatgtatattgtctatatgctggacaccttaaaatgctaataaaaagaacagagagacataccatgatcatagattgggaagctcaacctagtaaaggtatgaatgttaccctaattggtctatggatgtaacacaattctaatcaaaatctcagcaggaattttttggtagatattctaccaaagctgattctagaatttttaagagaagacaaacgaaatagatctactaaaatagttttgaaaaagaagaataaagttgggaaaatcacattattcaatctgaaagcttactacaaagctacagtaatcaagacaagccacctttattggcaaaaggataagcataaagttccatggagcagaataggcagtccagaaataggcccacaaaatataacgaactgatattttacaaagtgtatgcaattcaatggagaaagaataatcttatcacaaatgtttactggatcaattggtgccatatctctcaaccataatgcgacctaaacctcacactttatacaaacattatttcaaaataaatcatctatctaaacacaaaaaatcatctatctaaacactaaaactcttggaagaaaatatagaaaaaatgttcaggacctagggctgggtgaaatttttttaaatgacactaaaagcatttttaaaaattgataaattggacctcatcaaaattaaaaatttttgtgctgcaaaaggtactgttaagaggataagacaccacagactaggagaaaatatttgtaaattccatatccaacaaaggacatgtattcagtatatgtatagaactctcaaaacaggtaagcaactcaatttttaaaagggcaaaagatttgaacagacactatccagactccataaaagtagtgattgtccttacagcaatatgaaataagctcagctttatcaacaggttgttttgagggtgtatttgcaaagccattattttatatgctaaactgtaactcctcaaccaattttatctgatgctaatttagtttcaaattaaattaactctagaccattaaattactttacagttaaaagagaaactgttaatatttcctatgtattagtactgggtagaaatgcatctaaataaatgtgttatgtaaaaaattactatatatatacattttagatttatttttctgaatcttctatgtataaaaatatataaaataattctcagtgatcatcattatttcaaatgtttgtggggtttttattgtttgttttgtttttgtttttgttttttaaaaatggagtctcactatattgcccaaggtggtctcaaactcctgagcaatcctcccacctcacctctcaaagtgctgagattacaggcataagccactgtgcctggccttcaaatgtttgtttttaataggagtggtgccataggtcatccttcttttttttttttttttttgagaaaattatccagattctttttcattgactataaattggttctttgttttaatattatattttttactctctaagaagaaattgaggtgatataattcaataaagaaattagtcaatgaatataggaagtgaaagaatgctgtagtctgacagatatggatagaaaaataacaagcattttatttgagttattgtaattaaaagaaagagaggaaatataattggtacaacactaacctgcttttctaagacagagttcatgcaaatacatgttgtaatgaaaacccttttttaccccaactcctttgctctattcttatgaagaaaaagctaagaattaaatattttgtttatatttttaaatatgaaaatagaactctagcaaaaactaatatataaaaattctaccatcagtaaacgcaatacaaagcaatacctgggtttttacagaagattgttgtttctttttccccagagaaactgtatgaaacgaaagaagcaaatacgtattcagtataaaccttctcttttccagcatgtgggtatacattcatcattccctagaaaagaacaatatgaaaaagtaagattttgaaatgtaactttagtaacatacaatgttttataaacttataaaatactatttagaaaagaagtggtgacataagacactataaaatatggttgtttaagcagaattcatcttatgacagtactgtatgttgtgaagagcatttataaattaagcaatcatcttttaaagccccaagttatctatcatggtaagaagaattcagcctacataaactattttgccttactgttcccagttgtgcaattttaagaagactaaaaaagagttttgaaaattataataaagttcactcttttagtctaaaattcaaaattatactagaatatttcaaaaataaaatccctctactatttaatttaaatgtatcagaatttttatttcagaccactgttcgttttgccagatgaagaaaaatttagcgttgcttgaattttagtcattcttaaaattttgcatcattttcagatataatatttttgataattaacttagccccttagtgtagtagaagaaacaaggaattcaaggtcaaagcacctagttttcagtcctggtgaactagggagtacatatatgatattgggcaggctataacactcctctgagctttcttcatctataaaagcttcaaagagtttaaatgatccttcaggtttcttccaccctcgacacctctacccttagtgtctttacactgtgaaagaaatgcttgctttaatcctttgtcaactgaatgagaaatagacgtatacatcttcccatcattcatgactctccctctttctgctttttctactttgtgtattgtaatgcacggtttggaaccatgcctagaacataatgtgaactcagtaaatgttagctgttggctatcaagcaaggtggaatccaataaagaaaatgtgtccaacaagacaaatatgtgcctggaataatgaaaatgtaactgttgtgaatctttgtgcaaaaagtcacaccatcagaatgcatagctgtagatgtgatgcagaaatagattggtctataccattctcttttttgatgctattataacgggattctttcattatattttttggccagatatgatattttaacctcacctttgtaaattcatggcatattaagtaaatgtagacataaacattcatattttgatgttataatgctggcttttttccttttgatacctcacaccacacaaaatagaagtcaataacaatttaataatatgtcaaatgtgattatatttaaattatttgttaaatttttaacaggatgtctattaggagtttcatgtttctaaagctttaaaaagtatcaaaatcattctttggaaataatgacataataagaattagactatttctcaactttcttaagcgactacatcatattttaaaatattaatccttcaataaagtggcaagtataagaaaattggtataaatatatagacaatcatcagatatttattaatttaattttaagttattacattctatgaatgttcaacttttgttgctgtgtttcccttaatattcatttctttaagtctttttaaaaaacttttgggtaaaatttgttctttaactagttaaattttgttttacccttatgataaaactttttttttttgagaaggagtctcactctgttgcccagcctggggtgcagtggcacgatcttggctcactgcaagctctgcctcccaggttcacgccattctcctgcctcagcctcccaagtagctgggactacaggtggccaccaccatgccgggctaacttttttatatttttagtagagacggggtttcaccgtgttagccaggatggtcttgatctcctgaccttgtgatctgcctgtctcagcctcccaaagcactgggattacaggtgtgagccatcatgcctggccatgataaaattttttaaatgtaagataaattttctacagttttattaagcagaaaaataattttatttatctctattcatctagcttgtagttcaaaaaataataacttaataaaacaaaaatatgcctttttagtgatgaactttcttaaatagtttttaaattttttgaaatttgcctagattgtcagtttaaatgctttttatcatttcatattctatgtctatgataaacatacaaatttcttttggaaacaaaatatttccacatttgttaacaaaaccatactttctgaaaattcaaataaaaacttaaaagaaagttttttgcttaattgataagctaatcgtgtgtatttctatgattttctacctctccattgtatacaaaaagtcattttccatttattacagtgcactgggcatagggccaattatttaaatgtactgccagtagggttgccagataaaatacaggacacccaattaactttgaatttcagttaaacaacgactttttttcatgtatgtctcatttgttttgttgttgtagtagttgttgctaaatctaccaagcctagttggaggtgatgaaggggcagggagtagaagatacttcccataaaaatgctttaactgaaaagaatacccacactcagagaagaaaggatcagcacaagaactccagcaactcaaatgaccagagtgtcttctgtcctgcaaatgaccacactagttctctagcaaaggctcttaatcaggctgaaatggctgaaatgacagaaataaaattcaggatatggatagaaatgaagatcttcaagattcaggagaatgttaatacttaatccaatgaatctaagaatcaaaatataacaatacaggagctgacagataaaataaccagtataaaaaataatctaactgacctgatagagctgaaaaacacactacaagaatatcctaatgaacttgtaagtattaacagtagaacagacaaagctgaggaaagaatctcagagcttgaagactggcctcctgaaataagatagtcaaaaataaacaaaaagagtgaaaaaagaataaacaaagcctccaagaaatatgagattatgtacacaggccagatctatgaatcactagcatcaccgaataagacagggagaaagccaacaacttggaaaatttatttcagtatattgtccatgaaagcttctccaccctcgctagagaggacaacattcaaattcaggaaatgcagagaacccctgcaagatattagaagatcatccacaggacacataattatccgatttacggaagtcaaaatgaaagaaagaatgctaaaggcagccagacagaaagggcaggtaacctgtaaagggaaccccatcaggctaacagtagacctctcagttgaaaccctgcaagccagaagagattggaggcctatattcaacattctaaaagaaaaaatatcttcaaccaagaatttcatatccagccaaactaagcttcctaagcaaaggaggaataagatccttttcagacaagcaaatgctgagagaattcattaccaccagacctgccttacaaaacctcctgaaaggagcactaactatggaaaggaaggactgttaccagccaatgcaaaaacacatttaagtacacagaccagtgacattataaagcaaccacacaaacaggtttgcataataaccagctaacaacacaatgacaggatcaaatgcacacatattaatactaatcttgaatgtaaataggctaaatccctcacttaaaaggcagagtggcaagctggataaaaaagcaagtcttcaagagattggtatgctgtcttcaagagatccatctcacatacagtgactcttataagctcaaaataaatggatggagaaaaatctaccaacaaatggaaatcagaaaaaaggcagggattgcaatcctaatttcagaccaaacagactgtaaaccaacatcaaaaaagacaaagaagggattacataatagtaaggggttcaattccacaagaagagctaactatcctaaatatatatgcactaaactcaggagcacccagattcataaagcaagctctcagagacctacaaagagacgtagactgccatacataatagtggagactttaataccccactgacagtattatacagatcatcaaggcagaaaattaacaaaagatatttaggacctaaactcaacactcgaccaaatgaacataatatatacctacagaactctctgccccaaaacaagatatacattcttctcataaccacatggcacatactctaaaatcggccacaaaattggacataaaacaatcctcagcaaatgcaaaacaaaacctcaaaatcataccaaccatgctgtcagaccacagtacaataaaaatagaaatgaagactaagaaaattgctcaaaaccatacaattacatggaaattaaacaacctgctcctgaatgacttttgagtaaataatgaaattaaggcagaaattaagaagttctttgaaactaatgaggacaaaggtaaaacataccagaatttctgggacacagctaaggcagtgttaagagggaaatttataacactatatacccaaatcgaaaagctagaaagatctcaagttaacaatctaacatcacagctaaaaaaaaaaaaaaaaaaaaaaaaaaaaaaaaaaaaaaaactagagaagcaaaagcaaaccagctccaaagctaccagaatacaggaagtaaccaaaatcagagctgaactgaaggagactgagacatgaaaaaccattcaaaagatcaatgaatccaggagttggttcttcaaagaaattaataagacatatgaaccactagtttaattgtaataatgaagaaaagagaaaagattcaaataaacacaattagaaatgacaaaggagacattgccactgactctacagaaatacaaataaccataagagactgttatgaacacctctatgcacacaaactagaaaatttagaggaagtggataaattcctggatacatacactctctgaagacttaaccaggaagaaagtgaatccctgaatagaccaacaacaaactccaaaattgaatcagtaataaatagcctactgaaccaaaaaagcccaggaccagacagattcacagccaaattctattagatgtgcaaagaagacctggtaccattcccacagaaactattccaaaaaattgaaaaggagggactcctccctaagtcattctgtgaggctagcatcatcctgataccaaaacctggcagagacacaacaacaacaaaaaaacttcaggccaatatcctcaatgaacatcaatgcaaaaatccataataaaaaaccagcaaaccaaatccagcagcacatcaaaaagctaattgaccacaatcaagtaagctttatccctggcatgcaagattggttcaatatacacaaatcaataaatgtgattcatctcataaacaaaactaaagacaaaaaccacatgataggctttcaatggtactggtacaaaaacagacacataaaccaatggaacaaaatagagagcccagaaataatgccacacatctacagccatctgatcttcaacaaagctgacaaaaacaagcaatgggggaaaagacttcctattcaataaatggcgctgggataactggctggccgcgtgcagaagattgaaactggacaccttccttacaccatatacaaaaatcaactcaagttggattaaagccttaaatgtaaaacctgaaactataaaaaccctggaagataacctaggaaataccattctggacacaggaactgataaagatcatatgatgaagattccaaaaggaattgcaataaaaacaaaagttgacaaatagatctaattaaactaaagagcttctatatagcaaaagaaactattaacagagtaaacagacaacctacagaatgggagaaaatattttttaaaaactatgtatttgataaaagtctaatatccaggatctgtaaagaattcaaagttacaagcaaaaaacaaacaaccccattaaaaagtgggtaaaggacacaaacagatgctttttaaaagaagacatacatgcagccaagaagcatatgaaaaaaaatgctcagtatcactaagcattagagaaatgcaaactaaacccaaaccacagtgagataccatctcacaccagtcagaatggctatcattaaaaagtcaaaaaatagggctgggcatggtggctcatgcctgtaatcccagcactttgggaggctgaggtgggtggatcacctgaggtcaggagttcgagaccagcctggccaacatagtgaaaccccatctctactaaaaaaaatacaaacattagctgggcgtggtggcacgtgcctgtaattccagctacttgggaggccaaggccagagaattgcttgaacctaggaggcagaggttgcagtgggccaagatcgcaccattgcactccagcctcggcaacaagagcagaactccatatcaaaaaaaaaaaggcaaaaaataaaagatgctggtgaggttgcagagaaaaaagaacacttatacagtgctggcagagtgtaaattagttcaatcatcatggaaagcagtgtggcaattcctcaaataactaaaaacagaactatcatttgacccaacaatcccattactgggtatatacccaaaggaatacaaatcgttctaccataaagacacatgcacacatatgttcctctattcacaatagcaaagacacagaatcaacctaaatgcctatcagcgatagactggataaggaaaatgtggtacacatacaccatggaatactacacagccataaaaaagaacgagatcatgtcctttgcaggcacatggatgcagctggaggccatgattgttagtaaactaacacaggaacagaaatccaaacactgcatgttctcacctataagtagcagctaaatgatgagaacgcatggacacatagaggtgaatgacagatactggggcttacttgagggaggatggtaggaggaaggaaaggatcaggaaaaataactatcgggtactatgcttagtacctgggtagcaaaataagctgtacaccaaacccccgtgacacaaatttacctatataacaaacctacacatgtacccctgagcctaaaatgaaagcttttttaaaaaaaatactttaactgaattattacttaaggtcatgcccttgacttttattaaaggatgatatattagtacagtataacatttttgcattttcttcaaaactgttatttaaagttttatgattctcttttatgtgaaaatacatgcaacaattctcttttagaatttgatgctgggaaaagatatttctcaaaaaactgtcatgatttatttggttttgtgtggggttttttcccctttgactaacaagaaattcaaaactcatttcatatgatatgtagtatccatataatcttatattaaaagcagaatttcttcagtcctcattttaaatttaatctctggctttctctcatatattattattaaaggattattgtgttttcactttaaattaccctaaacctttactatagttttgttataaaaatcaaataaaataaatgttttaaactatttatatattacctacaatgttttgttggctgtaatgataatctgactataaagatttccccggaatcccacagatggaaatctgctttcaatcattttaacaacgtaagagtattaaaattggcattgtctaatacatcttgagaatcttatcttctctcaatataaagttaccttctctatataaaaagtgtgggtggtatcaaagaggatacaataaggaaataatatgattaagaaattgctatgaaaataatttcatctttatgaattaatatattatttctagatgttacattttttgttttcatttcagaaaatatgaagataaataagaagaaactctgtaatacctggaacctcagataaccttgatatctaatggcatgtttcagaaattgtagtaatgaaaatacataattatctagcagataagtaaacaatgcataaactagtagacttgaaagtactaaatgacttcttatgtcaagacaaggtagaacatttatattgcttttaccctattacaatttaatttaaaaatactaaaggcaaggaagttttttttaaattaagaactgcactttattgacttcgatagtgagaccatcacataatctcaataaacagttaaaagttcgaaagcttgctattgtcagggagaagtttggggtgaattggtatatgccgttatccattttgttaagacacctaaagaaatagaaagcacaaatttaaacaagcctggatctgacagtgccacaatgtcttcttgtctattaatagatgcatttaaaactataaacttatccctatgtgccatttgaaccgattatcaaacatcttgatatatatgtattcttatagtcatttagttctaaagatttcatagtttctctcatcattgccttcttaacacacagattatttgggagtttttttcccaaatatattggttttctccatcttttattgttaatttctaaattacttgcatagtggttatagaactttacctgtgtgataaaattttgagaattgttgtgaatccttgtgttccatatgactttggaaagaatgtatagtttctgtatactcccttttaaatatgttatattcatttgtttttaaaagtgttggttttgtgctttaaaaatatctcttaaaagtattcctatctattgggtgcaaaattctcttatatcaggctttctaatttggttgttgaaaacttttcactccttactaatttctatatgcttgatccatcagtttctacaggggcccattaaaatctatttttcttcttgatgttattctgtaaggtattacttattttgagcaataataagtgatatttatttgttatcctttaatcaaatattgtgaaattcttcatttcccattgttgccttattcttgagtgccaagatctcacacattcgcctcagtatgaactgtatcaaataccaatttataaagataatatgaaagacgaactatttctgtgtgtccatttcattctcacctttgagaagaaaataaggtattgtatgtatgttaaaaagattttaaatttgacttaaattttgaactttggaaattaaatctgccaaagcatagtcccggataatatgaagaattacaactaagtctaggaacagtatttcttgaaaagatagtaacattccttgaaaaggtgcttacttggacttcttatcctaccattgaagactagaacaaaatacctaaatgattaagaccataagctaggataaatactaaaagagcctatccaacattctgctgaatgtcaagagaaagctgagatgattccaagggaatgctgctgcggtgctcagaaagaggcatttgaaccctgactgagatacagcgagagtgaaagatgctagaagaaaaaagggggaagagagttaaagacagccttaaaagtccaacccaattaccattgtcattaaagaaatgattcttgattaagagtgggtggccagcacaaagtatttctagaaaatatttctaatgcagccaaaagagatgcccctaacttccgtcctcacccctgctgcttgcaaatgtggatgcttagaggatccatttaccatccatggcctttggtctgagatacatgaggaaggggagatttggagaaccccagacacttaatctggagtagagcaaagcaaatagtgcttcattggttggtttgggcatttgttttatagcatttatgctgattttgctttattaaaatcactcttcttcaaacctacatgaagacaaatgatgatgtataatagataagtttgtagaaaccagattctcctgaaatcttttttcataaatctacttttgaagcaaatagaagctctgcaaacattagagacataagtaaaattatctctattgccaaaatttatctctcaagtattgagataagaaagccacgaacacctgcattatttattattgactatatgaagtaaatagcaatgtagaaatattactactaataattagtaattaatagcaatagtcaatgtggctccactcttgggtagaggagaaagagacaccctctactaacataggtgtgtaaaaatgtctcagggttaattgtgtactcttgcatagacctttcaccctgtagtaggtttgtgacaattgtgaacaaatttaccaagataaatctgggcaggcattcccgtgggaacacatctccttgtgtttcctttttttaaaaacagccttggcttacatttttagacaccgtgttcattttaatggtaactctggtaatgaaatatgagaaaatttatataagctgacagatttttgttgtgctgatattagtcttctttctataaacccagataaaatgtatactttcttagaaaacagtttaccaaaattaatgccagtagagacagaaagcttaaactaaccaattttcatagaagaaatagagaaagttatcaagaaaaaacaaatgatcacaaagagacaacagacccagatagtcatctgcacagggaaattcaacccaacttttagagaccaaatagtcccaatatttttaaattgtttcaaagcatggcaaataaagaaaatttttaaattattttaatgatataaatataacatcagcacctaatcctggaaatggcagcaaaaaaaagaaaagtatagagcaatatcatttatgacaattgatgcgaagatctgaaatacaatttagaaatagattcccaagcaacattcaaaaaaaaaaacaccacaaccatgacttgatatttatacaaagaatgcaagaacctgttagcattctgttaggaaacctactattagagtgcacaatactaataggactaagaagaaaaatcacacggttacctccacagatgcttaaaaagcctttgaaaaaaattcaacttatgtcctattaaaaaaaagaaaattgcaatgaattagttcttaacgtgtggaaataaacactctcatacactgcttgtgggaataaaaaatgacacaattccatgtacctacaagacatcccagccattccactcctagttattcaagagacttgaataactctgtattaggccttttttgcattactataagggaatatctaagactgggtaatttataaagaaaagaggtttaattggctcatggttctgcaggctgtataaacatggcaccaacatctgctcagctcctgatgagggcctcagaaagttcacaatcatggcagaaggtgaaggggagccagcatgtcacatggtgagagcaagagcaacagagtgagaatggggaggttccagactcttaaacaaccataactcacatgaactgagaactcacttatcacaaaggagatagtgctaaaccattcatcagggatctgccaccatgatccagtcacctcccactaggccccacctccaacactggaaacacatttcaacatgagatatggaggggacaaacatttcaaccatatcagcatctttatttataacagccaaaaactaaaaacaatccaaatgtctattaagaggtgaatgtataaatagtttcatatctgtatggtggaatactactgaacaataaaaaggagcaaactatcgatgcacacaaacacatgtatggatctcagaatcattatgctgactgaaagaagccagagaaaaaaagagtacatgctatatagtttcatctatgtataattctacacatggcaatctaatcaataatgacagcaaacaaatctgtgattgcttagggatagagggcaaggaaaatttgggggtgattaatatgttcattatttttgtggtgtttcttgggtgtatatatgtcaaaagtcatcaaattgcatgtcactcaatatgtcacattgcaactaaatattttcccgaaatttagggttaatcctgtcactctgctgtttaaaataatctgatggttctatctgaagaataaagtttaattatctgccatgacattcaagctccttaataaactggccccaatgtactattcctgaatcattttctgacatttactttcatgcactctacatctaactaaaatggactagtttccattctccggatatctcatgctgtgaccatgatagccagaatatccatttcctctgcctttgtcacacagttctaatgtcacttctttgatgaagctttcatttaggaagaatgagtaacaacatactttatgctcccatagcattttgtctatgctactattatataatttctcatatattatagatatttggttatatgtctatttccctaactacattattagctatttgaaagcaggaaccacgtgtttgtcagtcaaaatttttgcacactgcctaggacacagaagatgctcaataaatgtttgttaagacttctagtaagaagtgaataaaagcacatgagccttccactctgaattcttattaatatattcattaaaatagataactaggtaccccctgaaacaacattccaaattgagaataagaattaaacacatatcagaaacttggagttttacatattttcacatcaatgggtcaggttaacaacctgtttagctcactttctgagctaaaacactaagactagaagcaagagtaggacttggctgatttaatgatagccgcaaacaaggaaggtgaggagcggagggaagcagaaagtaaagcagggtctcagtgtaaaaggcaaaaatgtcctcatgaaagtttcttagggaaaagctttttcttgatgcttgcttttacctctgtgtgccaattacattagatctagtggtattttaaaaagccttgtaactggtcttcaatgagaagaaccgtatgtgatggcattgttgtacttaccactagagaggaagcctagtggaaagcttcatctttccttcctccagtttcttgtcaatgcctttcattggctgaccccacagaaaccattaatgccatccataaaggccacctgcatgggtcacagagcaaagtggaagaggatagagactacatctagtggggcaaacagaaaatatttagcatatttcaccccctttgttagcatatattcttgttcatatatcttgccttggtgaaaaatgtattcacacaaaatccccagtaacatatcattatgaggtgatgccaagtcagttatactcttacctgaaacctaaaatcttagctaccacctgtgcttccacataagtagcaaaggaaaaaaaggaagccaaaggaaacagatcacgagacccattctgaggtttgtgatgagtcctgggttgattttcaaacttccttctttgataattcttttatggtcctcttaccctctcctgatagttgaatggaaggggttgtatgaaaattggtgtgactcaacttttcttcctgtagaatttgggtccttggtggatgtatcttccattgatcaatacagttgagtaaggacttactaagaagtgctaggttttagatacagttctctattgcccccattttgtaacagaaacctattttctccttggtaatcaagatcaatcacactgtatactaacctttcctgcctactggttaagcagtacagactgttaagaaacagccacacattctaatttaatggaactatgattgttccctcctcaaagcattcctccctggggcactgggacattcaaacccattgaactgaaagtcttgaggataagaacaaaaattgtgttcaggagaggatttgttgtaatgagagtggccacttccccctcacccttgtttcctacattggtcaccagattaagacatagtaaatccagtagatcagcaccccaatctcccagatgttattttcacgaggagctacaactgagtcttccaaaagccattccatcactctaacaaggcaacttcttttgggtgatgtggtacatagtcagactagtgaatccatgggggtaagaccattattgcacttccttctcataatatgtatttcttgttggaagccgtattgtgtgggctaccatggcaatggatgagatattctgtaagttcataaatggtagctctggcagaaagggaatagacaaatccacaaccagaatgtgtatttctcctctgaggacaaatagctgctttttccatcatgaaagcattccagatcctcaaaatactgctagacatctgcctgatccccataaaagataattccagcaagacttccacactggcctctgctgttgacagattgagaattcagttacactggtagctagatcaccctcatgaattaaagcccattttattaaatccatgcatggcctcaacacctgcctccatgaccactttgtatatggggcctttgagcttgcatttttggccagaaaagggggctgacgtggatattcttatccatctggattttgagaacctcctctgcagtggatacctgtaggggggctttatgtggaacatacatatcttcacactctgtgcccactccaagaaacccatccacaaacctctcttacaacctgcctcgcgatcagcatgtcattcttgttctttctacatcccgggtcagctagcctatctgctagtccacatattatgaagatctatattaaggctatctttctttccacatgagtggacaaccagaaattctgcccactggaatgatttcagctcacccctgcttttctaggacttccctgagtggggctgtaatgtagcaactgtccacttctcactgctacaaatatagcagggcagatccatccagaaaccaggtggtactttttccttcattgttaactggtcatagaggcctcttcatcaggccatagatgcagagtgagagagaaacaataaggaaccgtgtgaatctgagccatcagcatatgcagttttgttatgcttcctacacatgatcacatctgtccaattttgtgacttggtgaatcagattacctcaattcaggtcacttcatgtcttatgggcaggcattcagtgtttatgaagatccagtagtacaccaggagttgcttttcaagtggagaattgttgtcagcagaagagagcatctcttactgcaaaatcctagtggtatgttctgtgatcctcttattagaacttaacagaaattcctcaccatgtctttatcagccattgacacttctaatgccactgaatctcctgagtcataaggcccaagtacagggacactctttctgtagtctgaacctgtggcaagttacaggccccactcaaatatggaagttttacagatacccaggaaatgtgtcctagcaatctgtccaaatgtggtgtatgttatatcccaaatctgagtaggcctgccaggtgttgtgtctctttctttttggggggtggcccagggtacagcaacttgtttctcacgaggtgatatcttgtcatagccctcactccatggagcagggaacaaacacgggggattctgttagttactgcatatatttagccctattacatattctggaactagagaaatactacaggtagggggctgtgacttcactggactcctttggcatagggacttaggccaagactccatctagcatgtgacctccataaattcacaatctgaacataagtacatgacggtgcttggagtctttaggaattagtgtcagttcagaaacagtactttaaaaactctagaaggtctggatatttcccttcagctagtgcatagtcaccctggttgctctggggaaaatttggggaaagaatcataatatacatgactattgatgctgtaagctccttcctcaagaaaacagccttcccttagtacaaacgtgcgtccagtaactttgaatatctcattgaatgaatggttttctggaaaaaatatttaaaattatatagcagaaagtggaaaatctgagtaaatgaataataactcaggaaaattcaatgaaccaatccaccaaaacattaatgcccataaagttataataaacttttcaaaatctcaaaaaacaatataaaatttcatactatataaatgattccagggcatgagagaattcttaaaacttcctaattcattgtataaaataaacttaattctgttatcagattcaggcaagaaaaattatagactatctcaattatgcatacatatgtaaaaaggctaaagaaacttcataaatagaactgagaaacaaaataatggaataatcagttatgaaaaggttagtgtcttattctttttggctgctataacaaaatggcgtagactaggtggcttctaaactacagaaatttatttctcacagttctggaggctgggatgttcaagatcaaggtgctggtagatttggtgtctggtgagggattgcctcctcaaagatggcaccttctcactgtgtcttcacatgatgacaggggcagagagttcctggggccttacccttatgactttatcaccccctatagtcccggcctcctaataccagactgtgggggttaggatttcaacatatgaattttgaagcaacataaacattcagaccattgaagttgtctttattccccaaatgcaagattgtttcatattcaggaaatttatgtattaataatctcaacatgggttgaaaaggcatgtactggaattcaacattcatttctaactattaaaaactactgaaaaataaaaacaggaaattcatttcacacaaagaacagtattatactatgataatttttaatgttatttatttaattgtacaattaatgcataaatacatctttgttattaaaaaaaactattaccaaccaggcaaaagttctacctgacaaccaaccaaaatcccagtccttttcccagaaattatttctgatttcaatttggcgtgaatactactgtatattttcctatgcatttacatacatatgtacttattagaatatatggtattgctttggatttttaaaagcctttggttaaaatgccagttgatttttcactcaatatttgttacttaattttttctgtgtcaccaacatggatctaattctttctttttaacatcaacacaatattctaaaatatgaatagagcataatttatttagcatttcctcctctgatgcagaaattgatccattactatttaaatatttttttcagtgttacaacagtgtttcaatgtacattcttctgggtgcctacttgagcatagagtctttttcctagtttaaataatcagtagtggtactgctgactcaaaaggtatgaatattttttattttaacagatactgccaaattgccaccagaaatagccatatcaacatatatccccaagagtagtgtttgaaagcagcagttttcccaagtcttgccctttgctattagtgagctttgaaattgttgccagtctagtgaaagcagtattttgttatagtcttagtttgcctttctcaaattacaagtagggtttaaattttctcacatatttatatctttcctgattttttatttgagatggagtctcgctgtgtcgcccaggctagagtgcagtggcacaatctcggctcaccgcaagctccgcatcccaggttcacgccattctcctgcctcagcctcccgagtagctgggactacaggcgcccgccaccatgcccagctaatttttttttctatttttagtagagatggagtttcaccatgttagccaagatggtctcgatctcctgatctcgtgatctgcccgcctcggcctcccaatcctgatttttttaatgagctatttgtcttcttcttcttcatttaaatatgaggttcttaaaacacatacaggaacctaattaaactcctaaactaaatattaatagtttgtcataggctaaaattacttttctcagaaagtcttttgtcttaaacttattttgtattgtcttttgacatacaaaattttcaactttgagatagccaaatatattaataatttcttttatgactttttcacttttcgtattgtttaaaacaacctacctacccacatcaagcatatagtcccatatattatattataaaacttctataatttttaaagtttaggtctctatttccattaaaatagtgtgtgtgtgtgtgtgtgtgtgtgtgtgtaatggtagaaaatccaactctaaatctttccaccccaaatgtagagccagatggccccactgatttatatatttattagtccattttcatgctgctgataaagacatacctaagactgggcaatttacaatagaaagaggtttaatggacttacagttccacatcgctggagagatctcaaaatcatggcagaaggttaaagtcacacctcacatggtggcagacaagagaagagagcttgtgcaggaaaattcctgttttttttaaaccatcagatctcatgagagttattcactatcacaagaacagcatgggaaagacccacccccatgattcaattatctcccaccaggttcctcccatgagacttgggaactgtgggagttacaattcaagatgagatttaggtggggacacagccaaaccatatcattctgccctgtcccctccaaaatctgatgtcctcacatttcaaaaccaatcatccctttccaatagtccctcaaagtcttaactcatttcaacattaactcaaaagtctgcagtccaaagtctcatctgagacaaggcaagtcccttccacctatgagcctgtaaaatcaaaagcaagttagttacttcctagatacaatgggagtacaggcattgggtaaatacagccactacaaatgggagaaattggccaaaacaaaggggctacaagccccatgcaagtctgaaatccagcagggcagtcaaatcttaaagctctcctttgactccatgtctcacatccaggtcacgctgatgcaagaggtaggttcccacggtcttgggcagctgcacccctgtggctttgcaaagtatagcctctctcccagttgctttcacaggctggtgttgagtgtctgcagcttttcctggtgcacagcgcaagctgtcagtggatctaccattctggggtctggaggatggtggccctcttctgacagttccactaggtggtgccccacaaggactctgtgtggggggctctgaccccacatttcccttcagcactgccctagcagagcttctccatgagacccccgcccctgcagcaaacttccacctgggcatccaggcgtttccatacatcctatgaaatctaggtagaggttcctaaaccttaattctcaacttctgggtacccacaggctcaccacctggaagctgccaaggcttggggcttccaccctctgaagcagcagcctgagctgtacgttgaccccttttagccatggctggagcagctggaacacagagtaccaagtccctaggctgcacagagcagaggagccctgggcccagcccacaaaactgtcttttcctcctaggtctctggacctgtgatgagagtggctgacatgaagacctctgacatgccgtggagacattttcccattgtcgtgtggattaacatttggcttcttgttacttatgaaaatttctgcagtggagattttcatttctatcacattgtcaggctgcaaattttcaaaccttttattttctgtttcccttttaaaacggagtgcctctaatagcacccaagtcacctcttgagtgctttgctgcttagaaattttttacaccatatatcctaaatcatctccctcaagttcaaagttccacaaatatctaagacggggcaaaatgcagccagtctctttttttatatatgctgtgtggtatggattgaaaaatgtacttattacatgtgaatattcaattgtaccaccacaatttgttgaaaagactaggctttctctaccaactgcatgtgtacctatgttgaaaaccagttccccacactgtcttattctgttttgtgttgctataacagaacacctgggaatgggtaatttataaagaaaagagatttatttaactcacagtctggctagctgggaagttcaaggacatggctctggcttgtggtgaggcttttgtgctaggccaaaagatggcagagaaggtcaaaggggaagcagacgcatgcaaagagggaaaacctgaggggcacccagctttataacaacccattctcatgggaatgaatccagtctcgtcagagcaagaactcactcactactgcaatggcatcaagccacctacgaggacaggaccttcatgacccaaatacctcccattaggccccactttccagcactgccacactggggaccaaatttcaacatgagttttggttgggacaaaccaaccatatccaggccataatacatacacatgtaagtctatatagaatctattctgttccattgatttgtttgccttgatactaatactctttgataactctttgataactatagctgtatatcattctataaatcctaaagtcgggtagtgtttctgaggggggttatcttgagacacaagaaaaaaactcagcatgggctcattctgccaactatatagtttaaccagacgaattctgggaaaaacaatgatgactattgtcattactattatttactattgtttgatatttttgttaaagtaataaggaaaaaaacctcagaaaataagtataaatataagaaagaaaagatcattttctgccatagacataattatacatcttgaaaataaaagtcaacccactggaaatacttgtggaatactttgtttccttttctctattttctgcaccattaaaaagcacattcctaaacatatgaaaatatacaaacatttttaaagtattatttgaattatctaggttctgagtccactcattgtatttgagttaaaacttcattctgcatagctctttaatcctgataatcgaggcatttcctatattctgcatttttcaagtggcaaggtgttgtggaaagggcacaggctttgaatcctcactctgcatcttaagatctgtgtgaataagttatgtaactgatctgggtctatttcctcataagtaaaataaggatgatacctgtgggtcaattgcatatagcaacttgcacatagtagaacattaataaaacacagctctgattttgattacaaaacaggcttccaacaggacatcactctgttccatcaaggagcatgaacctttctgcttttttttttttttttttttttttttttttttgacacaatgtctcactctgccatccaagctggagtgcagtggcactatctgggctcactgcaacctctgcctcctgggctcatcccacctcagcttcctcccacctcagcttcccaggtagctaggactacaggcatgcaccaccatgcccagttaaattttttgtatttttttgtagagatggggtttcatcatgtttcccaggctggtctcaggcagctcggctcaagtgatctacctgcctcagcctctcaaagagctgggattacatgcatgagccaccatgccaggtcacctttcctgctttttatgtttttctagatttctgattactctagtccctccaatcttgattacattgccttggtctcttcccaaatctctcttcaactttgatgtgtcagaacacttcacgactctaccattcagcattacattctgggactcctccgcttgtattattaaacactacatcactctcaaaagccataccccttgtcttatttgcagattattctttctcctctgacattatcacattgtattattctgatgaaaagttgcctattaaacaaattataaatattatattcaatcatcctttcaataagtggcaaataattttggagatatgttaaggccttaaatttcaaggttagagattagatttcatgctgtgggtaatgaagggtcattggaaactattgaatgagctgaggattaaactacgaagtgtaggtgggaggctctgaaggggggcaactagttaggtaactctgaacaacagtttctaaagtagtgagaatctaaactagagaaatggcacagggactggagggggtgaggacctcttttagatgattttatggagttagagtttaatttatggaggcagtgaatgtagcagccaaagagtaaaaaaatgttctcaaggttttgagtactatgtgaccaagaagatactactaaatcttgcaaaaattcactattcttacatttttagttttcagcttcctcactgcaaactttgaatggatcctttaaaaaatccctctctagcagttcaagtgtatttgttatgggccacagaagtatgttgaataatagaagtcagaaggacggaagaaagaaataaagggtataatattgttacaaagtatctcaaacaaaatgtctttttaaccagtaaattttaacactatccaaacactctcccagagatgacaaagtcaaaagtttagaaatgctggtcttaattagtgaagcaatgtgaaaaaactcagtgatcttgacccctagccaataatgatacgttgtgcacggaatgccaccaaacccttaagattgaaactcttcaacaagggtcttagactcacaagtcaattaaatgttgttaattaatcttccaataaaattaaattgttataccaaattcaaagtcaagatttactataaaatattaagtagtaaaattaatattgatccaatatataaaaggcaaagcagcttgtgattgcataatcatagcataaactacgtttatgctaagatttatttcaatgtgtttgaaactacaggctctgagagagacaggcctgatttacatcccgtttccactgtttacatgttgtgtaacttcgagcaagttgccatcagtttcatcacctgggttgccacgaaggttaaacaatgaatgtaagccccttagagcacaatgaacacaataaatgttagcagctcttattaatagtgttgttcgagagaaaaagaacatattgttttatatacaatgtatttattaacacttaacgcatctgtatttgtcatatacacacaccagacaggaaagctccttattaatcaccatgactgcagatctgttaacatctagaactctggagaaaacctagagccctaatcttgctgcacttattactggacgttgttcataaatatgatttacataaaattcaggacccaatcattgcgcaacaggaggtagcacggtctgcagagagggcgggagctcagaggaggaaaagtcttcggacttgcagggggaattcctcctgggctaacccgggagcggggtccaggccacaaccggccggcggcggcacaggctccatgtgcggctccccctggaggcggttgagcccctcggagcaggagcgcgtagcacacacctcgggccgccaccgcctcccgcccgccaccgcacgcgcacgcgcggttagtagtcgctgctgcgcggccgccggcgggactggtctgaagagacgcggggaccaagtggcaacgacttggacatctgagctgtcactgccgaaaacaggccgcaagagaggtgcgtgagcagcaggccgcgttcccgctgtcccgctgccctttgcgcgcagattggggtgaggaagcggagtcgttgctgcttcccccaggcaccccgttactttgccgccagagggctgaaccggtcggggccaagtgagggtggatgttgagtctggcgatggggctgcagcgagctagggtcttgactgggctctggcggccccgtgggtggacgcaggaggtggtgccacctgggaccctttgtgtcttcagcaccgccgcatccacctgctgcgcccgggctggggcggacgagcacggggacagctaggtgcctagcccggccggcctcccctgcgggcttgaggagccaccgggagccgaggccgttattccagcggttgccattgcagccccgttccacgcttgagcccggggcgctctcccaatggttgtagagggggcccggggcgcgtctgggcgctgctcactctgctgactgctccttacagaaacccaaacgagatcaaaataggctcggctgtctcagtctccacctatgtggaagcgaagggaccccacttcacggcggtggggccagggactgttggccgctccctcgatacccgcgcagagcccattgtgcgccgccggggggcgggcgaaagggctgggttgaatccagagaggccctaattactagactcattatcgccccaggcctgtttaccatcaatcagacactttcgctgattttatttatagcatctgcccaagcaacaaagaggaggtgtttgcttgggagttaaaagcaaatggcaaccaaagctcaggactgggagagaaaaggtaaataacgtggccacaggaagaagtctcaaattagaaaagagttcattaacgtataaactttttgttgcttaaaagcaggcaaaatcccgatctcatctgatgattttgcttgttttacaaatgtcgacatcactcgaggtagccctcctttgggtcattgtaagtttgacctgttttcagtttggagttttgccttcacgtcttattggtttgatcttccagtaacatttagatctcatctccaaatcctcagaacaagatattctgtactctctgtcttagctagttgataaggttaattattgtgtgtaaatgatgtaagtatgttgatgcatttgtctagaaattgaagtgttgtaagttagctgtagtactttttaagtacctaataaatactggtgtttttaaatagaaaactagaattatgaactttaaagaatctttggattgtctagttcacgtcacaaatgagaaaacaggcccacagcagtttttatcacttgtctttttaataataaaactagaaacttggtgcgattgtgccatgttgggtgtactttttattatatcattctacattgcattcctgaagccacatgacaactaaaactttaagtaataggtgattgtcaaacaccacttctggaatataccagtgttggtcggatcctcagtcagccattaaaactgaataacagcagaaaggcatcgcagttataagaaatagcatgtacaaaaagtgtgttaaataggtgtgttgagagtgaaagaaggcccggcgcggtggctcacgcttgtaatcccagcactttgggaggccgaggcgggcggatcacctgaggttaggagttggagaccagcctgaccaatatggtgaaaccccgtctctactaaaaatacaaaaattagccgggcatagtggcgcgcgcctataatcccagctactcgggaggctgagacaggagaatcgcttgaaccaaggaggcagaggttgcagtgagccgagattgtgccactgcactccagcctgggtgacagagcaagactccatctcaaaaaaaaaaaaaaaaaaaaaaaaggaattacaaaaatgtgtcacagaaacataaagtgactatagtgttggaaaaatggcagctgtagacttgttcaatgcagtgttgccagaaaccttcaatttgtgaaaaatgcaataaatcaacgtgcagtaaaatgaggtatgcctgtatgtacacacacacacacacacacacacacacacacacacacaccctattgattctgcttctctgatgaactctgactaataaaatgactctcctccaagtaatgattcagggattctgcaacttcctaccttggaattttgccgttttcaaccatgaccttcaaaattgcttgcatcaaaccagaaggggaaagatcataaagaattataattcataattataggaagtttttatgggcaagggctgacaatggcatacaggtcttctatttacattctgttggctggaaccaggtaatggtcacatctagtgccaaggaaattacccttgtgatcagccagcaacttctcccacactatacaacacatattgcatatcctgtgattgtcttttctttgtgtgccttacttacctttgatgtgacagtgagcattacttcaataccagtacatgagctgcactttataatttgtaatttgggggtggtagtggagatccagtagggtttttaggagatattggtgtaattatttaaagtagaccagactacttgatctagatttcaaagattgggaagaatggtatctcattcatggataaagttacttgtgcttcaatttgttattgaactaccacagaagcagtgcagagaacatacatgagatcaaagatacgtgttggtgcagaaggatgtagttcttcagtgcctcccttcttatgaaggcacaactgatatttagtgatctcagcaagcctcatggagtgaggaatacataagaagcttggaaccctgggcatgctaccttttaatttataaggagggaagagggtgacattagcactaaatgttctaccctataccatataaacaaattcttgctgtactaaaattatataacttaaacaaccatacagatcaataaagaaatagataacaccacaagccaactaaacataataaacatatggacaacactgtacccaacaatagcagaacacacatttttcttaactgcacatagaacattctccaggatagaccatattagaccacaaaacaagtcttaatgaattttaaaagattgaaatcatacaaagtaagttttctgaacacaaaggaaaggaactagaaatcaatagtagaaggaaaacaagaaaaattcacaaatatgtggaaattaaacagcacactcttgaacaatgagccaaataagtctcaagaaaagttagaaaaacatcttgagacaaatgaaaaggagaacaaaagataccaaaacttatgggatacagtgaaagcagtgttaaaagggaaatttatagctttaagcacttacatgaaaaacaaaagatctcaagttaacaacctaacttacaccttgaggaactagaaaaagagcaaatgaaacccaaaagttagaagaaagagggaaataataaagattagagcagagagaaacaaaatagaaaatagaaaaacaagagagaaaacaagtgaaatcaagagttaattcttcgaaaaggtcaacaaaaaaattaacaaacctttagttagattaagaaaaatgagagaagactcaaataactaaaattggtaatgaaaggacattacatctgattctacagaaataagagggattataagagaatacgctgaaggattgtatggcaacaaattggataacctagattaaatggatacattcttagaaacacacactctatcaagattaatcatgaagaagtagaaaatctgaacagacctgtaactggtaaggagattgaatcagtaaacaaaaacttcccagcagataaaagcccaggactaggtggcttcactggtgagttctaccaaacattgaaagaattaacaccagtcctcctcaaattcttccgaaatattgaagaggagtaaacacttccagattcattctatgaagccagcataaccctgttatcaaagccaaagacactacaagaaaactacagagcaatattccagatgattattgatgcagaaattcttaacaaaatacttgacaacaaaattcagctgcatattaaaagagttatatactatgaccatgttggatttattcctaaaattcaaggatgattcaacataagaaaatcagtgtaccatgccacatttacaatgtagggaggggagaacacatgatcatctttattcatgcagaaaaagcatttgacatgattcaacactctttcataataaaaaacactcagtacactaggaatagaaggaaaccacctcaacatagtaaaggtcatatatgaaaagcccacagttaacatcagactaaatggtgaaagactgaaagcttttcctttaagatctagaataagacaaggatgcctgctttttccacttctcccgagccagagaaattagggaagaaaaagaaagaaaaaagacattcaaattgaaaaggaagaagtaaaattatctcagcagataacatgatcttatatgtatgtacaaaaccctaaagatttcacgaacacaatacaaaagtctgttagaaataataaatgaaggccaggcatggtggctcatgcctgtagtcccagcaattttggaggccaaggtagccagatcagttgagtctaggagtttaagaccagcctgcgcaacatggcaaaaaccatctctacagaaaaatacagaacattagctgggcatggtgatgcttgcctgtagtcccagctactcgagaggctgaagtggaggat

SEQ ID NO: 5650 - DNA, 270867 bp, Homo sapiens
  LOC442117 gene - 174105115 - 174335981 of chr4; NCBI Entrez Gene ID: 442117; Build 35; sequence includes 20,000 bases upstream of initiation codon and 20,000 bases downstream of termination codon of the gene
tgaccccctcttgggttcaattaattttctgtaacagctcacagaactcagggaaacatgtatttagtggtttgttataaagcaagcttgtccaatccgtgtctcacatgtggctcaggacaattttgaatgtggcccaacacaaattcacaaactttcttaaaatattatgagatttttttgcaattatttttttagctcgtcagctatcgtttgtgttagtgtattttatgtgtggcccaatataattcttcttccaatgtgacccagggaatccaaaaaattggacacccctgttataaaggattttgcaaaagatacagatgaagagatgtgcagggcaaggtgtgagggaaggggtgtagaacttctgtgccctcccggggtgtgtcactctccagggacctccatgtcttcagctatccaaaagcttccaggatccagtcctcttgggtttttatggaagcttcatgacatcagtattccttcccccaggatatagggcaggaaccttcctgggaaggactttagaaccagaatcagaaaggtgggggaagattagagtcctgccttggggcaggtaaaaagaggataggagaaagattctgtttcctaaggcctaacacacccaacattataacaaaagactctaactaaggctatgggagttatgagccaggaaccatggacaaaaaccaccatgtatcataagaccacgtgcaccaagcactatgctatggaaataaaaatgaatacgacatggtccctgacctcaaggagctcagattctgtgagaatccgaaatagttttttaacctccaataaaaactatgagtcaaaagcttcaattggtagaatgaagagagttgattgaacagaagcctggagacaggtgaaggttattcatccagggcgtctgcagaaaaagcttttggttctgagggcccagctgaggctgaagggttatctatttattgtggtccccatattcacaaatatattttcttcagcattcttatggagtgagttgtgtttccccaaagtcatatgctgaaggcctaaccccaatgtgactgtacttggagattggggcattaagaatgtaactcgggtgttgtatgaggtcatacaggtggacccctaatcccataggtgtcctagaaatttttctctctctgcccatgcacacacacagaggaaagaacatttgaggacacagagagaaggctgccacctgtgagccagaaagaaggacctcaccagaaactaacgccatggtgccttgatcttggactccagtttacagaactatgagaaataaatgtctgttaagcacccagtatgtagtattttatcatggcagctccagctgactaataaaagcatcagttctcacgcctgtagtcccagcactttgggaggccgaggcaggcgggatcacgaggtcaggagttcaagaccagcctggccaacatggtgaaactgcgtctctactaaaaatacaaaaaaaattagctgggcatggtgatgtgcacctgtaatcccagctactcagaggctgaggcaggagaattgcttgaactgggacctgggaggcagaggttgcagtgagccaagatcacactactgcactccagcctgggctacagagtgagactccatcaaaaaaaaaaaaaaaaaaaaagcatcagttcttccacccggtcttaggaatagcaaagcacacagtagctatgatctagagatgaagtgtgcagagagaataggggatcaaggagatcctcaatactggtccagatacagaaccatggaattcatgctggatagagatggaacagacatccagagaaaatgctgcattggaagaaaatggggaagacaatgtaatgacagcaaaaggtaaaggaacagaaggaagtcgatgatagaaaactgtggtctgagattcagacactagcactattatttctgtataatggacagtttagggtgagggcaagacacaagatgtgggtttgagaataggtgactgcagtgtatgaaagtaactgttactgaagtcaaggaaacaaagttttaaaatgagttacttaagtaggtttttaaataactcaggccccagtatcctccattgaaaatatagaacaaccagtacattgataaacaacagtggtggaggtaaatggagatacacagctgggtgcatgagtgatttggtttggattagtttggtttataactttaaaataatcacctgaaagtagcaaaaggatcctcctttcctggttgaaaaagataacggaatgtggaagaatctgagtggtttccttagaaaatgctctaagaggggttgtgagttatgtcctctgagggggagggtgggaagagtaagaagtggggaagaaagggtctgtggcttaccctctgttatcccttatttcctaatctaaaaaattaagataaattttagagcaaagcagctctgcttcctacttttgggttctatgaaatgcccctttctgctttaaccagtttaagcctgtgttccttgtttaggaaaagaaaaaaaaagttaatttctgattgagaaactaaaaattatttgaaactcattgtcagagaaaacagcccagcaaaagaaagtaaaaagtcatgttggattctgctctgctgatgcctagtcttggcattctactgagagttcatttttgttagaaaccataacaagctcctaagccctccatgcgattattagtctaaggatctcactgcctagagggcataagttccaggagccatggactggtttggctgttccatgtgggcaactcacccaggataacttgataatatcagaaccatttgagacatttcacgatgcttctagtgatagttttaagttacatttcatgagaattcatcaaaaccatgacgtgaaaatagaaaacatttcttaatacaaaatgagcgcaaataaatgaagagtatatttatggccaatagtatgtaatgtattgctagattttccaaagaaatccccttaatgtttaaaaactacagtaaaattaattacatatacacacatatatatgcatatatgtatatatatacacgtgtgtactacatatgtgtgtttattcaaatatacatgtgtataattctataagccaaaagtattcattatataaatatagattagaaactagtaaaaaagtgaggaaaaatgaagtcctggaagtatggggtgagatttttcaatatatactttcatgttaaatattttacctgtgaatgtattgcttatcttccaaaaaggaaaatgaaagcatttaaatattatagtcactaaaggaaaaaagatgagatgagagatcagggcttgttttagcatttttgatttcctctggattcacgattcacatgactgcatagtttagcttttttttttttttttccttgaaaaggctacccaagcagggattgttggttttattgcttggctgagtgtttggtcagttgtttagtttttaattgtgttttcataataaagaaccatctcaggattcattattccatgcttttttattcctcattcccaagactacaccttcccttcctccctctttatctatataaatattattcctctaattcaggttccaggatcttccctttcagaattttgtatgtctctaactaaagttccaagatcttccctttcagaatttgtatgtcatttgtctcaatcccctaaaataaaggagccctatttggagacattatcgccccatgtgaaaacttactatatccctgcttatactacagcctacaagactctgaggactgcaccctgtatttccaatagtacttatttgtaccacatttgtattacatttattttgttcacgggatattcaaagagaagcattgcatttctagtattgactttgcttggtttcagttttattaactaatgttttaatcacttttaatgtgtattattttattctcatcttaatcatggtggtagaaaaagtagtctcagactcaaaaatagggatttgatctagcacaagttttcagagtcagtcagaatttacaggctgaatgatctttataaagttataacaaatccttcctgggagagtagccttggtaaaacactagcaatgcagggcttgtctgtccgaagacagtggaaaaaatcaacatcatgtctatctcaattgcagcacgccaactcactgcagtcccttccataggtgaactttatcaagtgtgaaaagcatcccgggaccatgggagacacatcagtagcagggaaaatatatatctttgctgcagctcaaggagatgcagcccattcaaatgaagataaagagggacaaacaaaagaattacaatcgaaaatttgttgctggactatcagtagaggagacataattctgccctttatcattacttgtcatgccagtgacagactataaaactcgtactgctcaacaattctgtactcgtcactttctgagccaacttttgccttggaagatgcttggcatgttttagacatatgatttattgcctcatttagtcaagcttgcacaggcaacaatgatctatatttttgtaaattacaaattagccaactttcacttattcttagtgacagaagtgatatatatacatacatatgtgcatgtgtgtgtatgtattctccgaagaacaccatttatttattgcttggtaaaaaaatttaaataatgacttctattccttctgcctgtccaagaaaagaaaatttatgcaatactgtagaacagaaatgcagtcatcctgcatcattgtttttcaatgtttattgtcttggaaaaaaacagcctaagcagattccagtactaataaacagccctgctgtagaggttattggctatttaaaggccatattacttcattttgctttccattttgcaaatacattttacactcttttgggaattccttctaaaatttgggggagctctctggcttgacagtgaaagggaaccattactcagcaaataagcaaaatgtcctggaaataatattacccatttaaaaatgactccttggacattgattaagttgaaatgaagtgcatgtaggcaatgctagtttgttgtcttacctagggagagaaatcattttctagagttcagtagtaaataggcaattcattttgacataacgaggaagagtgctgttaacagccagaggtcacaaaaagcagagatgaaaaagacctattagatcattttctccattccctggagaagagggccaaattatatttcatagtgctttttccagtttagctttcaattactcaagcaagggctttcaccacttcagactttttccaggatctttatcttgtttatgaccccagccttcctagatacattgacaaagtacgaatcttcgtcagaatcaaccctgcaggtgatcacaaaagtactctgtgctcacaattagacctgtatgtctcattttcttttctccttcaatgaatttcaaaatcatttccttggtaataactccttttgtccttccctactctacctctgtgttctgcattcttaatcacgtccctttcactctgagtctaaacgagagctgtttcttggaagaataatctgaaacaaattcctgccatttccaaaggcaaatgatcattcagaggaatgctatttggacagattaccaagaacatctcgaatgaatgaaaaagagaaatgagttcaagagagaatgagagaagctgaagtggagactgcaggtttagaaaactccttcacaaaatccctcgcaaaatggagtaggtaaatgagacagaagctggagaaaggcggagatcaaagaaggtttgctttctaggagagagagattgcaacacttttatctgaagatggaatgtctcagtagaaataccgaaaatgaggatgcagggaagagatgggacacctataggagccatgttcttgagcagacaagaaaggatgagatcctgtacacaaatagagagggtggccttgtgtgggtgcagggataactcgttcattttaacaagaaaaaagggagagcatatgaagagaggtgcttatgggcttatggtttggcaatttggtggtgtgactggtgacctcagctctctttcaaaaaagaaccgaattgattttatggcctttaatatctgcttggctactgcaagttttctgacttccatagcaaatgaagacaaagttttcagtctcttcttttttgaaataatttatttttaatttttgtggttacatagtaggtatatatatttacagggtacacaagatgttttttgatacaggcatgcaatgtgtaataatcacatggaaatggagtatccatcccctcaagcatttatcctttgtgttacaaaccatccaattacattctcttagttatttttaaatgtgcaattaaattattattgactatagattaatctgcataggctcatacactatgatgcactacttttacctccaggagtatctcctaaagaaaattacagattcagaaaacattattcacaaaaatataaattgtatataatttataatatcaatgctgtgtgcaggtaaacaatctaaatcttaaacaataagaaaaagttatgacgtatttaaaataatacatatattttatataaaatatataataccatggaaattttcaatgttagatttaaaagaacaagtacactttgaatataaacctacacaaaacaggaaaatatgaacagtgattgaacagtgattgactttgagtgataaaactcagtgatttttttttccccttctttccagtttcctatattttccaggtcttctataataattatataatattttataagcacataattccctgtattaagtctctttctacttagaaaattcctgatgaatacatttgggttccagtttgttggtttggttttgttttgtttattttctcctgacacatagtcactggcgtttattgagtacttacaatattccaggcactgttttgctgtgtggtcttaggcaaatttcttaaactttctgaccttcattttcctcatttgtaagtaagaataattttcatcatctataaaatgaggattaaataagttaatacatgaatacacccaagaatcatgtctgacaatatcataagcactcagcacatatagacacatttattattatgtccatatattactttgtcatattttgctgcttatgctgttggttctttgcatccaagaatctaagacgcatttttggtccccttaatactttcttttatagattttaaaccaagacaattcttacatggttcttttccttttcatgatttaatagcattgtcaagaaatggggcaatgccttgagaggacacatctttagcaggtcaattttatcaacaagggcagacagcccatttcctgcatatttccttctatattgcagtacaagaatattattaagaacggggagtttccgtagccttgggaataggaccaattcccagatatttaatttagttctggtctcatctaaattgaaattttgtcatagcatttttctcatagtaactgtttagaggaattcctttccaatttgtttttatttattatgaagtcaggccaaaccacacaggtcttcacggctgttcttgttagcagttattggtgacattattaaatcactaacacacattattttgagattggggaccctatcactcaacccatgtagtgtcctctcccattatttggataaattcttctgaaaaaaactgaagaaaaataatacggccattagcatgcatgagtcagatacttttaaactggaaagcaatgcagcaatgaaagtactttcaggaagggaagagaagagattttattgctcccatatgatatctgtgctgctgtatggcacctaagagtttttgtttttcttttttttttatttggagacagagtcttgctctgtcccgcaggttggcgctatggatatcggctcactgcaacctccgcctccctggttcaagcaattatcctgcctcagcctcccgagtagctgggactaggcgaacgccgctacgcccggctaattttttgtattttagtagagacagggtttcactgtgttgctcaggcttgtctgtagttcctgagctcaggccatccgcccgcctcagcctcccaaagtgctagggttacaggagtgagccaccacgcccggcctattttttggtttctttttctgagacagggtctcgccctgttgcccaggctgaatcacgcgacctcagctcactgcaacctcagcctcccgggttcagattctcatgtctcagcctcctgtgtagctgggactacaggcacacaccaccacgccctgctaatttttgtatttttagtagagacagggtttcgccaagttggccaggtagatctcgaactcctgacctcaggtgatccgccagcctcgacctcccaaagtgctgagattacagacatgagccaccacacctggccgtttttgtttgttttttgtctctcctgaattatatacttttctttactagctaaagattaatttttccttttctcagaaatcctggctttgattttttaaattactttggaatttttaaaaatagctccaaagctccaaatgaatctgtaagtcccttaagttcagtggtgggttctatgcagcttggtgatttatacatgcagcattgggttttactgggggcctgtgacttccccttactaataatttccttgatgtggctcatattcacttacaatcatttaggtccacagttctcattcctcattctggttttgtcttagaaaaacaagtaacagaaaatgattatttttatgggaaaaaaattactcttagtcccagtttttagagatgatcgtggatatggtttggctctgggtccccacccaaatctcatgtcaaattataatccccaatgttggaggtagggcctggtaagaggtgactgaatcttagaggtggatttttcatgaatggtttagcacgatgccttggtgctgttctcatgatggtgagatctcatgggttgtttcaaagtgtgtagcaccttccacctcactctctctctcttgcttctactctggccacgtgatgtgtgtgcacctgcttcaccttctgctgtgattaagtttcctgaggcttccctagccatgcttcttatatagcctatggaactatgagccaattaaacctcttttctttataaatttcccagtctccagtacttctttatagcaaggcaagaacagactaatagtaagtcattaagtcaaatcatctcccaaaaggttacttatccaagctatgaatgtgcacgtacatgtaaaaataaccagcggttaacagtaaaacagtttaaaaactatataacctgatgtttggcaaaaaacaataagaaggtggtgaagtagttggagatttgtgaaatttatgaatgggatttttcctctaaaggctttagagagaaaaatcataaatatactggttctttttatcatttttctttgttaaactaattttaaagtagtttcttcatatctcaagacaatcttgtaaaatgttcatttctgacagtcttaaagattaaagggactactgaaagataagaagtgagttttcttagaagaatgggaagaagataagatatttaatagatacattggtaaatatgggggattagctaagataattaagttgaatgttattcagctccctgatatctgatatgattgataatgaaaggaaggctaagagcgggcagagatctcaatagtcactagatgcaaagagcagaccacacagctaagatgagaagagatgaggcatgcagggaagaactggcacagacatatgcaagtctgatgttaagtactctatagtcacatagatttagactggaagctgagaagttttcaaacaagctattcttgactaatctatgctgcagtggggggaaaaattacaagttcaggaggtttttcttgttaataactttggtcccgacactttgatgtctatgcatgctatttgcttattttgatagctactatgttctatattgaaagcatttgtcattgtcaatactcagacttttctttctgtgtagaatattgggtatttagtggattgggaagagttatttgggggaatttttaatagcagatagttctcaaaatttttgctggagatttcctccacattcaaccaaaatttatctatatatacattttacaaaaagagtcaaaaggacgttaaaactgagtagacacccttgtgtactgttgctgggaatgtaaaatggtgcagtcactatgaaaaatagtatagtggttcctcaaaaaattaacaatagaactaccatttgatccagatattccacttctgcgtatatgccaaaacaacaactgaaagcaatctcttgaagagatatttgtacacccgtgtttgtagcagcattatccacaatagccaaaggtgaaagcaaccaaaatgcccaccaactgatgaatggataaacaacacgtggtatataaatacaatggaatattcattcagccttaaaagaaagataattctgacacatactacaacatggatgaaccttgaggacattgcactgagacaagtaggccagtcacataaagaaaacctgtatgataccacagatatgagttatctggagtagtcaaacttataaaagcagaaggtataatggtggttgcctgaagctgggggggagagagaaatggggagttgttgtaagggttttagttttgcaaaatgaaaaagttatggagggtaattgcacaacaatgtgaatatgcttaacactactgaacacttaaaaatgattaagaaggcgaattttatattacatgtattttactgcaatttttttgacaacaacaaagaaaaactgaatgggtgaaatgaagaagtgatctaaaataagttagagatttgttctcctatatcaacattgacaattcaaatgttatctgtgtagagtttttttctttaaaagactacattatgtggtatattctcctagaattaaactactttgtaacatttactgagtaaagccttaatagtatctttggcaaaattcttaaatatttttagggtcaaatagtagaatactgaaccaccaactttgtgtaatgctgatggtaagatatttacatttgggcatttgaactgaattatcaagtactttgcacaaataaagtttgtaatctatatagcctattttttttgcaatacatagaaagtttaaatttaataaaagtactgaatgattaaaaatcagagacatttccattgttatgaaaattgattgattatggtaagttcaaaacagcaacagtatttcatagacagacctctgagttttaaccattttctgtttacatctttcttctcctttgaggtaaaagttatgtcatcggaaaaaaaaagatatagataaaataatttagaattatagttaattttatattccccgatttggagaaaatacaaaattcttattctagattcatctaaacagaacaattataaactataaattctactcagattacttcattttcatttaatctcggaagatctttaattacaactatttttgaaaaatataaaatacttaggaaaaaatatataattgaaacatcagacaaaaccagttcttaaatagttcttaagaaaatactgtggaaagggaaaaataaaattcaaatatttcctttctaactgagtatgcattaccttttcaaaattgaaataatgaagtaatgaacgtgcaaatcaaatttgtaattaattagctgaagtaaaagcttcattgcagatatgctacattttttgcataggtgttgtttagcctattaccaaaatgccaaaatattttgtgtaaaataatctattatttgcctcttcccaaatgcattctaagagtagatgctctataaatacataagatgacaaaacaaataaatcttttaactatagctctctctctccccctacctcttacacattgtcttttttctgaaaaaggtcttaacttctttatgcatggtggcaccaataatctttttttcatttcagggaccttatctataaggtattgcccacataactttgatatatgagccttttatagaaagaagaacacacccatgcacaatcctaaacctgggaaaaagctttccacaaggcacacagggcactaggtctggggctgtttactactccataaggggccatgccatggtgaatacataggtgctgtgttctagatgaagacttggtgttttgtttcttttttgtttctaatattttctccagaactattatacattcaaagctatcctgaaaatatatacagttgccccttgaacaacaggggtttgaactgtgcaggtccccttatgcatggattttcttctgtctctgccacccctgagacagcaagaccaactcctcttcttcttccttctcctcagcctacccaacatgatgataaggatgatgaccttcatgatgatccacttccatttaataaacagcaaatatattttcccactgaattggttgccatgtttcttaagtgtctcttaatattcaggattccctttccacttctttttatccttataatttatttattgaaaaaaatcaagcccttggtcctgaggaatttcccatcgtttggattttgccaattgtattcctgctgtgtcctttaatatattctccaatccctttatatcccataaatctgtagttatgtggcaggccaagtattaccagcagctgaacaggcaggcctccataacaacagtttcagcactagctgagtggttaggttaaatattaaagctgaaagagccagtgcttttatacaaaggctggaatgtaacaaaagcccaccaagagttttgcctaggcctttcttgggccttgaagcacgacaagataataaaagaattcttaacaggacctgtttaggattaaacaagtttttattgggggtctgaagaaactccccagacctccacaaacaagttgtattgagagtctaaaggaactcttcaaacttccatgatttaacaggagacaagataagggggccgggcgcagtggctcacacctgtaatcccagcactttgggaggccaaggtgagtgtatcacttgaggtcaggagtttgagaccagcctgcccaacatgttgaaaccccatctctactaaaaataaaataaaataaaattagccaggcatggtggtgcatggttgtagtcccagctacttgggaggctaaggcaggagaatcgcttgaacctgggaggtggaggctgcagtgagctgagatcacaccactacacaacagagtgagactccgtctcaaaaaaacaaacaaacaaacaaacaacaacaacaacaacaaaaacgagtaatcacccctggcacctggaactatctagattaagtaaatttactgaagttccagaggaaggtcttcaaaattcagaccttagttatagattagaagaagttaatgacttacgtttttagacgaatgcacactgacatgtagacatatagctcagatggtatataagctctgaaaaactttgtaattttgagttggtctggcaatattttctaggcctggttacagattgtacccaattacaggaataaactctcttctttcccagttcatctgcatctcgttattgggcagaaagaataaacagcctgatccttggactgttctgagaacagttatacctaaagctggggtccccaacccctaggcagcggaccagtacccatgtgtggcctgttaggaacctggccacagcaggaggcgagcagcaggtgagtaaggattaccacctgagctctgcctcctgtcagatcagcagtgccattagattctgataggagccaaactctattgtgaactacacatgtgagggatctagattttgcgctccttatgagaatctaatgcctggtgatctgaggtaaaatagtctcatcccgaaaccatccctccccagcccccatggaaaaattgtcttccatgtaactggcccctggtgccaaaaagtttggggaccacttatctaaagaaatgattaaattcagattcaatgcatttgacaagaatacttcataggtggtgatgtgtcttcctatcaggaaacacataataagtgatcatcactctttgtgtgatgttataagcctgtaatggtttgatccattaattcattaggagttgcaaaagggtgacattctaattctttttttctttttatattagcaaaaaatatattttatctatttatttttttcccagctatttcccaaataacttatgatgctttgcatattcaaggaatacaaataagacatccagagatagaaccagctgaaatcatactagaagcaattaaacatggtttcaataattctgttcctttcttagatggacttttttgtgctccagagataattgtgaaatgcctatagtcaaatgctatcaaaagggactgatttagtgtgttctactaggacacgaagagattgacaattttctggaatttaactagagacttaaaatatttatgtttctccagtgtaaagaatatagaaaatgtctttataggcctgctaagtagaaagttatccttaacatttccacttgcagtcaaaatatatacatgacatatgccaagtagattaaaaaaatttaagaatatcttatattctttagttgtaaagtattgcccctatcactctggtaaaaacctcaaaatacccagaataagagttgcacttaatagtacattcttgttgtgtaaggattaaccagcaaattttagatatgtttgtttctgtgtatttataatccattacatttcagaactcatagctaagtatcacccgtaataactagcgtatattctacatgatcttatggcaatcagccaacaccaatgtataaacatcaaagaaatttcctcaccataggtatgtacttaaacatagaaatccatatctccagatcaatagtgtatcctggcccctcttgctctctccttgagatgtaaattaggaaattcaaatgaaacagaaagaactaagcaactagtggctgggcctccataccagctgctgagcctggggcagcggttggcatgacctttagtgagtcttccacttagcaatgtcctggccaggctctctaatactgatggtcactagcttgtcagccctctcgggaacaatccctcaaagctttctaaactgtgactgcatttttctgacataataagcataacttattgaacagatttaaatctttgatgaactaacagtgcttcagtcattattctgacattagtggcagtctcatagacagtgaactgtacaagatcagatggatcccatagtgaccagagaaaatgcccttgagtttgttttttgactagccctgtggtacatattcactttattttgatttgtctctttcaaaagtgagacatagccaaggaaaacaccaaaataccaaccaatgggatgcttttaaaaggaaaaactaaggatttgaggggactgaatctactcagtaagtaaaatatcacgagggaaattatagaattagaaaactagaaggaataattgagatgagccagtcatacacccttcatcttatagctgaggaaaatgaggtcatatggtgtgaaatgacttacccaaagtcacgcagccagtcagcaacaggactaggactcatgtctttgactcttctgactatgcaaattgctgaaggttagtatttttggtgtttagttgcttccctaaacactaaattcactaatgaatggttattctccatataaatttatggcacatgagtaaaatctctgaaaaaaaggaggaaaatacattctacaaaactgctaaatttggtattcacagtaacatgatgtcaaaatttcattggaatacaactttttatctcattattccctcacagtgatacaataagccctggcaaaaactgctatttttgaagttgtattcatttttccatatcatcaggatatacgggtgctcagtggattttaacagtaatttattcactggttgtctggaccatggaccaaaaaaattatacagagttttgcaaatgtctcaaagtcactaggcagatctgcctggcttataaataaaaccccgtaaatttccttggtgttatttaaaattaaagaagttcaaaagtgatcttcaaaaatgcaatacttgaattaaaataatagaaaattatatttaaaatcatgttaataatattttagaaatgaatctaaaccctctccagagaacccttgactaaaatatggtcttttgtctgacatttgcttcaaaataagagaaatggggggagtaaattggcaaatagatggggcgcaactgaccatgggttaatggctgttggggctggatgaaggatattttttaaaatcggagtaatagtatctaattttatgtatgttcaaaattctccataataaaagttttaaaataagaaaaagagaaaaatgaatctgaactctgttcatactaaagaaaggcaaaatatttttaatttaaagccatttctaccatcttcagtaaatcccttgtatgagagttgaatttgctaattagactgatgatacctgccttcatcatgagttataggtaattggatgttacaatgaactactaagagagaaaggacccctcaaagtgcagtcaactagatcattatctgaggcagagcaagctaattatcaccataaatttcaaactagaagaactgatctaaacatctaatggacactattgaagggtcaaaccccttatgcttagtgaattcacactaaacaatctttttagtaaattaaaatgggctttgatatacgaaaaatatgcagtatcagaaaatgtgtacagaaaaataaaaaacatgtagagacagccctcactgagttctagagaatttcttataaaccaaagaatacaaaagtctaaatccaaagttgggacaaccattctcaggtgacttaaccctttgactctcactttggaagacctgggaagttagaatattctagaacaactccctgtaatggagctataggaaattactcatttctcctcctctctcccaagagaggcccctttagtccttgggtgtcagggaggaaaaatgtaaatgcatcttgaaatgctgaggtgatactcatagtgtgacatttgacatatgaatagtgaagggaaaaacatattttagtgggcctaacaaatattgatgatctgtgtttagtccccagtgactgttgagacactatttccatgagacaatatcttttgtggtccaaaaaaccgatttacaattaaacatatagaatgccacttgtttataaattgatgatatggaaagatttcaatgcctaaataaattacagtaatgagattatacaattttcttaaatatttattattgtgggtaatcctgacagcatgtggccctttcaagacgctgacacataacggcgtccttgtattggtcactcatcgcttagtcattgcctttgattgtgcagtggtgtcatttttgtcttctttagtcccctggcaagagagtaaagctacagtcttacacacaggcagtgtgttgtatagccaatagaatctttcttggcagcttgcacacagtggagaagggaggccatcatgttggggagcactgagcagaggggcaggagcaaagaggcacacagtagaacttgcctcctggttgagatagcacaatactgcttatatactcatatttgttagtctgtggcttgccacaacttcttcctttaatttgcaagagatacaagatgatgaattatcaaaatctcaccaggcaaaagaaaattctaaattttttgtcatttgggctcagcattcaaaggcatttcttcagataaaaatgctgtttttattcatacatacaagtgacttactagtcttcgattattggcttaatacataaaagtttgttgaatgaacactgaccagtctcactcaagcctaattcaaagcttgactgtccaccacattctagaagggaaaaacaatcccctaaatcctttatgttttataggtgaggcttttcaggcttcaggagtctgcatgacctactcatatgtatcaccattgtggagctccctcccaggcctactctgattccaaccctggaaaaagagtttgcttttcatagtctgatcttcatatccttgttacttacatgaagaacaaaatagaggggaacatattttgagctaaaacactctcgtggaaaatcccatctgtatttgtttgtttgtttttgtttttgttttttcggagacacagtctcactctattgcccaggctggagtgcagcggtgcgatctcagctcactgcaacctccacctcccgggttcaatcaattctcctgcctcagtctcccaagtatctgggattacaggcacctgccaccacgcctagctaatttttgtatttttagtaaagactgggtttcaccatgtcggtcaggctggtcttgaactcccgaaatcaggtgatccacccacctctgcctcccaaagtgctgagattacaggcatgagccaccatgcccggccccatctgtattcttgtacagtgaaaattagaaagccaaatattgttttcattgacccatttgtgaaacataggacagtcaataaaaagggaaattaagattttataaaactacactagttaataagaagtgagaatgaacctctgtgcacggagaaactccaatacggagtaattctgacatctgttacattggatagcaggaaggaatcacaaatcctacatgaacccctactgctacagatcatgcaaagagacttaataatattgcctttgattgaagacatgaagagaacgtttgaaaagtgaaaaatacagagcatacagcatactaagattccacttcaatgaatactagactatacctgtcagagattccaataaaaccctcataatgtcttagatagggcagaatgaaagcagaggatataaaatatataagtacataaccccggaaaggcagcaaatgctcttatttgacataataagaactgagagcttgatgcattttgtcacagacagtaggaaatattttattctgtgaataaattatccgatttgattttgtttccactatttgtttttaattaggcaggaaacatttccaaatttaaatagctaagaaatatttccgaatctttaataggtaagttccaaacgactgtatagtatttcatctgcagccagtcacctttccacttcaaatcagaagccaggtgttaaactttcttgctagtttgctattaacttctgggggaaaaaatctgtttggttcttgttgatatgacagatatttatctttcctgttgttttacatatattattttcaatacacaaaatactaggcaaagccttgctgtagagagctcttttgttggaaagagcccatttccaggattttcatctgactttacccagcaggaccagagggcagaagcccatctttggagtgttggctaggattacacgctgcagctgtcagccagcagtaactgcataacagacctctggcatgtcagtgacttttgtgttcaaaaaagggcaatatttgcagtttacaaagcattctggaaagtgtaaaatctaaaaatcttactagtatctcccatctagatgaggagacaagaatgttaccccaggattcatcagtcacatactctctatgcacaaacaaccgtgaataattcagctgcaactaatgttttgcgttttttctatgcattctctacttcctacctagaacacctgaaggataaattggaagaatacatggcccgattttccaaagtgaggattgttcgcaccaagaaaagagaaggactcatccggacccgtctcctgggggcatctatggccagaggagaagtcctgacattcctggactcccactgcgaggtcaatgtgaactggctgcccccactcctcagtgagtacaggttgctaagcaccatcctgggatgcctcaggggaactgagcggtttgcttctatttagtttgcaatcagcaaacactagaggtcccttctacaagttttccaggggaagccttgaattttatatttaccactgctgaaaacagtttactaggtaactgttttaggcagtattctaggtaatgccataaaattggcattttaaataatatcaacttcaatctaacttacagtttagaaaaggtttcatttatcttagatatcctcctttagtgtagtcacattcactgggtgaacactaaaagaaaaacgtgtcccaaaactcttttataatcctgtagctacagcaagattaaaatacacacacacacacacacacacacacacacacacacacattgaacaagtattacaggattgttaagaaaagaggaaggaaaattattcatccccagaatacagttaaagtagaagcaccttgacattttctaggatttaaaatgccgtttcttttctgttattctctccacttctggcaccatcctatagccctaaatatacagttctttgtatttacatagattccttctaacacagtgcagctgtccaggtgctatgtcttaaatgctcacaatatggctaagctgagggaaagaagattatgtcataacacacttgaactgttagaaacacgaaagaactgaaagtaatttaagctagaaaacatacatgtggttcagttcaagcttcattacttttgttttaaaatgaagtaaaatataaagtccagttgtagataagaaataaattgtcagctcgaaaacaaaaaaaaccctccttttaaaaagttcttggtgcacacagtgtgttctcctttcccactttgctaaatcaacttttattgtaaaaatatccctggccttggaactaaagtcactagcaactgccttcacaatagctgtctcagaaagaacaatttgctattgactactgtgtaggttttcagcaagaaccagcaaagctcccttagtaaaagatgtgaggcgggggggcggggaaatcaattgaaactgtgtaggatttaaaacaggaaataaccagcacccaacaccctccaccacattgcccagccacatacgcctgcacaggtaactgcccagttatcctaatcaactgaatgttttggtgcccctgcagtcagagactcctctgagcctttaattaaaagtaccttgtccaaggacacagcaatttagagcttcatcagcaacagtgagattccctcaaacagaatttgacctatatggtgttgaatactcaaggaagtcagcaaaaggcctaatttatttatgaaccaaagcaaatccctaaatgccaattattgagtctctgattgttcactatgaatctaactaaaaagaagaagatagaaaaaaaaagagtaagagaaacccacaacccacattttctcattaaagtatttcatttcctgtagtcctgatggataagaaatgattcaagctcaggatcactatctttcttattttcctctatcagtgtcttgacacatcatccaaagtgaaaaaacaggcagagccacacagtttcttggctcatttttcaccttgggattatacctgaatttcagtttcccattaagtctgtttgtttgatccctggaaattgaaatgtaggcacaagccttggatgaaaaattagtcatgctgctttcaacctaagctaggacagctggataagagtgaaaaggaaatttgaaggaaaagttgacagttactttaacagacacattctctttgggtcaccttgggactccttgatggtcaaggaacttgtaaatcaacctgattctgaatttgattgaagaaagtcactgaaaccttaatactaaaatacctgcagggatgagagaaaaaatattctggacccagcaacaatggtctcctctgtcaaagacatctctggggaaataccattcagtaaaatattactgaatagaaataccattcagtaaaacccattataaggcttgccctggtaaaaaacaaatgcttagccatcccttggtgcagattaactagaaatggtgctggggggtctcttcatctgctaattaaactaaagtaagacaaagcccacttctagctctctgtggcttaccagggccatgctctaaaatcgcaaccctttccacactccagtatcctgcattccccttcccctgttttattttttccaatctcatttatcacctttgaaacactatataatttagttatttattatgcttattaattgtctttgcttcattcctgaagacagaaatttttgtgatgttattcatcatggtatccccagaacccagaacaagtgactagcacgtagtttctaatcaataaataattgttgaaatatgaaaagaatgactggatggataaatggatggatggatggatggatggatggatggatggatggatggatggatgaacagacagatggaaggatggatggatggatggaaaggcatatagaccgagaggggaaagttttcacaaaattctgtggtttccatcccctgcttcatcagtgtcatcgaaataaagccacttcttattataaccagtaaaaccttatactttttatcccatgcttaagagaaacttctgaagcaaacggacagtttccttactgcaagaactttatccccaacacaaattacatttactccacaatctctggggaaacaaaatatgttatggaaataaccaaacttcgtaactgtgctaaatgatatctgttgtttatttgtttattgtcacatctaaaggtcttccgaataacaagaagttctgcccattagacagcattggtctcttacaataaatattaactaaattcacattcttggaaagaaagatacctcacagatagctattctagctaaaccaaaggatgcaaatgccagtgccctttgccagctgttaatgtcatcacaataaccttagccacacaggaaaggaaggtgttggaactgaaaaaaaaaaaaaatcacctctctgctaccatgagaagcacaatggaacactcgaaaggtcaggtttaaaattggattgttaagcagaggttgcatcttggttgttgctcccaaaagctgcataacccttaacaagttatttaatttccctaatcttacctttctcgtacataaattggggatgacaataatagttaccctacagggttgctaagagtattaggaatagcatgagaataaatcactttatagttgttcaagaatttaagagtagcagaagtaatcgcagtagtataatatcacctaatactttttcgaatatgatgagggaagaaaatgtatagctttgatcaacagagtttagcttcaagaacagtggcaaaataggacttggaaaaatctctggcaaacctgagagcaaagaattctatgtatgatctgtcagcatttataggggagcagccaccatgattgttatgaaattagatgctacaaaaaccatgaagttaaatatttactttttggaacctccagaaagcaggccagtattttctcagcaggctccagcagtatgcttgaaagaacacaataactgtttatactctgcacatgttcgattcacgataaaatgacagactggggacaggtcagggcaaaaatgtgacagaggtagagctaaatggacttctgcaagtctctctgggacataactttcttaaaggaaaatacaacaactctaattggacctaatcgctgtcccatcacattaagtccagaattcagagattcctgaaaagggctctaaggaggacagggagccacggctgcaagcattatgcattagtggaggactgtaggcttctctttgctgaaaaatgatagatgacctaggcaggcatgtcatttcctattttgtgctttcatttttcagaccaaattgcactaaaccacaaaaccatcgtgtgtcccatgatcgatgtcattgaccacaatcacttcgggtatgaggcacaagctggggatgccatgcgaggagccttcgactgggaaatgtactacaaaagaatccccatccctccagagctccagagggcagatcccagcgacccttttgagtgagtagcagccaagggaggggccgagggggtgagggcaggtaactcattgcagtgttaaacctgggctcaagaagacaattatctctaacaaaatggaataaaacaggcggcaacaatatgcaaaacatcacagaaaggtcagacctacaccctgtagaaaattacaagctgtatcgaattcatggaacaccccttcttaaactttgctaagcatgaaactgtacagatgaaagaaccaggaaaatgcataaacagaaaatacatagaaaaggaaggcatgttcccttcttagatgctttcttattttcagttgtttctgttcttttgacttttccctaaaggattactgaaaacaactattttgtttttcttttattagaaattgatataaaatatgaaccagtgtttaagcctactttctataccctgttgaaattgtgtacctataacggaagcgtgctcctaagcaggtgttcccacaactgaaacatggggaattcaatcaaagtgatatacccagagtcaattatctttgataatcctgcccctaatttaagtacatcctgtacagagaagaatgtacagcaatgatctaatgattaatttctaccaaacgacatcctgttttttcagtgtggacataagaagtatgcatttaaagaaaaagaaaaaatatgtatagtttagtttgacagactatcaagacctttcatagtgaatggtaaactttttccaacagttagcccagagattatccaaggtatactatatatctattccttatactgcaccctttgatatcattaaaattgttattttaaaactattatatatgtttttcttagtacaagaaaaatgtctgtgatcaaggctttgcacactctgagtccatttaaaatgcattaaaaatatcgtcttttcatcaataatatgggccataaaagtttgcagtaaagaagctactgagtacgaaaaccacttccttgacactaacagtttaaattacaatcaacatttcataatgatcaggaaaatatttcctacacttctagtctttagaaaaatgaactcctggggaagcaaagggaatttcagaagacgttagcctgataccacgcgagagaagtcgtttcttttgtaaaatgaagcgctctcattaaatatccagagcttctggagttcagcctcttttgacgtgatacttactggagagtttttgaaaagaaataataaaggacctttgttacttcctcaaatgctttggccaaaatttcatgggtattcaaaactactagaaaatctttttagtaatctaagcaaagtgtttctaataagcatttgaagtgagcttagctgagagatgttcttcagacttctctgaaggcaaccatctgaaagtcttgacagaggggcttaaggtgggacgagtgacaaggttgtgaggtgatgcatatgttaattagcttgatttagccattcgacaatatgtacgtatttcaaaacatcatgttgtacatcataaatatatacaacttttatatgtcagtttaaaatatagatgagaaaagaaaataaatttaaaacgttttaaatgtaaaaatttttaaaacatgcgtgtggagaggagtacaaaagggccttaaccgtggtagaactgttattaggtgctggcccacagcagaagagccacagttcggccgctatgatgtgaaagtacacattttaagggctagaactcacccaggctggctttccaaataccgtgatagtgactggttataatgacctttactttatttgcactgtgatagcagagtaggggtcctgcttcctgaaacagtaggatcaaaatgccgtcagaggaatctgcagtggagacagttataaaagtattctcagtgcctgcactgacagtcaacatttttgtcaggctgactctgactatggctattacaatatcaagcaccttgcttaaccacagagctggcagaattggtaactttcagaactaggttacctcttgtttctgtcccctacgtaggtggttgttgaactgtcaaaatttgcattcatctattgcatattactatctttctgccttaagtcttattgattcctaggaatgtggacactttagcctcttgtaataaatgtaacttgcaggaggtgtccactttgatcttataaaccgtgtttgccttcctgataataaaagaatggttacccaagcagctctgagcagcgtatcggcaatttcattatcacggcagtcacctgaatgtgctcataaacagacaagctttaggctaaaacttgcttctctagctgtaaagctttaaggtacacagaacgaaggcagtctatctatacagctttcttatagtcttccacatttcaagaggctgccgccaaagtgtatggttttctgtgggaagacagggagaggaggctgaaaggctaggaagaagggaaacaaagaagaatgtgcaaacgtatctcaaaccccagtatttttcatacaataaggatgcaaaaattatctttctgtagcaagtttatcaaatgtcttaagtgacaagatttgaattatctaatttattctgccattacttgaattttcagtgactattatagcagtgattatagcagtgttttccaacctgaaaattctgtgaaattagtggggcattaacagtatttaattattaattaattggattgaattcaattgaaaattttagaatgttatactaatgggtaggtataagtgtcatttctcaaatattcaatttcagttataaggcatatatgaacctgatgtggtataaactgtatttcttcacatagactacacagtcaaagtggtcatcatgtaccaactttctaaactaggaatcaaggccttcaacaatctgactagaaaaggaaaactcatggataactttgagcattaagaaaatatttactgatatttacaaagggatcctgtttttcaacaaactgctactagaatataagagaaaaggcagcattcatgattcaaattattatatggtggtcataattcctgttggattggatacatttaagaaatattttggctgggcacggtggccgcgcctgtattcccagcattttgggaggctgaagtgggtggatcatttgaggtcaggagttcaagaccagcctgttcaatacagtgaaaccccgcctttactaaaaatacaacaattagccgggcatggtggtgggtgcctgtagtcccaagctacttaggaggctgaggcaggagaattgcttgaacccgggaggcagaggttgcagtgagcagagattgcaccactgtacttcagcctgagaaacagccagactccgtctccaaaaaaaaaaaaaaaaagaaaggaagaaatattttggggccaggaacagtcactcacacctgtaatcccagcactttgggagaccaaggcaggcagattgcttgagcccaggagtttgagacgagcctgggcaacatagcaaaaccctgtctctacgaaaaaaatatatacatatatagtggggcatggtggtgcacgcctgtagtcccagctacttgggaagctgaggtgggaggatcacctaagcctaagaagttgaggtttcagtgagccatgatcacaccactgcattcaacctgggtgagaccctattgcaaaaaaaaaaagttgaattaaaataaacaagaaatattttgggttattattaaggaagaaaccagaatgttccctctttctggtggcttttatcatgatgtaatgctttgaggaaattcttgttattcatggcttttagaaggttttctcatgactggtccatcttgaattcagggcacttagcaatgaaagacttttctgtgtgacaaaacataatatgctccttcagccatgatgacaaagagaaagatgttcatttgctttctaaaagtttagagtgggccctaagaaattatcttgtccaaattcccttcaatgtgagcaaccactaaacaatgtccaagacaggcatccaacctctgcagtaactcatctttaaagtaaatttcctacctcaaaagatagtcgtttctgttagacttattgacagaaatgttttcccttgtatgaagaaaattctgccttcctgatcccaaattgtcctacttgagatacgaggaatatctaattggtctttaatgacagagctattagaaatatttgagaatagttgccatgcctatactgcccaagagggaaaacaacaaaacatttttcttttccaggctacatattttcagttctatcaccatgttttccaggtctactagaatcttgtaaaagttcacactcgttgatgtaatggttcaatacatgtaaattcacttcactgctgccaacgtttctccaacttgtctccaagggcagcatgaaatagtccatccagtatatcaggtacccaggccctaatacatgactctgtcaactataaaaatcaagttaatttctagagaatttatgcaggttcctagctatcatgcttccttttgctaaatagaaataatcgattcagcagtttattcaattttgcaagttgattatatttttcagaatccacctctattctgtctttgtgattgtggagaaattatttttgcactgccagtcttcctcagatagagcttcacaattccttaaagacttctagaactaagagttttaatcaccatcaatggaattcttgcctagacttattagtgagaactgacattctctattttccatctatggtatacatcaatttccaaaatgcttaaaataaatacatatatacagcagcggggaaattcacaggctaaaatcatccttttttttggagacaaagtctcactctgtcacccaggttggagtgcagtgggacaatctcggctcactgcaacctctgcctcctgggttcaagtgattctcctgcctcagcctcctgagtagctgagattacaggagcacgccaccatgcctggctaatttttggatttttagtagagacagggttttgccatgttggtcaggctggtcttgaactcctgacctcatgatctgcccgccttagcctcccaaagtgttgggattacaggcatgagccaccgcacttggccacaatcatccattttattctctcagaaaccactatgttccacagacatatcagtttgaattcagtaattcctcatccagggccaatatctagccttcaaatgtccctaggcatggatagcaatagccgtgacccattgccaaggacctcaagttaggcacttcagacatgaaagatcctctgacatgggccaaaggtgagatccttatgagctggttctgcagtccagaagtgtgaggcatagcccatgctaaaatggggaaaattctacctctttgctacagagagttgtaacactgtcacatgaaagtggaatgctttctatagatttactgatagtaccttccattgttcttccaaggcacacagtgcagaacttgcagactctctttcttgtataagaatgtgagaaagtactgataacaacaccgtgtgaaagtcagtggttcttaggcaacaaatataactttctgctaaatttaggcttagaataaaatcagaaaaaagtacaaataatcataaattcatcaagctagaaaaaaccatagagacaattcaacttatttttacaaaaaaggaaacctaagctatacagtctaaatgacttacccagtgtcaccactagctaacttaacagctactactagaatctggggttgctgactcatcattccatgttagtctttctttcacacgtgatgaaggggaaattaacagttgttaaatgtctactgctatgggtcaggcactttgctaggaaatttacatatcttctaacccatttaatccttatttcaagcctatgaaatatgtaatttttacaaatgagatgattcaggctcatagaggttaagcagttttcctaagtttacacagcaaataggagtaagaaagcagagctaagaattcccacgattccatggagattttcacctcccattctacttagagaagacacattctctagtggttaaggaataatcatactcaaatagggaaaaaaccttcagagagtacaattacttcttccctaaaacacgacaatgcagctggtaagtgaatatcgcaaagccaaaacatcactgacctttaccagtccttacagcaagtcttatttcaaaacacgttcaggacactgggtcaaacaaaatcactccaggtctgcctcacacagatagacttgtgcctgcacaagggtgcccagtggagagtgtgagtaaggctaagatcaagcctctgttcataaagccgtggacccaggcttgggttgactaatgtggaggaagaggggctccttctccttggtgggcatagaagcttcactttattaacacaaaggagataacaacagattgaggatcaacttacttgatgcctagaataaactattagcttttatcagaaccttattgatggcactaattgaccttcaaaattttagcatcccacttgggttaaatttcattgagggttagggttaccttaacctattcaaaatttgaaagtaaagataatctattttacacaaaactctttccacataagttttgacccaatattagtaattctacatttaatcaaaatcagtaaagcatgaaattgatttcccacagaaaaatggactggtcaaactgagaatttaatatagaatataagcttagaaggataactttgggggttttctccactttcacctctaagtttaattagatactgttcattctcccttttattctctcccatccctattaggacaactccagagcctggaatatccatttggtagagtgggagaactttgttcattccctgcttctcaagtcaagtcaatattctcacaaattttgcatgatctccatgcaattgctacaaatcttcctccttttctcctcaaaaaatcaaattgatgcataaaaataccaaaagatgtgctccttgacctcagcctccaaccacataattctctatgattgaggtttcaaaactgaagtttcaaacatttgagggattagattagaatctatgttcatcagtttagtctaaagacaagttccaggagagttaactaggtcttcagctctccacaaccacaaccacagatcttgccggaacttctcattattccagaagcccctcaattaaactggccaaagaatctatttcatgaaacctatgtagtatgtaatacgaaaactaacatctgtttagcacttcaccgtatgtaaagccctcactatattatctaattaactctatgtaataatcccttcaaatgggttaaagtagatactgtggttttctaattttgcaaatagagtgagaaccaaagaaatgaagggactatcgtgatgaataagagacaaaatcaggactcaaatcaatgccttcattcattcattcagatttcaaatcttagctttaatcaatggtctcataggactcaagttaatgccttctttcattcattcagactttgaatcctagggttaatcaataattttcttttactctccttgtaagagaaacttaggcacccgctaagtgaagtagttttgtcaattaatgtttcatagtgagttcataataagagcaggaaaggaaacagattgccttgctccccatactgtgttcttatcattagaccaaactagagctgataggttgaaaatgtcagctttcagttactaatgaagggaaatgtcaacaatgccagcttctggtctgtttataacaagatctaattcaatatttaacaactgcaaaaggacaaaatgtttagggaaaagactgtcaaacttttaaatggtgtcctaatctacagaaggtgagaataaaggagcagaaaatggctcaagtgtttaaaaaactaatcaaaatattgaataagatcaatctcctttgaaagcccagaataaacactcactgaagattttttaaatgtaaagtaaaatagtataacatgggcagagatgttccaaagcaaagttgtaaattacccatctctccttttgaagccccctcccccattgcttggctctggaggcccctggctgccctgagcccccagtctccagggaaatcacatctgacaaagaaattctccgtaaggggtggcaacaatctcttttcctttgtcagggtcagaaatgactgcttctttcttccctctccctatgggtgtgatctttacctcaacaggatgttccctatgactttctccttcatttaacagtgaaaatgacattaataaaattaatccttaaattagcaatccctgttaattattctactgtacctccctgcttttcttcagtttgtcttggtctcttgagatctctgggttcctgggatagcttgggctttgagatctcatctttctggttcctgaccatgtatccagcttcttgaaccactttttttctcactgcgacttctgtaagggccattcaatcataggtagcctggtaggttatgtgcactattttaaaagatggtgagacctgttcatccatcctgaaagaggtgttcactcttgcataccagccactcaggaccatggtctctctggaactccagaatgcactgctcttctctacccaaaccttacggtgacttttgttctaactatcctctgtgtttctttggtaacatcgcctcttaaattttggacttctgatctcattcttggtcttgcttcactgctgccaggatagacagctcctccgtagtcaggctagggcttgaattcttcatgccaaccacccctagacctccagtaccacccaatagttaaagataaaacagcaccacctaagacatagcaatggctgcctatgtgttgaactgtgaagttcatgaatggattgatgactgtttttcgtaggggtttttttggtccatttacctgttatatcaactattatccactttgttctgcttccccaactggtgtcctgagtctgtctgtctgtctaatgtgtgagggtaatttgctgtgtcccttccctacccttaagatgtgacttgacttcatctcatttattccttagctgggcattttcatgggttctgtcctctaggatataatgccccactctcttctttctggctccccattcttctttaactgaaatcttgctccctttagctaagggagaaacttccatgcacctgtgaaaataactgtcacagcccccttcccagcacctgaagttcagcaatattgactctgccccaataacatgataccagagcatggcagaattaaacagaatgttctgccattcacctactcttcctcctccctccctgcagacagggatataggcccgaggcctatatattagcttcatttcacttcattttctcacccaaagcttcattgctaaaatatcaccttcagctctgctctcctctttgctttccttctcaattcaacaactcttcttttttcctaatcatttcaacatcagtattagaatgtaaactccataagggcagggagctctgctttcttccatttagtcagtgctgtgtcactagcatctagtctctgtgcataaaagacactcaacaatatttattgaatggatgaaataaatattaagattggaagaagtggtcagataaggttgtgtatatttgaaaaagggatgacagtttttcagaaaaggatgctagctgcagagaatgttgtggcaggactgagcacaattatctgtagggtgtgacccacagagcagcctaaatggagcataaattctgataggggagtggtagaaagtaaagaagaaaaggaagaaatgaagaagacagcagaaggcatttatccagtatgtagaaagaacaaagatgataaataaatcttttagaaaaaatagaaggcattcctgaagtcctttacaccatgaatgaaaattaaaatcatttttaaaaccacaacctaggagataacatctttaacaagggggccaggagatgatattgatcttcagttctgtccttttctaacaaataacaagatgctatgagcatcttgtgctgtctagattctagactccacctagagcccaagctgttgggggcaatgggcttcaagagagttcaccaaaaatccatgctcgagagcagggctgggaagggccagtgggcttgttggcgagtataatcttagaactcatatgtgtagactatgcccttagaatgggagggcataacaagcctgaacaatatgtatagctctaaagtctagcgaagaaaactaagccttacatgtggtgtgccgttgaagcctgcagtatttatatttaaagaaatgatgaaaactgtaatctgtgtccaggggtcagcgagcagtctctagtcctgaattactctctagtcctgaattactctgttactctgccacagagaaagaacagagttggccacaagggctttcagtcagaacctgacttccatggtatagtgtgtgtgtgtgtgagtgtgtgtgtgtgtgtgtttgtgtgtgtgtgttcatgtgtgtgtgtgcacatatatgttataataataaattgggatcaggttatttatatatatttatattatttatatgtgtatgtgagtatatatattatttatggtgtatgtcaatgtgtctgtgtatgtgtaaattttgcttgtaaattgcttcaaatgtaagttgcttttttaaacaaagtggatacatataaataataggagtgaaaaagaaacaaaatctggctttgagtctatgctgctgtcttctcagtggggctgattttgttcaggatcactcgtggaggtaggtgagattggcttcaggtgagaaggcttcagaaatgagagaattccctatctcaatcctctaacaaagtcagagcaaaactttttaaaaataaaacagtaccgcacatactcccctgatgtaaatagagttgagtgacactagaaaagtaacagactttcatgagcttatatgtgacagaagtcattagtctttactgtttgctgcttggattatttatttggatctaagctcagtatctgaagtgaggctacatccacagaggcactggttttgacaagatcatcactcccgccttcaacaaaataatcaagaaatgactatgatgctaaatcggtgggacaattcttttttcttttttttttttttggttatcttttctttctttctttctttctttctttctttctttctttctttctttctttcttcctttctttcctttttggtctaatacttcttggtatagatccacctggaaatacatttaagagaaagaaatgtctgtttttgtgtcctggagtgccaatgaaaatgagacaaaatggagtcttgcgggagggagggagattatatggcataattcagtggaaaggctgaggccaggctgccagtggaaaggctcgtgctggttggccactccaggttgcaaattctgattcaaaagtgaccttgagggcaccttcccactccagccttcttcactgatggagctcgatggtaacacaaagatgtttgccgtttctgtgtcttcctccagcatgttagcgtgtttttctatcagtgggaactaggttggaagccccagactctgcccagatcctgcttctgggattgaggtgagccagggcaggagagcaggagcttaggatctcccagcctgcactggattggtgggaaaactcatccaaggccttctagaagtggtacacaaagggagaaattgagcaaagtggtggataaggtaaaagtacacatgagagaaagaatgattacatcacaagccacaaaaaaaaagaaagcaggtttgaataccatgtaagaggagggaaactgtaggggaaagctgtgcgtagctgagagaactgggatttgcacatacagaagctagtgtgggatcaggccatatttccctcctccccacatttatcccccagccattccaccaatttaaagttaatgaagaatacagcctagctaaatgttttttcctttgcttaacactgctccaagaatttacattttaactttttgtagtaatagaaaccatctcatagatgataattgtagcatatggagcaggtttgaaacatacagttacaactcaagtgggcatgaatgtaacttttttttatctccataaatgagccttgcaaagccctggagtcctgcttccaccgtgagcagcaggctggctcccaacacatttgggcccaggacaagagtgcaaatgaaggctcaggtggcatatggctaagtatttggaagtttataaactgagctagcaaactactgggttctgctctgtcctcctttcttgatcaatataccttcaaaacaacccagagagtagggatgcatggagaattgctccttagcgtccgttcagctgttgcagcacctgcggacaggcaggactgtagcccacagcccacaccttcccttcctaattgttctgtgcctccacagcccatgggcacacacgatgcaggtggacaaggaagcccacacatctaattccttctacaaaaatagccatcctttgcccaacccccagccctaaggatataaattccaaaccacgggaaagcagcccatggaaaaagaatcaaataataatggaatgactcaggcatttgaagcaggctcagaatcctttgtgcagggaataatgcagtctggaaaacccagttcacaaaaggtgtgcagcctgtggggatggggggaacgggacatccctttagcctccagactacccatcccgtagggagaggaacatccaaagaagaccagagcacggccctctttcctgaatctcaggtcactggacagcagtgagcccctgatgatctcaccaattaaatgtgtatttcttctgatccagaacttggtctcttatgggtagattctcagtaaattcccaattcaaactcagtcaattcaaaagtctaactccatgccgggattgttttcctttccaaactgctctgctcacctttcctccattctcctccactctcaggatggcatcttgatcatgggccaagtcacagtggggggcaggtgtcatctgatgctttatctttctcagctagcctcagctagtttcagattggatgcagcagacctttcaaaagaggctttgtcctcacttgatagagtgcccacagatgtcatgtctccatctgctctcttgcatggtagggtcactctcccactgactcagctctacttaagttctaagatctggctaaggactagtccaagaggcccggttgcaggcttttactgagccctagctttggtttgttcagccgcaaatctcagagatgagtcccttcaccctgcttcatagtgcaggttctctagctttcaactctcatctggtcccttccctccaacaggcaagaattccaccctttgcgggttacagagaaccaagaggccctatctcagactctgtctgcctaaccacaccatgccactcattctattataatgagcttcctcatgttggcatagagcatgttacttagaggtatctgcaaaccatgaattctagggaggaagtggggacaatccctctatgttctggaatcctaaagctgatctggagtctttgtctccctaccacactccacccaccacaatccattagaactgggccaaaacctcccaactttgatttgttggaaccaacacctcatgttcccgctttcaacaaatcattgctcttgcaaatgaaagctctgtttcttcgatactatgttattttgaaagccaagctgagcagtgactttcctattcttggtggtgcactgccttcctctaaagcaaaagaagcctgagcttccatgggtggaaagccaaatgcaacaagaaaaataaagaagaaaaattttatcaataatactttctttcaaaaatactatctcactatacaagttttttttcactgcattctttaagtggtagagcaaggaataaaaaataagcagccttctgcttgcactttagacattgaaggaagaaaggaaaggcaattctgcttaggaggaaaatacagaggaccaggcatggtggctcacgcctgtaatcccagcactgtgggaggccaagccaggccgatcacctgaggtcaggagttcgagaccagcctggccaacatggtgaaaccccatctctactaaaaatacaaaaattcaccaggcatagtggcaggcacctgtaatcccagctacttgagaggctgaggtgggaaaattacttgaacctgggaagcagaggttgcagtcagccaagattgcatcattgcactctagcctgggtgacagagcaagactccatctcaaaaaaaaaaaaaaaaagaaacaaacaaaaaaaacattgaagtgctctaaccctgactaaaccctccttattttgtcaattgctttccctgcaccccacgtcccacagggagggaaacctgcctgtcatcctatgcctcccctcactcaggggccacagtcagccctgctgtcagggaaggaccatttccatcaaggtattccacaccacatacccagacacaggatcctatgagcctaccagtcttttcttcaaatgtatgatctgatcaccatcatgtgttaaattagcataaaaaaagagaaaaaaacagaataaaccaacagaacctagaagaaacaaagatacttattttaaataatcaaattatcctcatccacaatctagaacagtttctgtgtagaaagggaacaagtacaattctcatgtatttaaaatatgataactaaaagaaaagattcaatggatgaaccaaataatagaaggaaccaggctaaagtccacgctggcaatctggaggagaaagtcaaggaaatccctcatgctataaagcaaaaaagatggaaccaaaatctgggctattttcctagggcttccataacaaagtactacaaactgagaggcttgaagtaagtgaaacttgtctcacagtcctggagggcaagaagtcctaagtcaaggtgtcggcggagctatgcatgctccctctgaaacactggggaaggatctgttccaagcctctcttagcttctccaagctgcatgcattccttggcttgtggaagcatcgctctggtgtactcccgtgccttcacatcctctcccttctgtatgtgtatgagatgcaacctgagaaagaagagttacaacacaggacaaaggcatgcaagatattcgccatccacctacatgcactcttcggagcgcaaaacacagacaggagaggaagagaggcagggttcagatccacaaggatgtcagcagagagcgtgtctgcctgttcctggctggaacttcacacagtgactcctcatggtacctactatttgttggatgaaggaaagagtttggagtcagtattggtagggatactctgggctatatctttctttctacccatcctttggcacctcattgcttcaggttctggaatctgatatccatgtttgagcagcacaatgaaagaagaaggtaaaatatttactagaaagtaaatggggatgcagggcatgggatctgtagtaggaagattcctcttgcctctagaaggagaaaatacaccaaagaacttcaaatgcgtatttagacacaagtgaattggaataacctaaattgcaagtatttattcaccataattgaacattttgcaactcactgtcttttctgaaaacaaaatgcagtagacatagcctttaagtaatagatttctaacttcctgatgtacttccaacctttgcttcttggtatctaaaagtttaactaggcacatcctgcaaactacttcttggctcctgagacataaaattcatcttggtctgatgaatactttcttccagttttatttgagaaattccctagaagatatggataattttaaaagtctgagaaacgaaatcaaaggaaatctaattccacaaagaatgctgagtctaaaaaataaattataattctggaagattgaaataactctttgaaagacaatatccccataagtatacatatatctagaatgtgtattcaaataaattccaccgaaagcctatttttctcatctgaggtcacaccatagcccaaataattttatcttagctaacataatatagtgaatttaaagtaacaactaaaaattcattaagatgaatgcacatagtaaaatagataaagagaatttttcctaaagatgctcttttgttttatacttttgacatggcagagataaaggaattcttatatataatcagggccaaactttacagtttgaaaaaatatatgcgaatggctgatagtaaaaagatgaccaatagagcaaatctttagaaagattctatttttaaattcagaattattgtagaaatctaggccagaatgggactgctattgcttgtgatgctgaagtgagcctaaaatattaaaaacgacagtttactcaaacttttgtttgtgttatactgccactgccaccttctggtaaaaaagtgaattgtttttaaaagaaaacggacaaaaggtcaaaatctttgtttttgcaaaggaggctttaactcctaaattaaaggtaatgtacacagggaatcaagaggaataacatccaggccggatgcccaacgtgtccctagttgagaggtatgaaataaaccctaactgtaaggtcatcaagcagccacaccgtggcattatttataggtgagtagattgattgagaaaatctttctggtctctcctctaactgaactcccatgaagggagtgcactgtcactctccattgtgtaagatgtggggaccagagaaagagatctcagagattctcaagggtaggttaaaaaggtatgtggagataaatgtctggggcctaaagtagatatgaacagaaaacaagattcacaatcaggcgggagcagtagcgcacgcctgtaatcccaacactttgagaggctgaggcaggtagatcacttgaggtcatgagcttgagaccagcctgaccgacatggtgaaaccctgtctctatgaaaatacaaaaattaacagggcatggtggcacatgcttgtaatctcagctactgaggaggctgaggcaagagaaagcttgaacccaggaggcggaggttgcagtgagcggagatcgcaccactgcactccagcctgggtgacagaatgagactccctctcaaaaaaaaaaaaaaaaaaaaaaaaaaaaaaaaagattcagagtcaaaagacacgggcttatttatttaccacgcaaatatatgggtgctggctgttcagtcttggaagctgcagctaatgcagagtggcctagaacccaagcacagtaatagatgaggaaagccttgtctctgctctctgagtggagatgcataaacacccgcaacacaccaggattcaccgagtgtactgcagatgctctgcaaactgctccaaattgatctgcccaaagggactaggtcagaaaaaaattggagaggggcgtcaagaaaagcctcagcgaggtgagatttggactacaccttgaaagatcagcacaaataaagaaaggtggtggagatggggaaagaaagatgacttccagggtaaggaaaccgtgaaagcaccaaggggaaaaatcacaggtttggcaactgacaggaaccggaactggatgtggggtctggctgggtctgaagggccttgctatgacctaagtgtttgtatccctgcaaaattcatatgtcaaagcctaaagccccaacatgatgggatttggcgtcagagcctctagcaagtgatgaagtcatgaaggtagagctctcagggataggattagtgcccttattgagggaataaagagaccagagttcaccttctctctccaccatgtgaagacacaacaagacgtctgcagtctgcaaccccaaatgagggctgtccccagaaccggactgtgctggcaccctgatctccgtcatccagcctccagaactgtcagaaattaatgtctgttgtgtgtaagccaccagctctatggtactttgccagagcagcctgaaccaagagaagccttgagcctcatattttcctctgagtcgggagccatcacagctttcggcaaggataaagccctgcgtggacactagatttgtcatcttgaggaaattgctttacttctgtggaccttgggcttctcggtaaaacaaaatgaagttgcggaaccaagattcacttcttgatctgtctgactccactctctgccacagcaaaaatgctaacatctgcctatctcagatgttgtgtggggatggtgggaagttaattacttactcccagatcatcaacaaagctgaactaggatttcacacagagacagaaagtacgcggttccaccaactggcattcaatgtgtagtagcatgctaaaatattttaaattagaccatcctaatgcttttggagactctaaaggtctttctcatttaacacctgttattatctctaccaggaagaaacccaaatttaatgatctgtgtctgtgataaagtttaaattatcatcattcttcttctaagctgcaaagatgtgtgactaggcaggctcaaaaatttctctccaaagagttgccctttgaagagcagaatgaccttgggccaggccccggtagactggcttcctccatagtgtgtaattcaccccaggagcagacagcctgaggagcaagggggtcagtgggctcacacagcccagtgccagaaaggccagagcctcacacctggaacaactgggccgcggtcttgaatatcacctggacccacctctgtctctcgtctctctctcctatctgggtggcttcatcctcccaggccttgggttttcactagacaggacaaaatcgtggccacaggtggtgcttgtctcaccatctaacagctctgccatcagaaagaaggggcggtgatccccaccagctccagctagaaaaacgtgaagggaagacctatcttgtgcaggcctatgtcacagccacttccacccccatggctctggccaggtgggaagaactgtgattggcagccccacagaaccatatggtgagagtgtgtgtgtgttatgtgtgtgcgcttgggggtggggggtagggagtgttacacactagaacatgggcgttcttccgggatgacccaataataaatatccattgcacctggccgcaagaccagaccataagctaagtatattgcatccagcttatacaagttcttcggtaagccaaatttataaagtgcccactattttcttttctcagtaattctggaaaccttatgttgatagtttgtagaaaaactgcaatttaagggagaaatgataaccatttatcattctgaagatactgctgtgagtggatgccaaagagcccttaagttgaagaaaaactggggaaggcatcttttcttatcattccaacagtgctctagacagggcgaaataaggcaactggaataggtgaaatctgcctacttcacccctccatagctccaataagctgcatctcctggctttcctcctctgctctctgcctttccaaaaccttcattccctcacacttgagctccataagaattaggaacaagggctgatttgaccaaatacccatcatttatagttagtgtgactttaggttatcattctctcctgaagtaagcagctaaccccaactctaatgccccattctgcaataagagaatattattaaaaacagcatttcttgatatcttggagttacagtgaaagtctcaaaactgaagtcagtggatggcaaaaacttctttccacagagagatgctaaatactcaagacagaagggagtagtcaacttccccaacccctcatttacaagaaaagactcccctttgggaggccgagatgggtggatcaactgaggtcaggagttcaagaccagcctggccaacatggtaaaaccccgtctctactaaaaatacaacaaaaatagctgagcgtggtggcgcatgcctgtaatcccagttactcaggaggctgagacgggagaaatgcttgaacccaggagacggaggttgcagtgagctgagattgcactattgcactccagcctgggcaacaagagggaaactccatctcaaaaacaataaaaataaaaataaactcccaagaatcccttaacaagaaggactgacaagaggaaagacatctcactctctgtttggagcctcctgaggtatagagaagtgtggacccaccctgggttacctctggactggaaagtaaaagaaacgctgagaaccatgagagccccacatggcccaggagtttagaaggcctaagtgaagagagaaggtgtctgccctatatgtggagcagtcccaaggctggagtatggatggcgttgcccattacagcgaggtaagcatgggcaatcagggagaagctggtggtttgaccactcatgccactgacaggacaaggcacttcccaataggtcaagagggcagagcaccaagcttgcaatgtctttgaaggactgtgcccgagagaactgcctgccaaggaaagaagaggatgggctgcccttccagcatgggagttgagggaggtggaaccaagagatcagctggacaggaagacatcaatcatgtcagggtggcccctgacaaatgcacccttggagagggccaatatctgggcacctgccatgacagaggaaacccaacagccaagagagatctagaaagagcaccagctaatcaaatggccattggccgctttcctccactgtctccttctctcaccctggaggagcctgaagcaaagcagggagaaatggtgatatgaggagaatgacaaaacaatgttctctatcttcttcatggcttgttcaagaaccatgagtgagaactgtgttgagggtgacagaaagagaaactttaaactgggggaaaattatagtttttattctgattgagatttctgtaatgcctgaagaagacactgttctcctttgaattcatctatacctaaggttctagaacctgctcaagatgtcaccaagaagcaggagaggataagctgaccaaaagtgtttgaaagcagtgacaggagagacacagagcaggttccagcttctgccctaccaaggtcgcacaggtcaataaagtgatgaagctgcactgacaccttccattatgcagtgaaaggctttctcttgataaaggaatttgaaacaaagtgagtgagagggaggagcatgttcacaaaacaaaaagtgctaacaacaacttcccacaacctggcacgagagaactccagctgggaattgctggcacttgagggagacctcgaaggatgaggaggttttggaaaggtggaggaagatgaagctattccaggtatagacaataacatgagcagagtcgcagagacaggtccagagaggaagaatgatctagttttaacagtcttggctccatggggagttcttgtcagtgttaaaaccagaaatacagtgtggagtccacacacggtatgcttaaatctaatctttaaaatgtggattttattctttaaataaaaccatgagaggcttttgggcagcaaaccaccattatactaatggtatctgtgttttaggaaaataactctggtgacagggtgtaccatccggaatagtgagagtagcaagaagccgaatgcactccgattggtcaggaagtgaataccatgtggataccaagagacaaaatcatggctgtggttccagaaatggaaaaagtaagactgagtaagcagataagttagaggtaaggtagacaggactgaccgcagcaatcctcatagacgtgtctctgaatacattactgcggtttgaacattttcccacaggacttccaaagaaattccctcatttcctagggaaacctagagacccccaaaaggccagccatgctctatgatgcccaaagttcagcccggctaatgaagagtgaacctccacctgctgatggggcttttgcaactcggggccactgtttcctcaggggtatggggtcatctctgctgcctggcagggcaatggcagaaacagctctgcctccctctccaagcccccagcagagccagaaaggatctctattccagtcccaatcaggtagacagcagaaggctgaagcagcttattactctgcccacttggttcagcatggcccattcttgcttctacaatagcaggcagaaaagagaaacacctgaaatgtatgttactgtgataagttttcccacctgaagaaaaccctgtgactaccacagccaggaaagagcacgatctcacaagctgtcagctttcacttccctttcacatccagttaaactcctccacagatgtcattacctgggctggggaagtttcctacatattcctcaaaaataatactttatgcagtgccatgctccaaagcatgatttttatcaacctgtgtttggagatgactcccagttacccttacaaaggcttcctatgagttgtggcagttagatcaagttggatacagaagcccagacattctgaagaggaaaaaaatcaatgtaaatacatgtaacttctacataaaatatgcttttacctaattgaaaagtcattatcaattagccaaatgcaactttaatcagacatgaatgattgaggaattctatatttagaagaacacaggttggcatttgaaaaccttcatgtctcatgccattagccttgaaaaccttttgccaggtaactgaggtgtgagttttaattcccagtatcaaaccaagaataaaattattttaattatggtcaactgggtaaggaacattgatgatctaattgccgagctgtaattctgtattctgtccccaggagacacacacctcagccaagtgcttcaataattcattaaagcacttccctgtgcatcaattatcaaatcatgtgccttgattactttacttggggaaagttacccttgcgaaaaagacttttaccaattatcaaaacacagaacctctaacctacattatacgattttcattaaaataatacaaaattctacaatagctctcagttatctatgtgccaaaaacaataggcaaaatggttacaagggccatagcctgaccagctttatacaaaattatgaggtaggtggtttggggttttacctccctaattctggttttgccagtagttcatcataaagaattgtttcaattttctttaaacatcaaaatatttgtggtccaggattagatcgtatcaccttcatattcccatgatgccaaactccatgctttgaatatagagtacatagcagatcatcagtccgctcttttccacaggtcatttgtgactttgatcatccatagttattgttttatatatactgttttacccaaaaattcaaatgaaaaaaaaatatgaaagaaggtaaaaaacagtgaacaaatgtataaataagagtctataaatagaaactaaaaataagatagtctcaaagtgtatttccttagatacatagagaaggcattccataaatatttgttaggtggtaaatcaacaaaaaaattagaagagaataagaggggagaaagcctccattttcagcttagtggccaaagattttgcccttacagccaataaaaaggagtaacattcaatgtgaaatttaacttttcttcctgtactgatccacctccctatgataaaagcaattctaaacagaaaatcactggattaatgatggccagagaaatatagatgaggaaaggacaattcactgattgaataatcaatcctggatagctaaaaactaccttcatggggtttactaactcataataataaaaagcaatgagtatatttatcctctgtaattatttccattaccaacactcttcttgatactgtagttttaggaccaatatgaacactagaattgagcacaaaggtagtgtatctcagtgcaactgttttttattatttttttctgtacctactatggaaaggaatgcctccaaaacaggaacttaatgtagtgcatatttgtcagtgtttgctcgcacagcatggaaacatgatttctatgtttggaaatctaaggtgagggaagtgggggcagttgagagatgggggggcacagatctgagttctgcctcctcccgtcacacctcccacctcccacactgcacttgtgatccagtgattgtgaaggtgatcaggaattttgaatcttgaaaggatggggcatgggcagatgtagacaaagactattcactgtagcagcagcggtgagggtggagtcaagagcccagcaacgtggcaggaagtgtccggtgggcggagtccagacacgcagtgtgtccacagggatgtcccagggtcagctgtcctgccacactgttcttgtgggggtggcagaggagtcttgcccatgacttcaatctcttctttcccacctgcttaccacacacagacaattttgtgagccacctgtggtgcttgtaacaaattccttctctgtttaagttagacagagcggctttcttttgtcttgcaaccaaagtccctgctttgtaggagaataaaatacaatgtttaaaggcataattttctgggaaacgaaacaggtgcaaattcaaaaattagactcaagtttagaaatagcatgctttccccatctttcacccctccctacttacaaaaacttcctctgatgtatataaataactcatataggcaccaaagactccactcgacagcctgtttaccctttgaaaaatactttttgcctaattataataaaaaagtcttaaatttggtatttagataaattcgcaggtaatcaggttaacccatcaccacagggcataaatgaatgagggggagaagaggagaatgccaaattagattatccaactagagcatctgtcaataaatggagggaaggtgaactaatttagagtttgttttattttacagactttaaaaagaccaactggctttttaatttagaggtagtcattccaggttgtcataacagccagagagttcataataaagggactattacagacataagattacgttttgcttcaataaaaaggtgagaaggcacaggggtgaatgtctgcaacccacaccctttgggaggggccccaaggttgcaggtctgagccgaaacccaatatgaatgtagcagttaccgaaggctgccagagttgttatgcctgatatttcatagaggatgtaaatattgaagactgagagactacctgaagtcactaatctaattctcagacaatattaaatctatgtaatgacagttacagccttgaatcctcagatattatgcctatagtatcttaatatcactatgaccttctgcaaggaaactgactaatttaaataaaaattcccttaatgttcctaacagtcttgattaaactgtgagccattataaagtcatggccacatagaggtgtgaagatagtgaaaagtgagtgtgagtgtgtgtaatatctgaagtattatctgaaattgtttttctgaaaatctgcttgagtccaggtttttaagatgccatggtctgatagatttaatcattagtaaaggtctttctacaatacagaattgatatatcttcagtccttacaggagatgagttaagtaaaagttctagcatgcttagtcctaaaatacaatgcctgtttgaaaatgttgaataacctttgaggcaaagagtttgttctaaaacttaaaacttctaaccagagaaaaattatcttttcctcttttgaaaacaggaaggatcttggcaagtggcacaagatccttttgaatgaaacctgaaaagcaaagattctttttatgtgaacatatgcaatttttcaggaagattttaaacaaaacaaatacataatgttgacagtcaaatttctgaagactagttgtcttaccctatagaggtatgatcttaactcaagttccagaggcaaatgcttcaaatattttcaaagttttaaatatttttagcactaaaaataaacacatccacagtaagtcagctgcacaaaaaaaggaaccctgtaaaataaatttaaaagcatccgcaaatgttcctgtttgtttttctctgtactgcccaaattctaaagatatgaaagtatggttaatgatgtattttatctcaaaatgttgagtcactggaactgttataatgttaaggcacttcttaattcctaatcagacggtcatcatatagaaagtctgtaaacactgaatttaaattctatttcaaaattagttttaaattcatcagtggaatcgattgtaggcccttattctcagtctcaagtcttctgagcattcctctttcccttccgccagctgctgggccctgaacagcagttctcatattaggacaagcaaatctggataattctcttctatcattgctaatcctttctctgaaaatttcattatgaccaccatcctgctcaccattcatccattcatttgttgactcacacaccaacatttattgaacagctaatgtgcaaggccactattttagatacttgggaggcaaagataaatgaaagcacaatgaacaggcttagagttcattgtgcagtagcaccatgtatacagaaatgccaatgacacacaatatatagatgtttgaaatggcacaaatgtaactgattcagtgcctggcaaataaatattcctgtgagagacaaagatatgtgctatcgagactgtccttcaatcaggacttgctaccccagctgctgggaggctggaagtggatatccattagctaactgcccttcagggactggctcaacactcttgctcaagacatgccctctccagatcaatccacatccaaagattgattaaaggcatgagcatttatgcccaacacagtgctccctctggggccagcagtccttcaggtgtgcatgaatctcaattctctgcctgctcaatcctgcctcctccaccattctccttccataggtcttcattcctaggatacttcctaaagagacatgctgccacatctgcttccagggaaactcaactggcaacatttcttaaataagtttttaaaataaactctgcccttagctttcttgcatttccatgaagcctcagaaatatgctactggaaatggctgcattaaacagaacattgataatggtaatgataataataatagaatggcgaagatttgacataggatttaccctgtgtcaggcactatttcaagtgttccgtgcatatcgcctcatttaactgttgcaacaattctacaaatcaatactatcgttaatccctttcaactggtaagtagagagaataagacaaatacctagctccaagttcatgcagctactatttggttcccaggcagccccaaagtgtaatctcgtaactactgtattagtccattttcacactgctataaagaaatacccaacaatgggtaatttataaagaaaagaagtttaattgactaactgttccacatggctggggaggcctcagaaaacttacaatcatggtggaaggggaaacaggcatgtcttacacggtggctggagagagagagtgtgtgagtgcacaggaaaaactaccatttataaaaccgttaggtctcatgaaaatccactcactatcgcaagaacagcatgggggaaaccacctccataatccaatcacttccctcccctctacgtgtgcggattacatttccagatgagatttggatggggacacaaagcctgatcgtatcaacccctatcttctgccatttctcttattctctagcatcctaacaaatatcatagcatcattaatacctgccatggaattacacaccttagaaggtcttttagataataacagctgccattcactgagcccgtatcacatgctggctctgttgtgagtccttataacttttacttatggtcatgacatccctgtgagttaggccaggcttggttattcccatttcaccaataagaaaacaggctcacaaggatgaagtgacttactcaagtcagagttcacaagtagcagagatgttctcaaatctagcatttctgtctctaaaacaaagtatctcgaagttatctggatttatttaaactgtacttaatctatgaactatatacttaacctaaaatggcttaaagaatttaccatctttaggatccatcatttttcattgtgccaccttagccactctctaaacacatcagaaatgtagaagacagaatatggccctctgtccattaacacagctatagctatgatctggaactttcttttataaacctagattacttaaacagaattattctctgtattctgtgaagggcttcctgaaggtctactagagcttctgctcaaataaagaggcatcatattctttagtttaagcccaagtgctatgaatgcaccacattttatgtttgattatatattttatgttttaaggcattgatgcaaattctaggaaatcccagttcacaaggtgtaataatatgatgttatatctgtgctttgaagataattttagttttgaaaagaccaccaaggcctttggcccatgagtaattgattaaattcagcaagcagaagtcattcctgtaggtaacataatggactggggagttaggggaaggagggagagtaagagggtttctcatatgtcattttttttttttaatggcagtgaaattacaagaatttttcaccttgggaaatacaaaattataaatttctcctgaccaaaaaaggacccctgaacagttttactataaccaaagtgagccgtgagggaacagcggctccaacacacagtgcacaatgccagcttttggtaacaggaacaaatggacagagaataacgacttccgcaaggcttgctccttgatgggggaaatgcactcactctttgtctctattatgtgctgcctgacaattgttcccagcagtgaaaggcaagctcaccctctgggaatgggttcaaatataaatgactaagagccctgtcaaaggtcctctgtagctgacacccctctcctccacccctcatcccctcaagggcacttcattttcactttattacttttttccctccaagggcagattaaggttcaggaaaaaatgccattataaatggaggttcttgattagaggctaaaatgtctgccctatcttacctcccactcgctttacttctgttctgcctctttccaagattatccttttctgcaattgcagaatcccagtccccagttttgatatttgagagtggcttcggtaatggctgctgtaaggcctctcatgatcgacccctaatgaacatgcacaaaccctggaaagcgttgcttcagtatccatttactctgctctcagcatgacagctgacagcctcctgcactgagggaaagaaaggccatggcttctgaaagccacagtttactttacttttccttccttgtgaaagtcaggttcacccatacaacactcttttccatgctctggtgttctgaaaatagcagtcatttggctttctcgggagagttaaaacaaagaaatcacaatggcaggaggcttgctgttccaaaactttaaaataacaaaaattatggaatgcatcacaaaagaaatgacagatgtccttgaagtgacccctcatgacacagttcaacagccatttaaaaataatggtcaagccaggcacggtggctcacacctgcaatcccaggactttgggaggccaaggcaggcagatcgcttgaagttaggagttcctgaccagcctgggcaccatagtgagaccatgtctctaccaaaaacacaaaaattagccaggcgtggtggtgcacacctgttactccagctatttgggaggctgaggcaggagaatcgcttgaacccggaagggggatgttgcagtgagctgagatcatgtcactgcactccagcctgggtgacaaagtgagactccgtcttgaaaaataaaaataaataaataaaaataatggttgacagcttgaattgggaggagacatagatagaaaagaaatggcttaaattccacaaaataaggttttggctcataccgcgtacattgagccatgttcaacgtgctttctgacagagaaagtaacgttttccacggtgggaagggctgggaaaggcactggctcaactgcgtgttactacagctgacctttgaaatctcaaaatctcttcacctctactatctttctcgattctcacaacaaccttctgaagttggtgactgctgttaatatcttcatttcacagagaaaaaacagtgatgctcagagactaagttattgctcaggcatcgacagctagagagtggcagagctcgagcacaaactcaaatctttttcttccaaagctcatgtgtttttcactcctcacgccggattttagtggcatggcaaattctcagagggtttcaagttaaaattaatttttctttcattatgttaaatctgcttccttataatgcctaaaatgaggaggtctcttttctttggcaggcaaaatggtgaccacgtggttgtcagtgtgttagaattaacattcttttaaatgagaagttgatctaccaaacatgatgtcagttaaacagatgcgcagtgtgacagtgttctcagggtaggtgccacaggtcaattatgcaagcattgcataagcagctcattgttgccagtttctaattagattcatcagggacttattaacctctggaaaaagttacaagttttgcatagaagcaaaatgaaaagaaaaaaagtcctcattcacacaaagtaaaatatgaaggaaaaataaaataaaaataagattctggctgggcgcggtggctcacacctgtaatcccagcactttgggaggccaaggccggcaggtcatgaggtcaagagatagagaccatcctggccaacatggtgaaaccccatctctactaaaaacaaaaacaaaaattagctgggcgtggtggcatgcgccagtagtcactgccactctggagggtgaggcaggagaatcgcttgaacccaggaggcggaggttgcagtgagccaagattgcaccactgcactccagcctggtggcagagcgagtctctgtctcaaaaaaaaaaaaaaaaaagaaaaagaaaaagaaaacagaaaaagattcaccttattcacatactcatgagaatcaattgcgtaaaaaactcctatttcctgggcctcagagacattaatccaatagatctcaggtagattccaggaacacagcattttgtgcactactcttatgtagagagtaccccaaccgcacttagaaatgtactggactgtgggtgggaggacatggggaggaagttggattcctgataaaagctgcaattcagagtttgcaagatgagacaaagttacccttcctgatgccggctttgaatgagagcattgttagcagtaatatataattaagctctgccttcaaaaatcattgagactaataataacttggtagatagtaatttgactagttttcagttttaagtctctacattgcctcttactgtttgtagctagaataaaacttcattaataaagaaattaagtggactgaagtgaacctttatactatttttaaatgatttgtaaaaacaagaaaaaagacttttttttaccatcaagtcagcaaagggattttttttatgttaattctcagtacaggtgaggcaggtaagttcctaattacctgtaggaatgcaaatttgtgtaatgtttaaattgttctggaaagtaatttggaaatgtgtataaaagttttccaaatagtcataacctttggttcataaatataagttctatcctaatgaaaaatgtgcacaaagatttatacacaaataacgtttataacagtgaagtttttgtaacaatctaaatgtccacaattggaagatagatagccaatttgtgatacatttctattaagcatgtcaagttacaaataatcaaatgtatctagtgtccttctcaactgagccctggccccagtagggaagagcatgtgttcctgacatccccagttggaatttggaatgcattttcctaaagaaaatcatactataaatagtcaatgtgtttgcaggccaactaccagaagcctatttaaccaaaaagcttaaaactttaggaggaacatgaaccttagaaaatataatagtgctatttcaacatcaaatccaaaaatattataattattacttgaaaaaatacattttcactgctaaacaactgacttataaactggcatcaggaacataatcatctcgttatctgtcttctgtgtacatacacagaacataaccatatgccttttgaatactttccaagataaattctcaaagaattaggacaactgtcaatttaacccccaaatagtattattcaacaataatagcaatagatttttttgtaatatggcaaagaaaaatgaggctatcctgtaaagtggatttcagtttgttgttttaattaagttatcatgtggaattggtagtctagtagcatgagtggacctcagcaatgaacctttcatttgtgaagaatgagttaaaatcattcctattattattgctaatttacagatcaataccacaataatgtatttgttgccatgtacactgcaggcactactgatgaacaggaaagtttaaatcttaatatgtctgataaatttaatctcaaatataattctgactacatgaattttagaagtcttacattgtttataacattacctgagagtaattttattctgtcatacaatatatcaaattttttctttgtttctttctctcgtcctcgctctctttctctctcttcctctccctctccctttgtctctctgcattgttcctgacataggtttttgaggactacacactgaaaacttgtccatgaatatatgtcacaatcacctttttattcattggcatgggaaggcaataaaaaagcgattacattttcttttgcctatagctttaaagcagccacttgacctatggcaaacatgaaccaacctttatttcagaggtttgcaatttcaggggtaaacgtggtgctgcatctcccttgaagactttattaaagagaactctatcacgcttatttgagttcttatcaactatcttggcctcaaatgtatgttttccctttattactcctctttggaactagcaatacattctattccattatagagccctctttttaaaattcatattttcatatttcttccacccaggtagacaaagttaagacacgtgcacaaatgagaaagtttgtactgatcaatttttttgtaaacagaagatgaattttctctgtgtatgcttgtgtgtatatgtttatatatatatttattattattttattctaagtaattccgttgctgaaacatttaatcctactttttctgtttaagttgctatattattcccaaaggttgtgatggatgaatttattcagcagacattcactgtgttcccgtatgggccaggcactatcctaagtattaggaattgggtgagcaaatgagacattctctgccctcattaagttttcagtctaacaaagaagatgaacattcatgtaatcttcacataagtatctttttatattgcctcacttttttgagggtatgaggacatctatgtaaatcagtttccaaacttacaagacatgagggatccctaaactcccagggagagtgcacaactaggggtcttaagattgggttttcacccagctttcttcctctactaaccattaagtatgagagctacttagagctcagtctgagagaccctctatctacatacacctcaccctccccataggcaattgtattatgtacatctagaagctttaatcattatgtatacaaaggtgaaggtgacacccatgtttatgtcttagtccaaaattttttttgaactagatttctttggattggattgacatatcctacaaatgacttggcttcttctcttgggatatctttaaatcatctcaaaagttatgacctatgtctcgtgtacatgaccctgaaaacctgctcctcttccagaagaaatactacttcactgaagcttttcagatctgagcttaaatgtcacctccctagggtagactcatctaagcatccttcctgtcattaccttcttttataacagcccgtgtttccttttcattgacctgtatttattacaagtaataattctatactcgtgtgaatattcatgtaattaacataataatatataaatattttcagaaagctctgagtataatggagctgctattatagcctcaatatttcttagaatagacacttaagaaaaatattagctggatgaatgaatagacaggggaaacgtctcagttatctggattcagacccttctgggaaaagagaagtagttgctggtttctttggctctctgagcaagtttaagacctcatcttgagtcaacaagaagtctggcacagccaagagagttaggggatagctggaaaggatgccactatctaatgcacattaaaagggttatttttaaggttctccaaccttgtcctccaaataactcattctgagaacttctttggactgcaaggcaaaagttactggaaatgatagggagtaagggttcttctccagctgccagtggaaacagatgttagaacttcctggacatggtttgccactctagcagaagctactggaagactgagagcagttaccatctgaaaggagcagccactgtcatttgttttcaacaaacaccacagagagtagctgccagtgagaatcttcatcattaaaatggtcactgaaagtctgcttcagaagccacagctgagggaagccaccaccaagaaatactgttgggtgccatccccatcccctgaaagcaactaaaaggaaaaaacgttaacaagttgaattgggggagataccaagatttcagtccttgtccctatcttagtttatgttattttactattgacctgtaggacaagacagatttcagttctttcaatataatcctctttttgtaaaaggaagacaatttttcaaaggaaacttgatgaagattgagagccaaaatatctgaagaagggctcacattaattctcaggatattgaacaagacactagctcatagaatcccaattgaaggtgcacctcagaaaataacaaaagaaagtgaaaaaatgtctcattcaaaatgagggagaaataatcaaatagactctgagcattagttctgtaaatgtaagactgacttattcaccattgtggcccaagagttcttagaataggctctcaaaaaatgttgaatgaatgaatgaatgaatgggagagtagatggatgaatgagcaaatgaatggcatccatttaccttaagatatattaactaagaatagaaaatatgattcactttaagtaaacacaaataaagtgaatgtgttgaacaagccagctatagtttacaatatgataatatttatttcccccaaataagacactttctatttttctatgtttttaagtttttatgtaataaaacaataatttatcttgtttttaatctacatgcaaaacctagaggtctatcacagagagtttgtcaaactgtttgatttgtcgtgctgacaaggaatcattgaaacaattttttaagaaaaacaggttaggtacagcatgagagtatgtgtgaggctgaggcaacggagaaggaaaccatatgctcactcaggttgtcgagaatctttaacacttggcaaaaatgtcacttaatttcttgctggaaaggtgcgacctcctaaagtctttcctcttcatactacgtgagagcatcttttggaagggaaaccatggattaatcttacttgatctggcatatttgggtttgggagttttttaggcagtcctaaaagcctagaagatgaaaagaatgagggccagcagctgtctacaggacagagcactggacagaagcaaacatggacctcctagccctcacatcaccttactgtgagtctccttggcatcttgtgtaggacaaggtatatttaagattattggtctttcagtattatcttcaagaagagaaaataacaattggccacagggaaatatgattgaattggaggttcataaactttgttagactcaagttaaaagagatcacttatagaaccagtctatagagcaggataactatggattacacttgacaaaggagtccagaatatatagggtaataacttttcttaaaatcctaaaacatatgtgtattagaaagggaaaaacaaactgttttttcttctacattcacgcttatcacggaatacttcaccgcttggtcactaaaatatacgggaatttctcctcaccaacaaccaattctccagtagactccagatgggcgtcctgtgattctactgattctgacactatctacctggagatagcaccagatccaacaggtgaaaagcttagtcccacaagactgtctcccacttcagacaccaatcacaagtcttatgttgtaacctgtacttcctactagccagcaataagttgagaattcccatgaccccttttacgggttctattactttgctagtaaggctcatagatctcagggaaagattttccctatgtttacccatttatcataaaggatattacaaagaatacagctgaacagccaaattaaaagatgtgtagggcaggggacaggggaagaggcagggagcttccatgtcctcaggtgcaccatcttctaagcaccacatgttcagtgattcagaaactctctgaaaccacatggttcaggattttttatggcagtttcatcacataggcatgactcattattaactcaatttccagccccccttccttctccagagaatgggggtggggctgagttttaagtttcaagcttctaatcgtggctcagtctttctggtgaccagcccccattcaagtgttgccctttagaacaaaggaatctactatcacccatgaaatatcaagggatttaaaagctctgtgtcagatgctcctgttcctcaggaaattacacaggtcttaaaagctctgtgtcaggacctgggatcaaagaccaaatattagaacctaagattctcctagcacccttatggctcaggaaattacaagggtttagaagctttgtgccaaaaatcaggggcagattatatatatatgtatgtatgtacttacatatatatatatatacacacacacacatatatatatcacacatatatatcacgcatatatacatatatatatcattatttcacaatatatgactactgtcacaactactcacaaataaagacgtgtgcttcagttcactaactaaaatcaagaaccttctttaaggccaggatcacatatttattataacttggacaggtatggccacaagccatactgtttctgtagcaatgggatcgttgagaatgcacagaagataaaaggaagttgggcaatgacttcattataggatcagtcacaagttggagacaaagaaacccagtttagtttccaaaagggcaaagcatattctggtttgattcacccacattggcatccaaagagactcatcttgtcaggggtagggagagagtgctgggtcacagcaacatgagttctaagtagccccaatatttaaggtgtttagatagtgttcaaatgacaagattctggatgctctgcctgattagaccaggacagcagccagctggtggtagagaggcaaagaaggtttaggtaaccaaggagaaaggacagcaaaatctcaaccccagccaatctgagccatcttcaggttcagggaatactctagtcctagccttggcaagtgtgacagcttcaggattttccacataagaagtgtctaggcattgcccactggttggggacttgtcttaaagctacatttacagagcatattaattacagtaaccctagtagcttctatagtaaaccccaaaacctcagcagctcagcatattcgaagtgttttttcactctaattccaactgagtgtttcaggggcagccttatttgaggggcctacatttgagtcccaggttccttccattttgagactgcatcagcccctgtagcctcagagtgttcatttgtgatagtgaagggaaagatgatgtggtagatcacatggaaaaattagcaggccaagacttggaaatacattacctctgcccacatcccgttgacttaaattcagtcacgatcacaactaagcaagacagtgctaggatagagagtttctgggtgagcagccaccttccagcaataactctacactgtgaaagggggacataagtttttggtgaaaactagcagtcttgcagcattgagtttacctagagtatatgtttattcggggtaagggagatttgacaatgagaagtcagtggatcatagagatagtaagtgataataaaactgttttccggaaaggcaagaacactaatgtgtttatatacataggactattataaatttttgtaggttggatttttcattagcaccttggtattgtaatggagttataggaactaataccatgttgctgataaagaaaccggatcaaaaaaagaatgagtaccaaaaatgatataagtccagttgcacctatcccatgggtgtgttatgataaaccatgatttaaagaagagccaaggaaaaatcacataaaaatatatatactagaggagggagaaaaaattaacacttattgaacaattactttaggttaagtactaagctggacctgtcagttacccagtgctatgtaatccaattttcacaaaattaacgacttaaacaacacccatttattatctcatggtttctgcaggtcaggagtctgagcacatcttaatgggatgccccgcatagggtttcacaaggctgcaatcaagacacaggccaaggttgtagtcccatctgaagctcagctgggaaagtatccatttgcaagcttactcaggttgttgaaagaattcagttctgtgtgactgaaagcttcagctttttctgggtgttagctggtgagcacccacacttccttgccatgaggggtgccccaacatagtcacttgctttcttcagcaagaagagagaaattccagcaagctacataaggctatctgaggtaacatagtcacataatcacatcgtgtacctcctatcaacatcactgtatcctctttaaaacagtctggatggcccacactcatcttcccactatgcagtttgacaaagttgtctttaaggttccaccttcacctctgcatttgggtgtcccaggctttcgtactgattcttgcaaagatggtcatgaatatctgagctctcaggatagcacctcatatttggaggccttaactcttccccaacaacccattcactcatttaactgccttacaaagtgactgactagctaatcagatcaactgaattgtgctaatagcttattgcattctgccactgaggtaacatatttgtattgttgaaagggcattacaagagagaatacctgccagatttatattcctaatataatttttatgtctttgctttatggaaacctgctttccaaagcaggtctgccaaatattctatgtagtattggcaaagtaatttagactcttcataaaatgaggagagaagattcaatgacctctaatatcctctccaactctatgtttttatgtttttgttttattcttttctcagtaacctccaataacttcatacaaggcaattgccaaactgctctccaggcattcaagatccaatgtaatctggcccaaattttccttcctagatgtattcactgcaggtattctatatttaaggcaaactgtcttactcaagtataccacatgcattcactcccagaatgcttctccttttcctcattgcatttccttgtcctacctttcttcaagccaagaggaagactcccctcctcgttgacaccttcccatccactttggcccatatcctactctaaattctggtaactactcaatctccacactcggtgggcctttggtttgtctaagtttcctgtgactatttaattttaagctctttcagcacagaaaatgtctactgtatttttgtatatgtcatagaatataagtataaatagtttgaattcaaaaaaatctttattaagcaaatataaaccaaagaattaaaatggatggtaaatttcagccagctgtgtgagttagaggggaagatgtatggagccttttatgtttttataagaatatacatcattatacattgctgtatgctctcctgacagagacagtttcaacaccctatactcatcctatcagaatagcctaaattttcccatctcccaaaagtcactcctttcaactagaatgtctttccccattctatatccaattgtaaaaaaaaccctctccattcttcaaggccaaactaaatttctccttcttctatgaaaatgttcctgaccttctagttgaaattaactctttctccttgttattgctttttcactttctgttggtgttgtactatagtgagttatatgcctctccaagtcatcgcaactagacggtaaactctttaaaaatgggaagtacttctatcatgtttttcttttgtacctttcagaataccaggacagatcctgctgtaagtagtaggtggtaaaataacagtaggtggcaaaataacagtaggtggtaaaataatatttatgaaattgacttgggaaagatgcctcagtaaatctagaacacatttttacaaaaagtgactgatgccttactgagctttcttctacagacagaatttaaaataatccatcatctaagttcaagcaaagctatgttttatttaaaacaaaaacaaaaagcaaaagaacccacctgaagagagcaaattatgcaagtggaaagctagtcaggatcctgagaactttgaggtgaaaaaaaaaaaaaaagaaacacacagagaatggttttacaaatagttttcctaaaatgtgattcacataccactgtggtgcttaagtttgtctaagtggtagaaatttacagtttttatttttagtattttgtatttattttgattgtaatggaaagatatatatacttaataatagtttcaggggtattttgctcatgatgaaactcaattaatttaagtttaaagaaagaagtaaataataaatagttcaaatcctacgggatgtaataaaagttgtgagaagactacagaaatgactgcagcttgagaaagaatgaccaatttctgtgttctaatcagtcagtcaaggtcatgagagctcattggaacttctgatttctcggttctcctggctgatctcaggccactgtctaaggctctctgaatgtaaatcatagatttccctcaagagttttcagcccttgagtatttgctttttaaaagactggattctatcactggccacattaatacaatttctaccaacaccccagaatttcctcagcatgtaacatttcgtttttgcacagctgtttcccgaggccacgggctcctgttgcaccctggagcttgagtgatgaggattctgtgttgttgctaaagtgcctctcttcttctttagagaggcctggatgtcgatatgcagcaaacgtcccactgtctgtggtgcaatcgacataggtcaacttgtttcgaggctgggtctctgaagggccaggtccaggctgcattttcctcccggttgtccaggccaacgatccacattgtactgcttatgaaggacagttgaccttcaactgtctcttcaagggctatggtttctaaaacaatgccagccatctattgaaaacagcttcatcagttgcattgttatcctcaatgattttcagtttctcatcaacgtagttggtccttcttgctgattcttaaataaatgatgatttactattcttcttctgacaacttgaagattcctgacattatctttatgcaatgagtgactggaacaactcacatctgaaattaaagccagctcaaaagcacaagtcaaatcagaatttgataaaatggacaataaaaaatggtgagaaacagagaaaaattgttttagtataaccttccacatacagcattttttcccacaaaccttcaaattattttcaaacatctcattatatgggtacttattttccagccttttcactttttttgccttcttccctatccatgctttaaaaggaagtaagaaaagacattgcaaattcaagaaaacacaagaagtcagggccataattgcacggcaggaccattattgtttgttgctgttcacttcctagaaacaagaaaacaatctccttctttttgtggactgataaaacatgaaggttcattgactgtggtttctactcttctgtctggctttacaacagcttcaaattaaaagcaggcaggacaaggggataataaagtgtccaacctcatcagctttcagcttttttattctttatggtaaaggggatttcagtgtttctttgtcaagcctatttttaagaaaccactttcacagcttttacaagaaaatgtcactgtgcctctggtgcaggcaagggggaatctaatttcattacagttaagtgcctgactccccattaccctccataatagtgtaacatggtatattataggactttaataaataggaaggatgtgggttgcagcacattttagtagaaaccaaattactttgggccacacatctgcctcctcagttcatcctatttgccactgtttcacaacctaattacaggattttctggaaattgctgtccagcagtaactggatgacctgctttatgtggccgagacaggcagctccaccgacttcagtcttcatcactgtcaccatgtaattgcattggacttccatgttaatccctgaaggcgggaagcaaatgaaatattataattaccttttattcccttgcccctgaagcctggattagggcagtgtgcatccaaaggaaagaagtggggactgcttctaagagtattagcgatggtctgatcaaaagctgaggatggtctcatcttcagcttttggcctgaacacgggccacatcattaaagccctatgtctcatccacttagcaaagtgtgtggcccccatctgtttaatgcaggatcactatgagacacgttggaaagatcctggaaaaaaggcctattttatcaatatgtatgtgcaaggcattggaatttgaaaagacttatctgaaggaaagggataggtgaactaaacttaagaagagaactaacattttcagactattcccctgaaaatataaaagtgcactgctgttctttttgagaaaattgtattggggtcacttaattgacatatctcactaagaatgacctgaattattgaaaaggtacatgaatttaaggctaaagttttctagtcttttttaaaaagtctttaaaatccaatgattctttaatgaatgggataaaagcaattctctgaatttaaattctactcatgagcctgtaaaagatgtaaaaataatcctcaataaagcaaatcttgactttgaggaaggaaatggctctttgctgtgtttcatttaccgtggtaggggtgggttgagtgtaactggagactaatccatggtgacctgttgtccctgattactctgcaggcaatcctttgaaaataccttaaacatggagttcacttaatttctacttccctcctgaagagttctaagctgggacaagagtctgtgtccttgagaagtatctttggagttgcactttatgggaattattgaatagtactcaatttagatataatttcccaaaatgcatttttcaatggcacagcaggaagcatgatgaaaaaggggtgacattccctttaactaggcaactcctccgataatagaaacaacacttctcaattttaaactgctgctttcactgtatgccaactttatcattatgtccagagctgaggacataggaacaaacaaaatggcaatatgtttgtcttcttggagctcatactccagcagaaaatcatgcagaaaagtaaacataacctgcaaaaatgtaagatctgtgagtaaatataaagcaaggtaaggggacagacattacaggcagaggggttgaaggagttattttcaatagggaagtcagaaattcttctctcatatgatatcatttgagcagaaacctgaggcaatggagcaacccatgcaactaacaagaggtagagaaaatccaaagaaaaactttggctgctggcctggcatagtggctcatgcctgtaatctcagcattttgggaggccgaggtgggtggatcacttgaggtcaagagttcaagaccagcctgaccaacgtgaaacctactgtcatggcatagtgttgatgagaaagcactaagtagactaaaatctaagctgtctactgttcctgctcatacacatggtacctactcttcaatgtccagcagcctaacgagctgacccaaaaaaaatggccccactcaaagatgaacaaccagataggaacgtgactgggacttgcagtagataatgcagggaaaagttgtaacaaagacaaatgaaaaatatacattagaaaaactatacccacaaagaaaattaaagatgaacaaacccatctccatgaaatcaaagaaattatggtctcttgaaaaaaaataaacaacaaagtttaaggattcaagaagataatgagtcaacaaaatggaatgaaatgcaagctggagtggtcaggaaaaaaaaaaaaacaatgataaaggaaaagaaaatggggtcaggaatcatattaactacaatttattcattgcaagcaacagaagtggactcaaaccaacttcaacgaaaatggaatttaatgacaagatatggcagagctcccaaggtcaaaggaaagactgaagatcacacaaaggaacagcaagttccagaggccttgttgaaggaaaattattatagttttacctggtgtcacccctgtaataaatgcatgaaaggtgactctctagcttcatccttgttctcatccttgttcaagattcaagattgcaggagattaggtcatgtcctggctcttggttataccaaggcagtacatgaagcgcttcagtataagaagcccatagagatcttttccacatctttgttagaaggtaagaatatattgatttatcatcctccgagacttgcaccaaacaggggagaggaaattccttaaagggaaataatgctgccgttcgttaagtaaatgatagaatgcaaaaaattagtaactatccactataactatccactacagagacaggatagacaggtttgagaaaaaaattaacaggggtagaataaaaagcaaaaaatgaagggcttagcaggaagtagaggccagcaagcgaacaaaacttcatttgtatttacaggcactccccattgcttgcattactgcctgagctccatctcctgtcagatcagcagcagcattagattctcataggagtgtgaaccctattgtgaactgcacattgagggatctaggttgcgtgcaccttctgagaatctaatacctgatgatctgtcattatctcccatcacccccagatgggaccgtctagttgcagaaaaaataagctcaaggctcccactgtttctacattatggtgagccgtataattatttcattatacattacaatgtcataataatagaaataaagtgcacaataaatgtaatgcactcaaatcatccccatacccccttgactttggtctgtgggaaaattatcttccatgaaattggtccctggtgccaaaagttggggaccactgctcaatgatacaaacattgtgttttatgctttataggttctgtgtatacttctgtgttgcacatatattgttcactgatgagattgtaaccaatttgaggacacagactacttctgactcaaatacttatgatctgcagcatattatactaaggaatatagaattcatattttaattttgttcaggagctgaaaattagacagcttttgtttttaagaaaattgagtgcaagcataatgacaaaaactagcatctaattgcttccaaatacattaagaccaaaactggcaagtttaagacagactaaaattggaccttattaatctttatttcacaacaacaaaaaagtacatttattgaggttaaatatccccagccttttacttaaaagaaataacctctatgactcagaacatctgagtcttagatactctaccaaaaagtgctgcaaccagatactctaccaaaaagtgctgagaaaactaggaaaactaataaagattgcatagaaaataaactctatcttactataatgcttataagtgaagtaagagaagatgcttctaaataatatttacgaggaaaatatatatgaaaatgatgcctaaaattgttactaaaatgtagcagctaaaaccaaatcacattaatgatgcttaaatcactggcatcctactcagccattagtacattttataggtgatttttacactgctacttcacaataattacttatcaacttggaaacaatctttccctgataattctggctgtttttgtttaataagtgctatgcttaataagtgcttaagtggatacagaatcccatatggcctcttcctataaatgtcactctgtccatcagcaatattgataagcttgagaaaaacaatctacagctcaaggcatcgtgcttagcttacagaagagaaacttggatgctattttcttttgtcttgtaaaaatgaagactatgttcttcataatgattgataggacatacaaactaatatttagaaacttcatttaacagagaatatattttagaatgcactgggttaggtgagatttgaggataagctggtgagaaataaactttttgtttcatcagtaggttatgcctaaactctcctgtttctggaaaaactttgctgtgtaagggtgttgtctggcttggtttttgcttacatgtgtgtgtgtgtgtgtgtgtgtgtgtgtgtgtgtgttctgtcagtcatttgagcccatttcaaagcatctaccctgaagaaactttcacttccttgattaatccaggtatagatcataaggacttgaataagacaactgtggttaccataatgaaatcagtgtcttgttcagattatataggaagataatcaaggtggagattacatgtaagaatgagcctgggagcatgcctgctgtggattttaactttagctcagtcctaccaatatggtttggctatgtccccacccacatcttatcttgaattacagcacccataattcccacatgtcatgggagggacccagtgggaggtaattgaatcatggaggtggttctttcccatgctgttctcatgatagtgaataagtctcaggacatctcatggttttataacggggagttcccccgtacacactctcttgcctgccaccatgtaagacatgactttgctcctcatttgccttccatcataattgtgaggcctgcccagccatgtggaactgtgagtcaattaaatctctttcctttataaattacccagtctcaggtatgtccttattagcagtgtgagaacagactaatatagtaaattggtaccgatagaatggggtgcttctgaaaagaggccccaaaatgtggaagcgactttggaactgggtaacaggcagaggttggaactgtttggagggctcagaagaatatagaaaaatgtgagaaaatttggaacttcttagagacttggagagctcagaagacaggaagatgtgggaaagattagaacttcctagagacttgttaaatggctttgaccaaaatgctgatagtgatatggacaataaagtccaggttgaggtggtctagaatggagatgaaccacttgttgggaactggagtaaaggtcactcttgctgtgcaaagagactggtggcatttagcccctgccccagaggtctgtggaactttgaacttgagagagattatttagggtatcaggcagaagaaatttctaagcggcaaagtgttcaaaaggaagcagagcataaaagtttggaaaatttgcagcctgacaatgggatagaaaagaaaaacccttgggaggccaagatgggtggattacaaggtcaggagttcaagaccagcctggccaatatggtgaaaacctcatctctatcaaaaatacaaaaaacttaactgggcatggtggcatgcacttgtagtcccagctactcaggaggctgaggcagaagaatcgcttgaaccctggaggtggaggttgcggtgagccaacatcacagtactgcactccagcctgggtgacagagtgagacttcatctcaaaaaaaagaaaaagagaaagaaaaaacccattttctggggagaaattcaagccagcttcagaaatttgcataagtaaccaggagctgaatattaatcaacaagacaacgtggaaaatgtctccagggcatgtcagagaacttcacagcagcacctcccatcacaggcccaggagcctaggaggaaaaaatggtttcctgggctgggcccagggccccctgctatgtgcagcctagggacttggtgccctgcatcccagttgctctagctgtggctaaaaggggccaaggtacagcttgggctatggaaggtacaggccccaagtcttggcagcttccagtggtgttgagcctgcaggtgcacagaagtcaagaactcaggtttggaaacttccacatagatttcagagggtgtatggaaatgcctggatgttcaggcaaaagcttgctgcaggggcagggacctcatggagaacctctgctagggcagtgaaaaagggaaagatgggatcagagaccccacacagagtccccactggggcactacctagtggagctgtgagaagagggccaccgtcctccaggccccagaatggtagatccactcacagcttccaccatgggcctggagaagccacaggcactcaacgccagcctgagaaagcagccaggaagggggctgtaccctgcaaatccacataggcggagctgcccaaggctgtaggagcccatctcttgcatcagtgtgacctgggagtgagacatggagtcaaaggagatcattttggagctttaagatttgactgccccactggatttcagacttgcatggaatctgtagcccctttgttttggccaatttctcccatttggaatggctgtatttacccaatgcctgtacccccattgtatttaggaagtaattaacttgcttttgattttacaggctcagaagagatttgccttgtctcaggtgagactttgaactgtgtacttttgagttaatgctgtgaactgtggacttttgagttaatgctgaaatgagttaagatattgggggaactgttgaaaaggcatgattggtttggaaatatgaggaaatgagatttgggaggagccaggggtggaattatatggtttggctgtgtccccacccaagtctcatcttgaattgtagctcccataattcccatgtgtcataggagggacccagtgggaggtaattgaatcatggtagtgggcctttcccatgctgttctcatgatagtgaataagtctcatgagatctgatggttttataaatgggatgcacacaattcccctgcacatgctccctcttgcctgctgccatgtaagacgtgactttgctcttcctttgctttctgccatgactgtgaggcctccccagccatgtggaactgtgagtcaattaaacctctttccgttataaattacccagtctcaggtatctctctattagcagcatgagaacagactaatacacctaccaacaagctgttgcttcctaacttaagaatcccagcacatgcttccttctcagaccctttcccattcatctgctccttatccccttcctaaaagcacacagtaacccactcatagcattcatcaatgctttctcccctgtcctagccagaatcataaataagtagaatggagctcacctaggaagctgaagaacagcttacagtgttggaaaaaccctaagaaagaagaaatagaataatttgagaagtactagaataatctgtgaaattaatcaagaatgctctgtccctatttagaaggtggcataagaattttcatgtgggtccattctgcttatataacagtttgctgtttcccttggagaagccatgatatctctatttcagtttttttcacttataatatacagtcatctatttttagggctgcttaagataaaatgggaaagtgatgattaacagtatttccagatccttaaaagaaacttagtttaatctattagaaatctcaaagttacatgtgatgttaaggcatatcacatatattagattgggtttatagaatatttgtttcctcttttccttgacatggtctttgatgttctatttctatctttactatgtttgtatatatgcctcttattaaaagtatttaaaattattttggaaggggacaggtgtcaacataaataaagtaaaacttttagataaaggcaaattatcaggggaacaatagccatagagtgtcactgttacaattatagttgcattattggatctgcttgcctgaaaggatttgggttttgttatcttcctagaaaaaaaagaagttgagaaactattaacctttgataacctttacaatattttttcaagtttgccatgtgccaccaagggaacatttccaagcagagcagaaaattcattagacttgagtgtttcaaatatctatatcaaggacaaggacaaaactgctgtcatagagaaaaggctggtgcactagtgcacaataacttcaatttttcttcatctgggtctagtgacccattccgtaaaaatgccaacactgcactatttgatccagaggaactggggtgatgacatcaagataaacgctgtttgttcagaaagtcccatgcacagcaccacaagactacagtcctgataatattcacagtctcattcagtagagtccaaagtgacatctggtttggatgacttttgtggaaattttggctgaagtctttctgtttcccaaaagcaaaaactttaaattaatgggaacagtaaggttaaattaaggtatattttatagtaatcagataatattagacgtttgattaatgaggtgaacaacaactataattgtgatatctttatgtaccaatttagctttgcaaacttttaaaatatacacataaatcactgtttaattattttctaaaaatactttagcccattttatatcacctcctctgtctctgtctcttctcttggcttctgtcacgtgattttgtcctgactttcctcctgtctctctcttctctccctcatgagcctctagtttcctcatgccctggggcctcttctgttctcactccatgtttatcctgggtcttttcatctgattttatgctgatggcttttatgtcaaatcaaacatgccccaaaccgaactcataatctcacctgtttccatgcccgactctcagtttcagggaattgcactgccacctacctgatttccaaagacacaaaccttctaagtgaaaccacattttcaatctctcttttgacttcttgtgatcctatgtgctcacaatctcttggactctttccttcttcccatccttactgccttcaccttggatcaggttctcacccttcccacttggatgcctgtaacagcctcttagccttcccacctaggatacctgttcaggtatcctgctccaaactttgaatcccaaatgtctccctacatagcctctctaaaatagaaatctgattatgccatttccagcttaaacccttcagtaaatcctcgttgattctgggatggtgtgtgtgagtgcatatacgagagagaggaaagaggtggggagaaagagagagagagaaggagaaggagcataggctaggctttggtgtcacactctcttgattcaaatccacacaacaatatgacatcagtcagatcactgaaactctttaacctgagttttttccattgtccagtggggataagaactgtatctaactcatagggcgagttgtgagaatagactgagttaaaacatgcaaagcacttagcccagtgtctggcatatgtttagatgttgattattgttggttattgttacattaccttacaaagtccaaactcctcagcattacacacggtccctccgctcaaccagcctgcacttactgcctcctgacttcacctttgctctggccctcacaccctaagattctgccatgtcctgtggtttctcctacctcttgcagtgaggatgctgctgcgctgtctgaattgccctgccttttccctggccaattccctctcacccttcagggccctaacaagcacatttttctctagaccattttccctgacccacattcctgtctgtagtatgggcttgtgctatgaatttaataattacttcaatcaaaaacttagtgcattctatgtgtcagtcctatggcaaatgagaataaattgatgtctgagaatccagatcttgtcctcagagaggatataggttagagtggaatagcaaatagacaggtgtgtctccaaacttcatggaaatatgtagaagcggtccctcattcagtctttaaaagtctgagaaagctatctggaagaaatggaattttcagaatcttctgagtatgctaatcttgacattcattaatttgttgcccaaagggagaccctcctaagaataaaagagggtgctattaatcattaccctgggcaataagcataaaccaggactgcctaggacaaaaagggtataacatcccccctacttgtagctatgttgtaatgagtatgtctgccaccagtgctataaagtgacaagtctactatggagtgcacttcctgacatagcttagtagatgctaagtaggtgtttgtggttttagaggacagaggtgggacatctgaagacagtcagaaaaccgaagagggctggcaggtctccagagcaagaagaagcctctatccttctgcatcagggcatagcagcatggtggcaggaagaaaaatgagagaggaaaataggcttcctaaacagcagtaaagtgaaatcttcctggtgttgctgatttgtccatataagtctcagcctacatcacctgtacaatgtggtgagggcaaaggagacgaaggtgcacaatgctttctgagcacctcatgttcttcgccactaaggccaacagcaaagctttaattctccagacaatatcaggcttcatcacatggccagacctccctatctttgtaacacaagcaggtatacctgtgacccatgacattcagcaaaattaatggctttctctttttcagctatagggaacagggaacattatgaccacacagggaggaaagcatacctttggaatatggttatctgaaccatccaattggagtggcagcagaataagaacacctgaaacacacagttaagttcagccagtgcttaacataaattgatgcacgggcagaaataagaggagagtcctctcttgcacacatagttgcatatttagtaccccaagggaatgctaataaacatcatattacagaggccagaagaggatcctttgggctctgtttgtgtattatcagaacatagcagtgaatagaatgagctacatgcagttttctattctatttacagccaaaaccgaatatttagaaaccaggggtgacctggtgactgcaatttgcaatgcctgaagggatgcataaatatagatatatgattcaaatcctgcaaagtccatcacaacactatgcaaaaatcacaggcttttagagctaataccatccagcttaaatggagaccctgcctccacataaatcaaagcacatggaagatcctttttcacactttatcttctcagcatctttgggagctaggaagaggaaaacattataaaatttagagagatgaaaaaggatatgaatacacgatataaaaatctcctaagaagaaagaatccaggcagttgaaatgttaattgtctgcctttttataacagagaaaacctgcttttaagatgcatactattgtacttcagaacaatgcaccagtggatctttgcaagctctataaattccaagaattactagggcaagtagaaatgtaaatttatctagctatttcactggtagaatataacaggagcaccaagctgggaatcagccaatctgcattaggacctgtctctgaaactcctaatggaagcaccttgtgctgggcacccgtgggacccaattcctgtatgagagtaacactctgtacttcatcactggtctaagcatcagatgaaattgtatatagaagatttggccattcatggagtattgcacaaatctaaaatactcagcactctttccttttcacttttctttcctatttttaatcctgggactggagggcactgaacaaatgaactgaggaacacagtcctgccttctaaaatttgttctggccattacctctcagcacaccataatctatcaggctgacatgctgcatgacaacctgctaatgtgtagttatatcctgtgcattccactaattgtgcagacattaaatactagatctaattccaaataattgatttctttgctgtatttgagaatattctatgctggaaggcatagagctatctttaaaaagcagaaagtgtgggtggataagaaaattgtattcagtcaaggggacagaagaattctactgcaaataatttctggccactagtaagtttaaaatacaaaatatttaagaagacaagcttaaaatgatgaatataaatcaaatccacctaatataaatttctaaaataaacaataaacagtaaggaaactgatataggtggagttgtctgaaagcacagcttgaaacacaaatttgcgtatatttgatttcttagtggagtgtgcgtcaggaaagatctacaagggagccggagaaaaagacagaaaaaggaaaggggccaagaagggcatgacctgattcagaaaggtctggagcataaagtgtatgcagaggtgggatttctccacgagaaaagcggggtgggcttttccatccccacatccgtctggttcccaagtctgggctcctaaccactactctacattcaatccttaacactcactgtcaacataatgtgaacttatttccaatgtcatctaaggtagaattacttgtgagaaaagactatagtatatttccatttagatgccagcctacatcctttcaccatcttctggtaccctcaccctgatttctctctgggaacaattccctcctccacctcattctctctagttcccatgaagtggactctaccctctgctctagaaatggagcaatcaacccatgcataaactaatcaatacattcacatgtgttagtcaccccttcttaggctctggaaagactcatccaaagagacaaagacaagacatagcccactcatgacacagagtggattgttcttaacttctttcgtttcctaattcccttcttcttttccctcagtccacacaccctggtatttgctctgaaatacatgggtccaggtgacctttactgtcatcatcatcatcatcatcatcatcatcatcatcatcatcaggtgtttataaaaagatagaaattccagtgtacccctaactattttccctgggaaccacaagaacatttaaggatcataaagagcctaggagtcaaaaacagcctactatttgaacaaatttatgtttaaatttttttaattttttatttgcttgtaaagatgggtctcagtatgttgcccagacagattttgaaagcctggccttgagtaatgctcctccctcagtctcccaaaccactagtattgcaggcttaaaccaccacgtccagcctgagcaaatttctatattgtccttttactgctgtaattgtacatatttttgttaccggtgagtttaaaattgtcaagtatttttttattatgtcagggcaaagaatccgtttcttctgtattttacaacacaagactatttcaggtaatagcctttcgctttggcccagggcctgtgtgcatttctctctttggtctcttttatgaggaatagttttataggtttgacatgaaatgaaaatttgctcctcaaaactttaaggtgcaacacaacaggttacagggcagtgtgagctacagagcaaagcagatcctgctctgatttggagatagttgaacagttcagaccggcctaggacagagacacctggtttactgatgacaaatctttaatgacactacaagtacatgataaattcatttcaggattattagagaaatgtgaccaggattaaaataagaaagtacttactcagaaagtgtcatggagtaaattccatgtaaacttgtatggtattctctggacccactgaaaaataagttggaaagagacaaggacaattgagggtacagtttcatactgacattaaatgtggatattcttacaaatgattttcaaacatgttttgttcagacccagagtgtttcacctgctggctcacagagttgggaggctacaactacaaatgccagaaaaaaatttttttaagtaagggggtagcaggggaaggctttgcctctctctcttcacagagtttctgctccataccctaattacttctggtcccaagccatgccaagggccaggccttctaaaacaactccttctgactcccagcttttgtcccttcctctggagataataaagatgaaaataaagcttttattttatttccttcaggttcttgaacattcaaactggcctccccacaagttgaacatgttcttatctggtttcagaaactccactgtgagtgatgaatgtgccccaacagaaacagggttacgtgccctcctgtgtctcagtcttcccaagcaggaaatggacccaggaaataggctcttcagatatggctatactgatctacttttccttcattctttttcctcactaataaaatagtgaggaaaatgtcatagacttatgcatgcatgttccaggcttcacattcacactttttagcccaacagagggagcagtaggatctatagtctctgactctggggggggtgtgtgtgtgtgagagtgtgtgtgtgtgtgtgtgtgtgtgtgtgtgtgttatattgtatatataaaagttgagaaataacactcaaaattgtccttcaaggcaaatggtacaattctttctcaatgatcagtttggagatactggtaaagtttagcatagttttttgtttgtttgtttgtttgtttgttttttggggtttttttggtgatggagtttcgctctttcacccaggttggagtgtgatggcgcgatcttggctcaccacaaactcctcctcccgggttcaagtgattctcccacctcagcctcccgattagctccgattagctgggattacaggcatgcgccaccatgcccggctaatattgtatttttagtagagacggggtttcaccatgttggtcaggctggtctcaaactcctgacctcaggtgattcaccctcctcggcctctcaaagtgctgggattacaggcgtgagccactgtgcccagcaagtttagtatattctaaacaaaaagatacagagatatttggggattcatttctgctataacaacactgatttttgtccacagtggtcataagaagtagagttttgattacatgtatcctccatgctaatttgcagaacagaaataggaagcaattatgtgatcgtcagggcgggggagaaactaatttttttcctcagattatttttaggataaaaatgtgaatgaaaacagcatcctatacttctgattttgatgaattttgactgcccttcccctcaattaggacaaattagtagaagtttattctaattaccttctgttcatctcaattattttaagcatttctattttattgtgatttctaaatcagcatgcttgagttttaatgtaaataccttctcctaaaaatgcaaaatgcattacaatgtagtgagactttaaataaagaaaaatgcagaaatatccatccaaataagttatccttcaaaaaagaatagcacattgtttagcctcaggagactgttccaaagagtaactacaagaaacacttttggaactcattttcccagattacttttggagtctgcttaagagtcaaaccagaaaagaaatctcactctttgtaggcagatcttactttctgacccaaaactgtaatgttagcttgatcttttctgcttttgttacacctgcatttcctcttttcttgactagttacaggcctatcccaccccacctctcccgtcaatcactacctcctgccaattttatctcttaaatattcatcctatttatctttgtttccatggcactagcaaaagtgcctcatctgtcctggactgccattacctcctaacggggctctgtgctctggtgttgtcaccctcaaactcaccctctctatgccatccgagtactccatcgaaaacagaaatctgcatgtattattctcctgattaaaattcttcagtggtacctagtcacatactggctaaaattattaacccaagattcataaactttcttggattggccttccaggagcatctataattcccttgaatctttatacaaaattttgtgtttgcatttatgcaaggaaagactcttccaccagtgtccctgagggaggaaagaataacaaccgaaagttcccaatcaaagccatgctacttaatgtgttacaaagactctcaacattcagtgcttcctcctagcctggtggcttccatgtaggctgaattctctcacgataactcagagctaaaagatcaaatgttccaacaaacaagacaggagctacatggtctttcataaagcacctcagaagtcacagggggtgaagtctgtcatcctctatgggtcagagcacccacaatcccacctagattcaaaaggagggacacagaccccacttctcaatgggaaacagtttaagatcttgtgaacatgtctcaaagctgccatagatcgtgagggagacaggtagaagtagaacacaacaagggtgctgtttttccctcctgtcagagttagatgaaacttctttgtggataggcttgacctagaggggcaaataaggtgatgcttttttccagacttttgataagttatacctgtagactttttgcttaagaactcttttcctcaggtcctgtttttttgttgttgttttgtttttaagaaattaaggtcattaagcagggtgtaaacgtacagtataaatttattaaaaggtaaagggctgatcagaggtattaaaaaatccatgccacatgcagtaaatttttgcttgatataaagtgtcaggaaatgagaccaaaattgcctttgagttgcaatcagtgctgtagagaaaaagcacattttgccttccttactaagatgaaggagtaatgttttcataagaagaaactgtcaaatgtgtattaaataaatgaagcataaaacaagctttcctgcagtttcaagcatgcttggattttaataacaagcatttatttatcccatgaatgaaaagttatatttgtgtccaagaagaaaggctctccactctccgctgggtattttcagcttttaacagtctccattacggatgaagtcactgatttgctctgccatttcacatcacattttgatgttggtgtttatgggagagataagagcctggactaaagaggggagagcaatgggaaaggatccttccagggttggatggagagtgtaagggaatgtggaaacagatagactagaattaagatgggatgcagaagctaaagcccagtagtgtgcactcatcaacattgtgtcagggtctcagggacccctccttgccaaattgtggatttagaaaaggggcaaaggtcatgttggaggacaaatgaggtgggaaacaggagggtttcagagtccccatcctgatagtgttataagatctaatctatgttttatgtaagagaagttgggtacctttgctaagcccaaactgggattcagagactgacagagctggtgacaccctggggcatccatttacatgtatcgttaggtgtgtggttggcaatttttttaagctaaagaattagagaagcatttgggaaactgggagaggagcaaaagtcaataaggagaacctcaaggtgacacgatggcgtctgctcccgtctggcctgagagactgcatggtggcccctgtggagagcaaggtgaatttcaaaagagaaagagttgttttgacaaaagactttgtgaagctcgggacattcgcagtgtggctttagcactcaagcctaggacaggacacacggctctaggcctaggtcccagggcaaccttccccagaaaggccactccaggggactagcagcagggtctgaccatggctggcagagcagctgccagctggagggggctggcaacaggcaccatagcaaggtgacttaatgggtcagaggagaaaagcacgagcagacttgtttctgaggatatggtcacatccctggggactctcagaaaaccaggaaaatccaatgggcaaaacactgaagcgctgctatcacacagatggacccaaagacccttgtcatctggctattaatgttaatgtgacctcacttctcctctcaggcagggtgagtttgcattgagattgcattagaaaatgattaataattgaaacattaccaaggtcattatcctattaagtaatgtgaatctaaggccgcttagaaattagaaatgaatgaatccaataagaattgctgaataattagactaggggcataattttggaatataaaaaggaacccaaatctatactttagccaaggttccaatccttctcattcctcagagagaaatggacaggaaatgacttaagaaaataagccatcatatttacattttgtatgtccccagacatctttgaggagatttcttcaaaggagacaagatgtgttctgccatttttaggagtggagtgtgggtgaccccagcagattgtttaccatccacctactgaacagcaggaaagatcagctctattcaccaggcgaagctatctatcacttattgtaggaatgacgaagggaattttggaaccctccattgttgttagatcctccctttgctcatacataaacacacacacacacacacacacacacacacacacacaaataagaacaaaacatttttgaccacagaaaagtaacagagggacaaagcatcttggtcacataacagaagactaagactgaaaaaagctttacagcatcttatccatttacctcctgtacccactaagatattgttgatgtaggcctttggcatccacagttttcaatttcatctcatgtaaagatcagtgccaaccactgaagatatggaggcagcaatattctgagctacttcagaaccaacaacttaattgaaacatcaaaccaaggccctcacacaatatttatggctatagtttggtttaatgccttatataattggtactgacatacacaagatttccatcaagtctttatatcctttcacagaggagtctactattctacatatgaagtaagcagcaaaaagcatattcaatcttataaaaccttttaaaccataacagtattatatgtcattatgtgtgtgataaaaacagaattataaatcatggtacaaaatagcacaaaatttgtaccatgatttataattttgttttcttcctcatcttatccaaaaagctgagaagtcataattctgccacctgcttttggataactagttggccttattccttttctactaactcttttctaaacatttgcatttgcatttgtaaatctaggaaaacagagagctttttttatttttaaggagcagcttccactttcattttgagaagctctgaaatccagtaaatccagttacgcattgcaatataccctggggtatgagtgcagataacttttcaaaatgacccccagcccaggaacagcttctatctttgcccctagagtgatcatctccttgcataccaggagaatagtcctctcttatccccatagaacctcgtgacaccataaaaagtaaacaaattataaaaaatggtaatttctagacatgaattatacaaatgaatgtatctgtagttatttagccactcttttcaaaattctaatgtaagcaatgctttcatacttcaaagtgtttaaaaagagtgttttaacctgaaatatcattttactccacaattgaattctagttgaaaataattatatttttagctgcaagtgttttgagtcatgggccaactaaagatttctggttatataattgaaaattatgtggttcatctatatgtttattgacttggattgactgagtcctgggggaaactgtgccgtttcattgctgatcaaattcacattgcaagccacatgtccagaatgctcactgtggccattgaaatgaatggaaattgtgagccagtttattttctaagaggccaaattggtagtctcctttagtttactgaacctaagttttaatagtaagtaaattttttaataaaattctttatgtatgtttatctttaaatatgatgtcttttttattattctgacccccaaagattatacaagatgcattaaaacttgaaataatgtctgaaaatgtgagaaagtaggcaagaataagccagagaaatttttaattaaactccaccttttttttcatttatggcataaagagtcaatatgtgaaatagagaatattaggaagatcagcaactccttagaatactgtaagagtcaccaaggctacaagcattaagtactgtatcttggtttagagaagatgatcaactacacattttgaaaaatgcattcacaaatgaaaacataaagaatgttttcctgataccaaataaagaatggttttagtacactttaccttatagcctcattaatttaaaatttagctaagtttagaatataaaaattgctatagaaaagtaaactagtctaccatatgagtaaaaaggaaagcatatttattaccttatttaacagatttaacataaaatagaaaattgatttccattaaatattcagaaaagtcatgtatttctatggcctgtagaaaaaaaaatcttcagtaagaacctgttgcttcatgatcatattaattttaaaaggcatctcatggataacaggtttgtattagtagcaaaattcaaagcctgatttgtgatattgtgagcaatattcataaagtacattaatatgttaaaagttacatggacacagagccacattaaaacacacctgcaatgtgttaacattttcagggaaacaaaaatagcaagaatattttgcaagaaaacaaacaatgtgaagataaacaagtgggagattgtaggcaatagaacctatggctaaagtttcaagtaattaatattatattttaagcgaaagactggtagaacatgctcaaaataataaactactctttttcatttcctctaatgaaaaaacaatgtgacacattaaaatcttttatctgtaatgaatgagggaaactgtcatccttgttaacttcagtacaacactgcacaatagttaactcctgttttggtggtggagtatgaatttcaatccacaaactcagttgtgcataatacatcacaatttaaattttccttagggccacttatttccaacagaatagagaaatggtgttcataatataatttcatctatataaaacggtgttcaaaataaaatattatttaaatctttttaaaagttaattggccaattaaacaaaaataataataatacaatgtgggatttaaaacgtgtaaaagtaaaatgtatgataacaaagacataggctgggggaagagaaatagagccatactctcaaaagttttttatagtatatgtgaagtgacataatatcgcaacataaattgcaataaaagaaaggtatatgccataaaccattatgataacaaagaaaccacttaaaatgaagaaacaaggagtttttttatgtcaaaaaggacaataaatgaaattatgaaaaatattcggttaatcaaaaagaagacaaaaaatggggaaaggaaacaacaggtgagacaaatagaagagaaagaggaagatgatagatttcaacctaaacacatgaataatcatattgaaagtaagtgatctaaataatccagttgacatgcaagatgcaagtatatgttacctataagaaaactattttaagcataaagacacaaatagtttaaaagtaaaaagatagaaaaagttataaatactagtatttagataatacaaatccaaataaagctggagtgactatagtaatatcaagacaaaatagatgacagagtgaagaacattattagggataataaaagtcatttcatagcaataataaagttaattcatcaagaacaacaacaacaacaaaaaagcctgaacatttatgcacctattaagagagctacggaaacatgttgcaaaaaactgacagaatagcaggaagaaataaacaaatccagaattatagtcatagatttcaatacccctctttcagtaattgatacatcaaggagacataaaatcaataagcatataggagatttgaataacactatcaaccaacttgacctaataaatatttatagaacactgtacccaacaggaatggaatacacatccttttcaaatacacatggaacatttaccaagatagaccatattctaagccattaaaatgtcacaataaatttaaaagaattcaagtcatacaaagtgtattctctgaccacaatggaattaaattggaaattaataaccgaaggatctccaaaaaattccccaaatatttggaaactaagttatatacttctatataacatataggtcaaaaaataaaagagaaattaaaaaatattttgaactgaatgaaaataagaacatgatgtattcttatatttgtagtagtctgctaaagcaataggtaggaatagatttatagtactaaacacctatattagaaaaaagtcacaaatcagttatctcagtttccaccttaaataaccaggaaagaagagcaaattaaatccaaagtaagcagaagaattaaaataataaagactaaagagaaatcaatgaaatataaaacagtaaaacaataaagaaaatcaatgaaaccaaaagttagttctttcaacagattaataaaattgataagcctctagccagacttactaggaaaaaagagaaatgatacaaacactttaacattattaataattatggaaatgcaaaataaaaccaaaggaagataccactacacacctattatcatgactaaacttcaaaagactgaccataacaagtgttggtgaggacatgaagtaaatggaactcaacactgcttccaggaatagaaaatggtacagccactttggaaaacagtttggcagtttattgaaagattagacatacctactatatgatctagttattccacttctaggaatattcccaggagaaataaaagcacacatccacacaaagattagtacacaaagtttatggcagtttcatttgtaatagccccaaactgcgaacaacccaaacgtccatcaacaggtgaatggataatcaattgcagtaaattcatgcaaatagaatactactctgcaatttaaaaataatgaaccattgatacacgctatagcatggatgaatctcaaaatagttatattgaatggaagaagacagaccccccaaaaaatgtatactgtataattctatgtatatatagttgtagaaaatgccaactaatctacagtgacagaaagcagatcagtcattgcctgttggaaggaaatgagaagagattacaaagagacatgaggaaactttgacaaataatggataggtccattttcagtgatggctgcacggagataaacacaagtcaaaacctatcaaactgtacacttaaaatatgtgcaatcaattatatgtcaattacacaacaattaagctgttttaaaactcacgggcaaatatgagtaaatacataaacacagtaaataaaaagtttatttcttaacggtcattcacaccaatcaagacaggagatactaatttatttaggtctttgtaggaacatcagtaaaggtacagaagatccatttgaatttatgttattatatgtctaaaataacctaagatacactgcatgggttttgtataaactcgttaagaaaacaagattattgtgtttctgacaatttgtaataaaaactcaatttagaatttttcttgcccaatatctctaacactgtatctatggtggttctagttttgagattcattgtgcacagtgtaagttttggtgccctttgtctcatgttttacacaatcaaatgagaatatgtttgtatgacttgggacctttctatttgcagttcagattaaataagactgagaatttctgactacttataaccaacacttgcagaagtaatgcttacaattggtaaagtgttctttggggaactgcactcgataaatgttacaatcctagtttgttgcagcttcagttgtaattccactctgaaattcagtgggtgaaaaatgggaaaagatcaggctgctagagagagggataaagtaaggcacatatgattctaggatttttattacaaaacaaaaaattacatgagagagtgtctttatattattttctgaattctgcccactttcctggagaaaaacctaaattcctctcccagtcttgtaatctcttcatctgcataaagcctacaccttcaaaacaattcctagactgaagtaattaaatcaagtaccatcttagcatgcaaactctttgaaatatataatacacttagacagattcaggtttatgttccccaagtgcttcataaagcattaccaagactaagttctcagttgttcaataaattggattggtgtctactatggttatgcatatctttttgtgtatatcaacatttgaaatgttgtactgttatttataaatatcctttgtttcaaaaaagttttcaaaactgtcacttcagttatgtgtttttatcgatttgcttgatctgcataagggtgttctctgtttcatatccatttgtatatagttatctcttttgcctctgaacattgaaacagaaacagtgttgtggtgaagagccctagcgcagcctcaccacgctagcctcagccttgggcaacattccacctcttctgcgtgattcctcaaaccgtgtgcatagggaggttgttcacagggttgttgtgaggatcgatcaaggtaattaggtatagatttttatcctttagaccagcacatagtgagcagtccaaaaaaaaaaaaataaacaagagcacctttgaactgcaaaaatatttagggcagggcctaccaagtggttataattatcttattacatgactgaaatgcatcctagcaggagtggaatacttgaaaattattatttaatcaaaattaatatttcttaggcagagaaggcctaaaaagaatagtataaaatgaaaagacttagtttaaatttcaactttggcacattaaacaactaattctggtttcttattttattctaacctgccgatctgtagtttgtaaattggacatgacctgttcatagtagatgcttagtgaatgcgtactgagagattactcaaagatattgtctacaaaagcattttcaatacttttatatgtctgatagtataagatccctttagtttcaggaaaaaccataaaattgagtgatatttctcactttatgggtcattattactcatgtagtaatatttctcactagtgataaacaagtggagcaaatgtgactctgcagggcaattgttgcattaaaacctgaactgcaaatatttaatgctcacaagaatttttctccctccccatccatgtccacttcagtgagagacccaatgagaaccctatatccacttacagaaaaccagtgctgaaaagttccacacagctgaccactaaaacatatcttgaattttacttttttcccaaggaaaatgccattgtctgtaacgttcatagtcctttaaagattattttgttcatttcacaggtctcctgttatggctggaggtctctttgctgtggatcggaaatggttttgggaattgggtggctatgatccaggtttagaaatctggggaggagaacagtatgaaatctcttttaaggtaagccccaagaccctcttcacactatatctgtataattttgacaattctgatagaatatcagcatgttgctctgtgacctgtgttctgggatgacttaatggtaatagatgtatcaccttcccaagtgagctcttgtagtttctttcttttttggtttttgtttttattttttcttgatatacaatcattatacatatttgtggggtacatgtgaaattttgaaacatgtatacaatgcataatgatcaaatcagggtaactgggatatccatcacctcaaacattcatctcttctttgtgttggaaacattgcaattcttctcctctagctatcttgaaatatacaataaattattgtgaactataatctccctacttgtataaggccatttttgcattgctataaagaaatatctgagactgggtaatttacaaagaaaagaagtttaattggctcacagttctgcaggctgcacaagaagtgtggtgctggcatctgcttctggtaagggcttcaggaagcttttaatcattgtggaaggcaacagggagccagcatgtcacatggtgaaagcaaaagcaagagacgcaggggtgagctgccacacacttttaaacaaccagatctcacgagaactcactcaccagcaaggggatggcgctaagcctaattcttgaggaatccattccccatgatccaaacacctcccaccaggcctcacctccaacactgggggccacattttgacataagatttggaggtgacaaacaaccaaattatatcactacagtactatcaaatactagaacttatctcttccatttaactgtatttttgtactcattaaccaacttctttttttgccgcctccccacccccactcccttctattcccagcctctggtaaccaccaatctaccttctacctccattagaccaacttgtttagctccccatatgagctaggacatgggatgtttttctatgcctgatttatttcacttaaaataatgaccttcagttccatctatgttcctgcaaatgatagtatttcattcctttttatgactgcataatattccattgtgtatatatactacattttctttatccattcatccagtgatggacacttaggtaactattgagaccattgtcacaaaaaaatgggaatgcagatatcacttctacatactgagtccctttcttttgaaaatatacccaacattaggattactagattatatggtagttctattttagtattttgaggacgctccatactctttcccctaattgctacattattttgcatttccaccaacagtgtaggagcattcccctttctctgcatccttgccaggatttttaaattttttgtctttgagataatagccagtttaacttgggtaagatataacctcaatgtggttttgatttgcatttctctgataactaaagatgttcaacatttttcatatacctgttggccatttgtatgtcttcttttgagaaatgtctattcatgtattatgctcatttttaaattgaattatttgaaggattttactgttgagttgtttgagttcattatatattctggttattatttctttgtcagatagatagtttgcaaacattttctcccatcctacaggttgtctcttcactttgttgattgtttccttgctctacagaaactttctagcttgatgtaaatttgtctatttttgcttttgttccatgtgcttttgagatcttagccaaaaaatacctgtgcccagaccaatgtcctgtagtgtttccccagcattttcttctagtagtttcatagttttgggtcacatagctaagtctttaatctattttcagttgatttttgtacatgatgaaagacaaagatctaatttcatttttcttcacatggatatctcattttcccagcatcatttattgaagaaactgtccttttccccactgtatgttcttgatgcctttttgtcaagaatgagttggctgtaagtgcaaggatttacttctgggttctctattttgttccattggtgtatgcatctgtttttatgccagtaccatgctattttgattacaatagctttgtggtataatttgaaatcaagtaatgggatgactccagctttgttctttttgttcaggactgctttagctatttagggccttttcttgttccctacaaatttttggatattttttccgtttctgtgaagaatgtcattggtaatttgacatggattacattaattatttagatcatttctggtagtgtagatattttaacagtattagttcttccaatcaaagaccatggtatatctttccatcttttgtgtgtcttcagtttctttcatcattgatttgtacaggttatttcacttctttagttaaatttattcttaggtatttttaagctattataaatgggattgttttcttgattgcttttcagattgatttctgttagtgtatagcaactttatagaattaatttatcagttccaggaacttttggtggagtctttaggtttttctaaaagtaagatcatgtcatctgcaaagataatttgacttcttccattacaattttgatgccctttgtttctttatcttccctaagcactcaggctaggacttccagaactaggttgaataaaagtgatgaaagtgagcatccttgtcttcttctaaatcttagtggaaaggctttcaattttccccctttcagtgtgatcttacatgtgggtttgtaatatatggctgttatcatattgagatattttctttctatatccaatttgttaagagtttttatcatgaaggaatgttaaattttaccaatactttttcagcatgtatcaaaatgatcctatgctttttgtccttgattctcttgttgtgatatatcacacttattgatttgtatacgttgaaccatctttgcatctttgggatgaagcccacttgattatggtgaatgttctttttaatgtcttattgaattatgttttgtcgagggtttttacatctatgtttatgaggaatgttggcctatagatttttttgtgtgtgtacctgtctagtttagctatcaggataatactggcattatagaatgagtttggaagaattccctcctcttcaattttttgaaatagtttcagtagaattggtattagttcttccttaaaagtttggtagaaatcagtaattaatccatcaagtgttgggcttttctttgatgggagactattactgctttgatttcattattccttattgatctcttcaggttttctttttcttcatggttcaatcttcataggttgtgtatttacaagaatttatctacttcttctaggtttccaatattttggtgtacagttgttcaaaatggtctctaacaatcctttgtatttctgaggtctcagttgttgtgtctcctttttcatttctgattttatttatttgagtcttctctcttccattcttagtctggctaaagagttgttacatttgtttatctgtttaaaaaattggctggacgcggtggctcacgactataatcccagcactttgggaggccaaggctggcggatcacaaggtcaggagttcgagaccagcctcatgaacatggtgaaaccctgtctctactaaacatacaaaattagttgggcgtggtggcgcatgcctgtaatcccagctactggggaggctgagacaggagaattgcttgaacccgggaggcagaagttgtagtgagccgagattgcaccattgcactccagcctgggcaacaagagcaaaaaactccatctcaaaaaaaaaaaatcaattttacagttcattgatcttttgtattattttattagtctctatttttaagttcaacttttattttagattcagggggtacacgtgcaggattgttacaagcaaatattgtgtgctgctgcagtttgggttataattgaatgcatcacccacatagtgagcatggtacacaacaggtagttctttagccattgaccccctactccctaccccctcttgtagtgatcagtgacttttgttgtcatatttatgtccatgtgtactcaatgcttatcctcctcttataagtgaaaacatgtggtatttgattttctgttactgcattaacatgcttaggataatggcctctagctgcatccatgttgctgcaaaggaaatgattttgttcactttttatggcagtgaagtattccatggtgtatatgtaccacattatcataattcagtccaccattgatgggcacataggttgattccatgtatttgttatcatgaatagtgctgcaatgaacatatgagtgcatatgtctttttggtaaaatggtttattttcctttggacatgtacctagtaatgagattgctaggttctatttttagaaccagcaaccaaccccagcatggtagttctatttttatttctttgaggagtctccaaactgttttccccagtggctgaactaatttacattcccaccaacagtgtataagtgttcttttttctctgcagccctgccaacatattatattttaaccttttatttatttatttatttatttatttatttatttatttatttttgagatcgagtctcactctgttgcccaggctggagtgctgtggtgcaatctcagctcactgcaatctccgcctcctaggttcaagtaattatcctgcctcagcctcccatgtagctgggactacaggcacctgccaccatgcctggctaatttttgtattttttgtagagacggggtttccccatgttggccaggctagttttgaactcctgaccacaggtgatctgcctgcctcggcctcccaaagtgctaggattgtaggcatgagccactgcacccggcctctatttttactttttaataatagcaattctgaccggtgtgagatggtatctcattgtagttttgatttgcatttatcttacaattggtgatgttgagcatgtatcaatatgtttcttggccacttgtatgtcttcttttgagatgagtcctttgcccacattttagcagggttgtttttcacttgttgattcatttaggttccttatggattcgagatattagacctttgtcacatacatagtttgcaaatattttctcccattctgtgggttgtttgtgtactctgttgatagtttcttttgctgtgaagaagctcttaagtttaataggccccacttgtcaatgtttggttttgttgcaattgcttttgagatcttagtcataaattctttgccaaggccaatgtccagaaaagcatttcctagattttcttccataatttttatagcttaaggtcttacatttaagtctttaatctatctcgagttaacttttgtatatggtgagaagtaggagtccagtttcattcttctgcatatagatatccagttatcccagcactatttattgaataggaagtccttttcctattgcttatttttgtcaagtggatatccagttatcccagtgctatttattgaatatggagttctcttctcattgcttatttttgtcaactttgtagaagatcagttcattgtaggcgtgctaccttatttctgggttctccagtctgttcccacgctctatgtgtctgttttcgtaccagtaccctcctgttttgattactgtagtcttgtagtacagtttgaatttaggtaatgtggtacctccggctctgttctttttgcttaggattgccttggctatctgggctcttttgttgcttccatatgaatttgagaatagtttttttctaattctgtgaaaaacgacattggtaatttgacagaaatagcgttgaatctatagatagttttggatagtatgactattataacaatatctgttcttccaatccatgagcatggaaattttttttttcatttttatgtcatctatgatttctttcatcagtgttttgtagttcttcttgtagagattttttacatccttggttagtgtggtcctacatttgcttttgtgtgtgtggctatcgtaagtgagattgcattattgattcaactctcagcttgaatgttatcggtgtataaaaatactactaaattttgtacattgattttgtatactgaaactttactgaagccatttatcaggtctgtaagccatttggcagagtctgcggggttttctaagcatagaatcatatcattagtgaagagcgataatttaacttcttttcctatttggatgatttatatttctttcttttgcccaaatgctctaagtaggactaccagtactatgtcaaataggagtggtgaggatgggcatccttgttttgttccagttcttaatgaaaatgcttccagcttttgcccattcagtatgatgttggctatgggtttatcacagatgtcttttattattttgatatatatttttaatgcctagtttgttgagggtttttatcatgaaaggataatgggatttatcaaaagcattttctacatctattaagatgattatatgggctttgtttttaattctgtttatgtggtgaatcatgtttattgatttgcatatgttgaaccagccttacatccgaggaatgaagacttcttgatcatggtgaattagcgttttgatgtgctgctgaatttggtttgcttttattttattgagggtttttgtgtctatgttcatcagagtgactagcctgtagttttcttttttcattgtgtctttgtcagattttgacatcagggtgatactagtttcatggaatgagttagagaggagtccttccttgttgattttttggaataattttagtagaattggtagcagctcttcgttgtatggttggtaaaatttggctgtgaatccatctggtccggcctttttttgtttgctggtttttcattactgattaaatatcagaactcgatattcgtctattcagtatctcaatttcttcctgactcaatcttgggagtctgtgtacttccaggaatttatccatgtcctctagattttctagcttgtatgcacagaggtgttcataacagtctctaaggtcttttttatgtctgtggaatccattgtaatgccttctttgtcatttctgattatgcttacttggatcttctctctttttttctttattaatcttgctagcggtctattgatcttgtttatcctttcaaagaaacaactttttattttgttgatcctttgtattgatttttgagtctcaatttcatttaattctgctctgatttcattatttatttttttctgctaattttggggttggagtgtttttgtttttctagttcctctaagtgtaatgttagattgttaatttaatgtaggtattcagagctataagctttctttttaatactgcttgtgctgcgtcccagagattttgatatgttctgtttctgtttccatttactccaaagtcattcaggagcaagttgtttaggttccatgtaattgtgtggttttgagggatactcttagtgttgatttttatttttattccactgtagtctaagaatatgctttgcatgaatttgatttttttgaatttattgagacttgctttatggctaggcatgtggttgaggttagtgtatgttccgtgtgccaaggagagggatgtatattctgtggctgttaagtggggtattctgtagatgtctactttgtccagttggtcaagtgttggatttaagtccagaatttctttgttagttttctgcctcaatgacctgtctaacactgcccatggggttttgaatagtccctattattgtgtggctgtctgagtcttttcataaatctagaagtacctgttttatgatctgggtgcttcaatgtttggtgcatatagatttataataattgtcttgttgttgaattcaaccatttgtcattatgtaatgaccttctttgcctgtttttactgtttttggtttaaaatctgttttatctgaagaatagtgacctctgctcttttttgtttaccatttgcataatagatctttctccattcctttcctttgagcctatgggtgtcattacatgggagattggtctcttgaagacagcagaaggttgggccttttttttttttaatccaacttgccactctgtgctttttaagtgaggcatttagaccaatatgcgaggttttgattctgtcatggtgtcaatggctggttgtttcatggtctcaattgtgtagttgttttatagggtctatagactacatacttgcatatgtttttgtggtatctggtatcgatttttcatttccttgtttagagctccctttaacatcttttgtaaggcaggtctagtagtagcaaattacctctctggaaaagattttatttctccttcacttttgaagcttagcttgaggggatataaaattcttggttggaatttttttatttaagaatgctaaaaatatgcctccaatctctgacttataatgtttctgctgttagcctgatggggttcccctcataagtgacataaccctttactctagctgcctttaagatttatttatttgcattgaccttgtaaagtctgatgactatatgtcctggggatggtcatcttgtatagtatcttgcaggagttctctgagtttctcaaatttacatttcaacctctctagcaagactggaaattttttatagattatattctcaaatatgtcttccaaattgcctattctttcttcttctctctcgggaataccaaggagtcataggctttgtctctttatgtaatcccatatttattgctggttttgttcatatttttgattcttttttatttttgtctgactgggtctttgagcctttacattctttcctcagcttactctagtcttttgttaagacttccaacagtatttgaaattttcatagtgaatttttcaattccggaagttcagtttggttttcttaatatggccatgtcattgttcaagtcttaaattgtttttctggcttccgtgcattggctttcaattttctcttgaatttcattgagcttgcttgccatccaaattctggattttattgttgagcttccttgccatccagaccctgaattctatgtctgttatttcagacatttcaatgtggttaggatccattgctggggagctagtgcaatcctttggatgtaaagaaatgctctgactttttgaattgcctgagcccttctcatatgaggaggctggcaattctttttcctttttaaattgctctactatggatgaggccttttgtttttatatattccttttcccttgagggtttgactgtggtgtatgttgtgtatagttgattgtcttcatttctgagtgctttcaaagggccagggctctgtatgggctacttacttgtggatagtttcctgctttgggtttcacaggtgttgggtgttgaagaaattttttctttagtggtgtaattcaggatgcgaaccagtagacggcgcttaagagtaagggccagcagataggctcttagccaagctcctcttggagcttactgttgtcggctttgttcatatttttaattctttttttttttttttttaactgctgcatatgcccttacacctttttttgttgttgttactgactgctgcatatgccatatgcccttactcttaagtggtctggagatgggagatggggggcaagagatgactccctcaccaactccattcctaggtcttggtagagcccttttcaattattggtgttgcctccatgatttcttagtctcaagcgaaacgctggcaaactgctttccctcctccctcaggggcagcccaaggcaaggtttacatcaccaggaaatccacaattatttggggacctactggtcctctgagcttggcagagtcagaacaggttgtggtgtgtgtctgcaggtggtctggtgatgcagtgggtcaagggcagaggatgcccaggcaggacagtaataccatacatgtggcacccacggcctgctgttcttatcccagcagatggctgtggggccaagccagctcacacttacccaacccagtaagtctttctgcagcgtctgccccaggagtgggcctgaccagctaggcttgtcccaaaccttctgtgccaagattgctgggcagttccaggtgttccacgctgtagggatccctgaggaagaaggtgctactggctaataggccacacccttcccaaaacagtgttgttgagagaggggcacccagctcccacgccagcacacaaacctgtgtatcactcttctaagtgttctgagagtggcggggggggggtcttccccttctcaaactcaagccaaagatctcagctccaaacccctggacagtgtgctcgaatcctgggagttttgggaccacacctacagttttgtctgctgacccctcagggtccagtgctggctgtgcagaaggagccaaactactcccaggcaaccagcaaaacactcaggcaggacaatgaaagctgtgctgtaggtaccttcctgagggagtgaccaggcaggcagtcttgggaagatctggtggacaagggggcacaaagatcagatgcacccccgtcccacggaagaaatagccaagccctgctctctcccagcctggcagaaagcaggagctgttgtcactcagaacaagatggagagcctggggggaagggtacctatggtcacattttgttgcagctgcagtgtgcacggcaaaaccttctgggatccatgcaggtttgagctcttcctctgccttatctccaggcagttccctctgccaattcaaatgtctctgaaggtcataggatctcatgtatctaggatcccagatgtccacagtgggagtgtggagtcccggagctccttcactcgccccttccttaggacctagtcaggtttgggagctggtcctcagcattcaccaactccaggcaagcttcccagcttcttccctcttcaaatatggtgtatatgtcacctatcaactttcagtattttctttcagaagatctgttcaaagtgtgatggtttactcaatattttgtttcctctcagtgggagaggtgtctcagctatgtctaattaactatcttagttcagtcactgttttattgtctcagtttcatatatttatgttctgatctttattatttcttttattttgctaattttggggattggtttgttcttgcttttcttgaggtgtatcactaggttctttatttgaagtatttgaagtttgtctattttttatgtaggcatttattgctatataaacttccctcttagtactgcttttgctgtatcccatatattctggtgtgttgtgtttccaattttgtttcaagaaatacttcaatttccttcttaacttcttcattgacccattcgtcattcagggcatattgtttccatgtactggtacagtttacaaagttttgctttttattgattctggctttattctattttggtcagacatgatttcaacattttttaatttgttgagacttgttttgcggcctaacatatagtttattctggagaatattacatgtgctgatgaaaataatctgtattgcatattaattggatgaaatgttctgtaaatgtctgttaggtccatttgttctagtgtatagttcaattatgatgtctctttgataattttctgcctaaatgatctgcccattgctgacaatggggtgttgaagtattctactattattgtattgcattctatctgtccctttagatctgttaatacttgctttatatgtctgggtgttttggtattggtattgggtgcacatgtatttataattgttatatcctcttgctgaattgatctctttatcattatataatgatcttgttttttttacagtttttttttttttacttaaagtctcttttgtgtgacatcagtatagctactctagctctctttttatttctatttgcgtgagtggaataaatttttttcatcccatcaccttcagtatatgggtatctttatagataaagtgagtttcttataggcagcatatagttaggtcttgtttgtttaattcattcagtcactgtgtcttttaattggagaatttaataaatttacattcaatgctattatggataagtaagaatttactagtatcattttgttacttgttttctagttgctttgtagctcttcttttcccttcttccatttttcctgtctttgtggttaagtgatttgctctgatagtatttttcatttgttgctttttactttagtgtatatattatacacttttcatttttagtgtttttgttatatatatatatatatattttttttttgctttcagcactctgaatctatggttccactccctgcaggcctgtaaggtttctgctaagaagcctgctgtcaggcatattagaactcccttaaatgttatttgcttattttctctcattgctttcagaaattttctttgccttttacctttgtgagtttgattataatatgttttagggtattcttgtttgggttgaataaaattggagacttttcactttcttctgtgtgggtatttatatctttctcaaggtttggaaagctctttgttattagttctttaaacaaactttatgttcatttgtccatgtcagttccctctttaactccaataaactgaatatttgcccttttgatgttgtcccatagatcccataagctttcttcatttctttgtattctttttcttttttctcttctgtccgtatattttcaaatagtctatcttcaagctcactgattcttttgtttgatcagttctgctattgatgctttctcttgcatttttcatttcatgcattgtatttgtcagccccaggatttctctgtgatttttattattatttcaatctctccgttaaatttctctgataaatttttggattaactatctgtatttcctttaggttcgttgacttcctcaagacagctattttgaattctttgtctgagaggtcacacatctccctcattttagggttgacctctggtaccttactttgtttgtttggtcatgtcatatatcccttcatcttcttgatgcttgtggatatggaacaatgtctacacattgagggattaggtatttattttagtcttctttgcccagttttgtttgtgcctgttcattttccaagggcttttcagagattctaagcaaactgactattatgtttcctgagtccagctataatcactgcagccatttcagcagtaaataaccccctaagcccaggcattctacaagtctttaaaggactctcaggttgatgtggtttctcagtccagacagacctggggaatgcccaaagaagatacttgtgtggaaactccgtacagggctgtgtggaaactctggacaggggttcaagcctagaagactgtcccagtggcccagacaagcatgtctcccagcagatccctgcacaggcaggatggatcctcaattgcaacaaggagaacttggattgagactgggatccctcaggatctgctatgggcaggaaaattgagtcacattggctcaaactgtacatgtttcctagcaggtccctccacagataggatagttccctgactgtagcaggaggggtcaaagctgatactaggccctcttgcaatttggcatcagagactggaaaccccagtctcagctcagagggtgcaggtaacacagcaagttcctgcacagataggacagtttcctgattgccgcaggagagctgggagctgatactgggcctcctagagatctgctgtgggacagtggctagcatgcctgtcaaaatggctcagatgggcccacctctcccagcaggtccctgcacagatgagataattccccaactgcagcaagaggcactggagctgagaataggccttcttgggaatcttctgtgtgacagaggctagaaccatctccttggttcagaaaggcaaacatctcccagcaggtctcagcacatacaggatagttccccaactacagtgggaggggtgaaagctgagactgagccccctcggggagctgctatgggtagaggctggaaagcctggtctcattggctaagagggacgtgtgtctttcagcaaatctctgcacagacaggatagtcctctgattgcaacaggagggtttagagctgggagtaggccctctagagacctgctgtgggacagagactggagagtctattaggcaggctcagactctcaggctgcaagatatgggcaattcgccctctgggcccttgtgagagccactctgagctaggacctcagctgagagaggctggagcaacaccatggcaattttcggattcactgcctaaactgatgtcagtgggcagatgagcctttcacccaataagctaacgtgcgagggtccttccaaaccccttggcagatggttttttattataggctcaaagaaaaatggggctataaccaagttccttgggggacaggtctgtttccatgcttgaacttggaagcaagattgatgggacaaaacacgtacgttggtgttggtccacactatcaaaacaaacctcctaggtcttgagctccattgaggtttcacagactcctacctgaatgttgaggcttcttcagagagacttttgactgtggatgggtgcagaatatttgtttttgtagggggatgtgagcaggttgccttctattttgccattttggtgatgttgctcctcccaagtaagtttttgaatgagagaaactacttccttccaatctttcagtgagatgtagccatgccatatgcaaaaagaaataattcaagctttcatttgcagggaggaaacttggtattctaatagatctactgttccactaacaagtgcgttccttctaaagcacctaaaacatacagatagaagaattaagacaaattaattaaaatgaaagaaatcaagttattgcagctttttatgtttgtattttttctagaaagagtaggccagattttgatcttaagcaattatttcaaaattgcaataacagaagaggaaacttaaaaatacaaataacagtgtacagctcttcttcatatgtctcatatgaacaatttttttattatttttatctgaaattgcccagttctctacttactttgatcagtaaaagtatatactttattacacacacacacacacacacacacacacacacacgtataagataaaatatcaaatttcagagcttataaataaaaataattacgataacatatgaagatgctaaccaaaagaaaataaagagcaaaaggttatactccaaactatcaagatggtatttaaaaaaaaaaaaaagatctcataaaataaaacttttttctctttttccttcattacagtcattatttattagaaatgtaggtggattcttgcaacatttcccatacagaaatctcttaagtaaatcagctgtttctaattacttctattataaaatctaaccagttattgctgagggaaaaaaatgcattctgaatatagtacaagtcaaatgtaagaatacagctaacttttaaaatgtatgcataaaaagcaaatgataaaactgattttattaaactgtaacagctatattcaaataagggaggagaacatccctcatattatcttatgcccaatttctgcctcaaagaaaaagtaggtgttaaagaaaagacagaagtcaaatcagtagtcagacagcccggcgctgcattccaggcctggtagttaaacatcaacccctgacctaaccagttatgttatctatagattccagacattgtatggaaaagcactgtgaaaatccctgtcctgttctgttcccttcagattactggtgcatgcagcccccagtcacatagccactgcttgcccaattgatcatgaccctctcaggcagacccctctagagttgtaagcccttaaaagggacaggaatagctcattcagggagcttggtttttggagacgtgagtccaccagtgctcccagctgaataaagcctttccttccacaactcagtgtctgaggggttcttgtctgtggctcgtcctgctacacaacgtgttaagagaaatgttatgttgtcttcaaagtgtcataaaataagtgtcaccaaagagaaactcaggaagcataattgtaggcttcagaacatctagaaatttccctctcactatggtggcagtaatccctgaaataccatctattaaattagtgcttgttttccccatcactcaaacgtatctaacgtcaatctaaggcacttttaagacctttttgtagatgcatttttagaaatctttgaatttactaacgtcttttgggttcttctgttgttatatcaatagttgtacactttgttacagtgtgtgtggcaggaggtagtactgatagtactaataactatagaaatagcatctactacctttacttggtagtgttaccagaaaggggtcctgatccataccccaagagaaggttcttggatcttgctcaagaaagacttcaaggcaaacccgtagagtacagtgaaagcaagtttattaagaaagtaaaggaataaaagaatggctactccataggcagagcagccccaaggtctgctggttgcccatttgtatggttatttcttgattgtttgctaaacaaggggtagattattcgcgcctcccctttttagaccatatagggtaacttcctaccgttgccatggcatttgtaaactgtcatggcattggtgggagtgtagcgatgaggacacgcagaagtcatttttgttgccatcttggttttggtgggttttggccagcttccttacggcaacttgttttatcagcaaggtctttatgacctatatcttgtgcagacttcccatatcatcctgtgactaagaatgccttaacctcctaggaatgcagcccagtaggtctcagccttatttacccagcctctattcaagatggagttgttctggttaaaacgcatctgacagaagtacacaccagatgctgagctgagtgctttgtgtgcattatctagtttaaaatcataactttaaaaggtgggtattctcatttcattttatagatgaagaaactgagatataaaattttaaagattattgtttttgagttttaaaaatcaaataaattacccaacgtcacttagagattaaaatgttctgtctctgtttaattgtagagaatgcagaaacatgaaattttctgacatccaaattatatctaccaacaccattcttaagttcactgttaaccttttgatccctacctaatggtttctctcattaagagtagtctcttcactaaagtctattaatacagcaacaaattttctgctgatcctggaaaactaatattgattatcagatattgttcaaatattagctgggtgcaaagtttacaattgcaccttgaactggaagaacagaatattacatttcatccttaaagaaaaaaagaaaagcattaaagcattaaagaaaaaaaatggcattgctgtatttgcagtgtcactgaaattcaagggatattttttagttttcacagttcaagaggtttttttcttaaattttcttaattcatgaattctttaagcttaaagtattattcagaaaattcctattaagcaagagatacctggctttgaataataaactggttggtggataaagttgctattgaaaatctggagagtttgcaaaatatatattttgcattctaaatcacaaaggtgttttttaggcaaccgtaaacttgcatctctcacttctctgtcacttgtatctatcacatcttttctgagtgacctgagattttattgcctcatttcctatttttcagttatctgtcattctgaacgatataattggaatgcagccctatcgtttttgtctagaaaccatggcaacagtactggaagttcaggactaaattgccccaggttgtttggtgggaatgatagattctttggtgacagctctgtcttaatggggtcccatttcagacatagtccttcattcttctcactatcgtttgctgaccctgggggttcctgtccctccctgttagtatttgtgacatgaatgggacaaagttaaacaggctttggtagaatttgcagtgagacaagaagaattttctgtgtgtaaaaggaatcaaaagagttgtagacaaatatctctgttaaatggtaataaaaatagaagataaaaatcaaacatctgcattttggaacatttttcatcaattgtgattaatttttacagtggaaagcactgtaaaatataccctggtcagcatttaaggtctggaaaacacgtctggataactgagagtttactagccgattttaggccataatatagaaattaagtccagaacttaagtgttctaattcaaaagacttacaaatggtcattatcatgcatctttgtttcctgtttacccttgaaacaaagaatcatttcactaaagtgtatgacaaaacttcatggccgaacgaaaaaaattccagaaaattgctttatctgaaggactgagtttttgctcaaacagtatttgactaggagtgctcttcaaatctgtttctatgtaaatatatttcctttattttcctaaaatctgactagatgagtaaatttcatgccataacataaacgtctaccctgtagaattttcaggagtcagctgagaaaatgggctctctggagaaatgatctgtctgcactgtgtccagtcttcagtctcttttaatattaatctggactcctgaatggctcagaattatccaactgtctttcaaatgtttctagattagccagctgcaggggttgggggacagagacagtattaagtcaatccttcaaccagcttttattgagcatctaatgtatgccaggcattgttccaaatccaggtacttaatttggagttgcccctggaaacacagaggagcctgagacagacctaacgatgtgcataaaagacacacagcccacatcttaaatgttgtctactgtttaagttactaaaatgatattaaaaccaccacaagtctctaatttttccagagtgcaattttacatctagtccccaaagattaaagtccaaatattaacattttcaaaagatcagtcctttgattgcaaaaatttttatcaaactaaaagttattaacgacaatgaacactaattaggcacccacaagagactgagaaggaagcccaaggactctgctctgcagaatcttctggtaggagatacaaagtctcaatccaggttgaagaacaccaaatctggtttccactgcccttttccatccccaggagcttgccaacatggtcccctgtggatctgacagttcttgggccatctataattccaggaaaagctcttgatcaatagcctcagcaaggcagaaacatccaaggttccagttgagacaagtatgaacaccatctgtcctagaatgaatctaacaaactcgggagccctacagcctcttgcaaaaccattctaatgaattataacaaaccaggtaaccacctttgttgtgttttgttgtcccacctatgcggtaagcttaagacccagacatctaaggaaatgttaacttacctctacagtcattcagcccttatcagtcacgaattcattcaacagacatctacttattgattacaacgtgccaaccctgggctaagctcctgagattcaaagataaatgtgagaagtttctatctccgaaggagctgactcttcagtagcagcctggaaaattaattcactacaattcctcatcgtcactattgtttggaatatattttattcccacattcaccataataattcaagacatagccaatagctttttcaatagccttaccttgtctaatctttctcctcttttaatctacccaacatttcattattttttccctgagtagctttattttccccctaaaagttcacacaaatcaaattaacatattgaatcataaaccatgaaactttctataagttatctgctcacctaactgcctcaatctatactgcacaccatcctaaaccgtgttttcctctccttcctaaaaaaagatggagacttatacttccatttttgtcccgatttactgcagggattttaactaactagtcagacttggttggttctgtttctgagaaatttgtttattctctctaacaatactaatcagcaacctgaactgtaagtccatataacatgcaagcttaactctgcagaaaaaggcaaaggaagcccagtagaagcctatggatcaagtacaactgagatgactatttcacccattaaacataaacatcaattaagtaggaaagcatataaactacattaataattttctctaacattaaacctataaatgtacatttattttatttaccagtcttacacaagagaggcaaaagtttttttttgcacttgagcccagtaattggagtaaaactacaggtgtataaactactcccatactgcattctctgtgatttctagtttgaggtccttcaagttggaatgagaacctaaagacacataaaagcaatcttaatgcagtaatagaatcctttcgggggtttgttgtattactttattcaatcttttattgttatcttgcccacatctatttttttcaacttttattttagatccaggggtgcatgggcagttttgttacctgggtatattgtatgatgctgagctttgcggtagaaatgattctatcacccaggtactgagcatagcacccaattgttagttttttaacccttagatccctccctgcacatctattttgacagcatattttaacaacttaatccttccaaactcttcaaattagttttgacatgaacaattctttctgtttttgtaactgtatgtcatcagtttaaacaatatttaattaaattacataattacaatggaaaaactagcataatcacattttgggaagaaatgcactgcctttgaggtaagcatgtaatttaactattggaagtatggggagcaaaagatgacaggtgtattcagtgtagcctataggtttattgtaacatggacatcattcaatgtgtttacagaagaaatagagagcgatggttaatacctttaattggttaaacagagcttcagtccttgctcttgaaacccttcagtctaataatagagacaggaaaagcgtctgtagcagggaggcaggggcactgctgcctttgcatggaggttaatttcctacttgctaagttttgttatgggatgaggctgtctcttctggttcttgtcctcacctaggtgccccagtcccctgacttctgtccagggggcttacaggtacccaggtttgttgaatggcctgtgtgcttcagtgatgagtctgttggggagtcagtcttagagagttggtcctctcctttgccccttcctctccaccctggtcctccagacctgttccttctgcagtatttttagttacttatttttagccacttatttttctcatctcccaggcccagtattatgtagtctctcttaagcagaaaaaaaaagttagtcctaaaataagccttgggagtttctttgaatctttgtttctactttgatgtggcacaaaaaacaatgttcctggagtgagaagagagaatatggaaaacacactgggcataacaagactaatacttcaaggtctaattctgccacacacaaatgcacatatataatttaaagggattgaaatatgtctgagattttaatagacaacatctctttaattttgtgcccctttatgatttatagaatatttacattgtatccctaagttcaggcctctgtattctttctatggcgatgataactataatttgagccttaacaaggaaaagtaacgggttagcacttaaatgtcatcaaatttaatttcttatcccattcaacactagtgcaaaatgaaaaaaagaaaatatctgtgttagaatcacaaaacaggccattaccttgttcatatcaaagcaaggattcaaatttgggtttgctctcaaaaccattaacctaatttattttagctggagaaattgaagactatatagtcttattaaaaagtggctactgctacttctgaaactacttttaaaaggaaatatagcttcttcctctctgacctttattaagagaagacctgaaaaatcttgttatgatttaatatttaattttttactattttcaaagcacagtggctactcaataagaaatgaacatgcataagagagactaatcattgagtacagagcatttagttctaaagaacaaattcaaacaaggcaacagctatcactacagaattattacagctcaggaaaccatatacactagaatgtaacctcattacagaacttctcaagaacaacatggattttactatttgtgcctaagataaaatcaaaattagtaagtccacaaaattagccaaatttaaagtttccctacatggtacataagccaccaaaaatgtttaagtctaggtatactttattaattagatgttatataattacaatatatttagagttttaagatggaaaagaaagactttctcctagagatcactcaaaaaaaaaaaaaaaaaaaaaaaaggagaacaagaaacgggaacaaaaaacctaaatttatccttaacaaaactggaatcttacccccaaccacgacctataaggaaggatatcatatgcaggatggcaaaacagggccatggaaagatgaaatgaccacagctacaaatctcacttgaagtcggcagctatcaattctccaaagtaactggcacatcccactaagtggggaatcagtaatcgcttgcttgaaacaatagcaacagatgagcttgctggtggccagaacttcccctggatgagtttggcacaaaggagaagcagattttatttttagtttacatggccaaaaggaaataattaataagagatatagatagatgtggagacagataaattcatcagaaatggttaagtggccattaaaaaaaaacacacacaaatacccaaaaatgataatggggaaaaaattaaaatttcaggaaaatttaaatgagattactttgctcaattctatgcaagtaaagttaagattataggtgaaacagatgatttctaagaaaatataaatggcaaactgaccttcaaaaagaaaacacctgaagtgactgtattcattttctattgatgtataacaaattatcacaaacttagtggcttcaaacaatacaaaataatcttacagtccttgggtcagaactccagcatgttttagcagagttctctgctaaggtggacatcaaatgttcagccaactctgtccttgcctggaagctcaactggagaaacctctccttccaagctggctctggttgttggcagaatccatttcttcatggttgtgggactgagcccccattgtcttgctggctgtcatctggagatcactttcagctcctagcagtcactctcaggtccttgccatgtggccccctccagggccctctcatagcatgacaacttacttcttcaaggccagcaggagaatttctctcacatttcagaaccttcaaagatcttccttgaggaaaggccaagtcccattttaagactcacttgttaggtcagacctatccaggaaaatttcccttttgatagaaccataattatatcttcaaaacttcttcaccgacttcatagaatgtcatctaatcacaggtttgaaatccatcatattcacagtcctttctatactcaaaggaaggagatgatacaagggcatgtatagtccagcgggaattttgggaaccatctgaaaattctgtcaaccacactgaccaatgaccacagaagaaggagaaaatcattaacaatctattttctccaaaaaaaaaaagcaccaaaccccattagttttttccaaacctttaaggagcacatactataatgttctaaaaaaactttttttctaaaatcagaaaagaaagaaattcttcaaattgaatataaaactatcacaatatttttaacaaagcttcaccagggtagcacaaaaaatagaaagtgatggtatattttatttataaatactcatactgaaaaatggtaatcataaatataatattacacaatagactagctatttaaagactatacatcaaattaagttgagctttcacaggtatgtttcaatattgggatacgtattaacaaattcaccttaatagtaaattttaaaggttatcatcatctctacagataacataaaagcatttgataaaatttgcaaactgcttttgcaaaatacttaatacagtagatcccccttatccatgtggatacattccaagaccccaaatggatgcctgaaaccatggatagtaccaaatctgattgctgtcggttggaacatgtttctgttccggtcctccgtccacaaatgtaatgcctttcccatcctaactaagcacttaacatgcactgtagctataacttttgcagtttaaggtgtgacagtaaaactagcatgaatttctttttcctcctgcacaatttcatgggtagatttgttcttaggatagatcttagcacctcagcatatgactttttttctttccttattaagtcaagaactgtcaccctttcacttaaaggaagcactttacagcttctctggcacatttcagttgccagagtcatcactcttgcatttgggggccattattaatcaaaatatgagttatttgaacacaagtactgcagcaatgtcacagttgatcttataatcaaggctatcaggtgaccacaggcagacagtgtagctagcatggaaatgctgggcagaggaatgacccatgtcccaggcaaaatggagcaggaggatgtgagatttcatcacactattcagaacaacacacaatttaaaacgtatgaattgtttatttctagaattttctaacaatattgttggactgtgcttggccacaggtaactgaaaccatggaaagagaagtcatgaataaagaaggactactgtatttagcatgattaaaatataaatatgtgtgtttgtataatggatatatttcaactgaaaagctatctattttcttaatgagaaaactctaggaatttttccattaaattattatttaacattattttatattattctgaagatagtaggcaatgcagttagataagagataaaaatacgatataaaaattagaaagcaggggggaaattttctattaggtaatatgacctgcctaaataatgcagtgaaatcaactaaaaaatgactataaacaataagaaatccagtaaattgcctgggtaaaatatgcatgagcgtgagtgtgtgtgtgtgtgtgtgtgtgtgtgtgtatttgtaaatatatggaaaacaatagcctttataaatataaaaagaaaccacccaaaggatgaaaagaaaaaaacaatttacaacagtgaaacaaaaactaggaataaatttaagaaatgtgcaaaactctgtcaaaaaatgttataatctactaaaggacacaaaaaaagacttgaaaaaaataaaaatttataaagaagattctccctatgtatactcataaatttaaggcaatctcagtaaaaatggtaataatttttttagctaagctaagtgcttctagttcataagaagaaatagaataataagaaaattttggagaaaaaatgataaggggctaatcacaacaaataataaaatacataataaaactagcctgaataaacacagatatctatagcacaaaagttaaatggacccagataaaaatgtgaagttaacataagataaaattaacatttcaaatcaagacggagacaatagtttcctcagcgatagtacagaacaactacccattttgaagaaaaaaaaattgaatcccacacttcatacaaaaagtatgaagatcctaagaagacaaatcattttaagcattaaaaatgacaaaaaatataattacaaaagttacacaagaattagaatagagatagtctcctaagtgtgttttaaaaaaaaaaaaaaactagaagcaatcaacgaaaaggttaattcatttacataaaatattatgtgaaaataaaagtcaaatgacaatctgggaaaaattatttgcacctaatacccttcataaataacgatctctcataaatcaacaagattaagcatcatttttaaaaggcaaaatattgcaacagttcacagaaatgaaaatacaaataactcatccattgaaagttattgattctcaattatgataagaaaaatgtgaattaatattataatgatagatttttcacttatcagatttgcaacaatcaagaactttgatagcaatgtgttgttttagagaaatagacactttcaaatacagtcagtcactgtagttaaaagtggtacaacctctagttggaacaattagaaaatatgtttcaagatgtaaaatgtgtatatgtgttggctcaacaattttatttctatttacataaaccaaagataaactcacacctgtgtgaaatgacacatatacaacacatgtatctcaatattgttcttatggatggaaaaaatggaaaacactaaagatttatcactaagggactgattgaattaattattatctacctatgctatagattacagtatagtctttaaaaataatgtaactttatttttactagtatggaataatatccaagtctattggtaagtgaaaaaaaggcaaagtatatagaacaactgtgcaaaaattaaaatgaagggaatacaaatgtttttatttatattgaataatttatatataaaacatatatagtatatgtgaacatatttataagacaaaattaaaatagtttcatatgcagacaatattcatagatgtcctcatgaatccaacaaatatttgtcgaaagcctattatgtgaaaatgacattgctattgaaaataatataatattataatctgcaggaatgacaaggtctctaccttatgaaattgagtgccaaaaagattatacataaacaaacatgatcatttaaatcagccagtattacaaggcaggatgcccataatatagaacagttataactgaccacataattgacttggtatttatatgccaaggtggaagaggatagaatgggctgtgctatttcctggcccccatttctcacacattaaacccaatacctggctcaatatgcattctctgttggcccctgaaggcccctgacttttaagatcctcttaatggaaggaatttagtttggatggtaagaaaaaccttttaaaatacatctatatctgcattcatgtgttaatatatatttacatgaatctcacaattgtttaaatacaaactctagaaacaaatccaaggtattgattaggccaaaacttccaagctaaaggaaggactttggtccactaggaaatccctgagcaaagagaatgagcgatttgttgaatagtgttctctgcatggcatcccttccacaggtgtggatcccagggtagcttcttttcctcaccccttacacctccaaccttgagtctctctcatccagccatcaccaaagcactgtttgcagtgaatgttccatatgttacacaactcacagatttgtaggagaaactacaaaacatgacacaccggcatcctaaagaaaggggttgtttctgggcccttgtccccaagccgggtcattggcccccagcctccacacttgctaacttgccaaacacttggttcccaagacaaaccactgtcaaagaacctcagtattaattcataagcattttcactttctccatagttgtctgaaaatacaaaagccccccagggtgtttaacttatactcctaaagtagttcatttgactccctggaagggtaaaactcaatctcattttacgattttacactttttcccttaagccatctctcattaaactatcatgacaatgctttgtacacatggttttgttagaaataaattcagccttataaaatgtgctcattggaaatcctttttatgccaaggatgattctaaaatattttatataccttctcattgcttttatgagacagttgtattagagaccactccttacttctgagcttgcaaagtaagtcaaagtgtagttgcatttcatatctaaaatgtgacagaagcctttctgtggcacatcacatgcccccagatacacaagaaaatatctggaattgttcctatggaattttttcctacagtatttagcctagatgacattaaaatatccattttagttcaacatgcccagaattgatcttccaaagaaaatattaaaatgactctaaactcattcagaaactcaaagataaacagaaacagctgctaaatgtctcaccagccagtctgagattcatttcaattacccaacaaaagatacctcaggtgtatcagagcactttcaagttaaattttatgtctattagatataagcctaggggcaattatgaattccttccagttgttccttcctttatgtctaatggcattttcctaattccctgtttaattttattttagcttttatagatagttgtaaagtgagcaagctgtaacagtttacatggcattcagtacctgtggtaaggtcaatttgacttcctatagaaatctttttaatgttgagatttttttccaaagttttctatttttctggttgccattttcctctaacaagaaaaatgaaatataatctaatcatgctaatgcttctaacacatcaatctatataaagcaagtcagtttgccccccacacaagaggtatttgtacagaaagtttcaaaataaaacacctcttcatatagttctcaagtccttcacccaaaaccaaataacaatattattgtgagccttcagagtgtatacacacattcactttagaggtataagaatttgatttttggttccaagatggccaaataggaacagctccagtctacagctcccagtgtcagcaacgcagaagacgggtgatttctgcatttccaactgaggtaccagattcatctcactgggacttgttggacagtgggtgcagcccgtggagtgtgagccaaagcagggcaggacatcacctcacctgggaagtgcaagaggtcagggaattccctttcctagacaagggaagccatgacagacggtacctgcaaaataggacactcccaccctaatactgcgcttttccaattgtcatagcaaatggcacaccaggagattatatcccatgcttggctcaccaggtcccacgcccacagagccttgctcactgctagcacagcagtccaagacccaactgagaggccgcagcgagggtgggggaggggcatctgccattgctgaggcttgactaggtaaacaaagcggtggggaagcttgaactgggtggagcccagcgcagctcagtgaggcctgcctgcttctgtagactccagctctgggggcagggcatagctgaacaaaaggcagcagaaacttctgcagacttaaacgtccctgtctgacagctttgaagagagcagtggttctcccagcatggagtttgaggtctgagaatgaacagactgcctcctcaagtgggcctctgatccctgagtagcctaactgggagacacctcccagtaggggccgactgacacctcatacagccgggtaaccctgtgagacaaagcttccagaggaaggatcaggcagcaacatttgccgttctgcaatatttgctgttctgccacctccgctggtgatacccaggaaaacagggtctggagtggacctccagcaaactccaacagatctgcagctaagggtcctgactgttagaaggaaaactaacagacagaaaggaataacatcaacaaaaaggacatccacaccaaaatcccatctgtaggtcaccatcatcaaagaccaaaggtagataaaaccacaaagatggggagaaactagagcagaaaagctgaaaattctaaaaatcagagcacctcttctcctccaaaggatcgcagctcctcgccagcaacagaacaaagctggacggagaatgactttgatgagttgacagaagtaggcttcagaaggttggtaataactaacttcttcgagctaaaggaggatgttcgagcccattgcaaggaagctaaaaaccttgaaaaaagattagacgaatggctaactagaataaacagcatagagaagaccttaaatgacctgatggagctgaaaaccatggcacgagaactacgtgacgcatgcacaagcttcagtagccgattcaatcaagtggaagaaagggtatcggtgactgaagatcaaatgaatgaaatgaagtgagaagagaagttgaaagaaaaaagagtgaaaagaaatgaacaaagcctccaagaaatgtgggactatgtgaaaagaccaaatctacatttgattggtgtaccttaaagtgatgggaagaatggaaccaagttggaaaacaaccttcaggatattattcaggagaaattccccaacctagcaaggcaggccaacattcaaattcaggaaatacagagaatgccacaaagatactcctcaagaagagcaaccccaagacacataattgtcagagtcatcaagattgaaatgaaggaaaaaatgttaaaggcagccagagagaaaggtcaggttacccacaaagggaagcccatcagactaacagctaatctctcagcagaaactctacaagccagaaggttgggggggtggtggccaatattcaacattcttaaagaaaagaaatttcaacccagaatttcatatccagccaaactaggcttcataagtgaaggagaaataaaagcctttacagacaagcaaatgccgagagattttgtcaccaccaggcctgccttacaagagctcctgaaggaagcactaaacatggaaaggaacaactggtaccagccacttcataaacatgccaaattgtaaagaccatcaatgctagatagaaattgcgtcaactaatgagcaaaataaccagctaacgtcataatgacaggatcaaattcacacataactatattaaccttaaatgtaaatgggctacatgccccaattaaaagacacagactggcaaattggataaagagtcaagacccatcagtgtgctgtattcaggaaacccatctcacatgcagagacatagataagctcaaaataaagggatggaggaagatctaccaagcaaatggaaaacaaaaaaaggcaaggattgcaatcctagtctctgataaaacagactttaaaccaacaaagatcaaaagagacaaagaaggccattacataatggtaaagggatcaattcaacaagaagagctaactatcctaaatgtatatgcacccaatacaggagcacccagattcataaagcaagtccttagagacctacaaagagatatagacccccaagcaataataacaggagactttaacaccccactgtcaacattagacagattaacgagacagaaagttcacaaggatatccaggacttgaacacagctctgcaccaagtggacctaatagacatctacagaactctccaccccaaatcaacagaatatacattcttctcagcaccacatcgcacttatttcaaaattgaccacatagttagaagtaaagcactcctcagcaaatgtaaaacaatagaaattataacaaactgtctctcagaccacagtgcaatcaagttagaactcaggattaagaaactcactcaaaacctcacaactacatggaaactgaacaacctgctcctgaatgactactgggtacataatgaaatgaaggcagaaataaagatgttctttgaaaccaatgagaacaaagacagaacataccagaatctctggcacacatttaaagcactgtagagggaaatttgtaacactaaatgcccacaagagaaagcaggaaagatgtaaaatcaacaccctaacatcacaatcaaaagaactagagaagcaagagcaaacaaattcaaaagctagcagaaggcaagaaataactaagatcagagcagaactgaaggagatagagacacaaaaaaaccttcaaaaattcaatgaatccagcagctggtttttcgaaaagatcaacaaaatagatagatggctagcaagactaataaagaagaaaagagagaagaatcaaatagatgcagtaaaaaatgatgaaggggatatcaccaatgatcccacagaaatacaaactaccatcagagaatactataaacacttctacgcaaataaactagaatatctagaagaaatggataaattccgggacacatacagcctccaaagtctaaaccaggaagaagtcaaatccctgaacagtccaataacaaggtctgaaattgaggcagtaattaatagcctatcaacaaaaaagtccagtaccagatggattcacagccgaattctaccagaggtacaaagaggagctggtaccatcccttctgaaactattccaaaaaatagaaaaagagggaatcttccctaactcattttatgaggccagcatcatcctgataccaaagactggcagagacacaacaaaaaaagagaattataggccaatacccctgatgaacagtgatgcaaaaatcctcaataaaatactggcaaactgaatccagcaatacatcaaaaagcttatccaccacaatcaagttggcttcatccctggaatgaaaggctggttcaacatatgcaaatcaataagtgtaatccatcatataaacagaaccaaagacaaaaaccacatgattatctcaatagatgcagaaaaggcctttgacaaaattcaacaacccttcatgctaaaaacactcaataaactaggtattgatgggacgtatctcaaaataataagagctatttatgacaaacccacagccaatatcatactgaatgggcaaaaactggaagcattccctttgaaaactggcacaagacagggatgccctctctcaccactcctattcaacatagtgttggaatttctggccagggcaatcagacaaaagcaagaaataaagagtattcaattaggaaaagaggaagtcaaattgtctctgtttgcagatgacatgattgtatatttagaaaaccccattgtctcagcccaaaatctccttaagctgataagcaacttcagcaaagtctcaggatacaaaatcaatgtgcaaaaatcacaagcattcctatacaccaataacagacaaacagagagccaaatcatgagtgaactcccattcacaattgcttcaaagagaataaaatacctaggaatcgaacttacaagggatgtgaagaaccgtttcaaggagaactacaaaccactgctcaatgaaataaaagaggacacaaacaaatggaagaacattccctgctcatgaatagaaagaaacaatatcgtgaaaatggccatactgcccaaggtaatttatagattcaatgccatccccgtcaagctaccaatgactttcttcacagaattggaaaaaactactttaaagttcatatggaaccaaaaaagagcccacattgctaagacaatcctgagcaaaaagaacaaagctggaggcatcacactacctgacttcaaactatactacaaggctacagtaaccaaaacagcatggtactgttaccaaaacagagatatagaccaatggaatggaacagagccctcagaaataataccacacgtctacaaccatctgatctttgacaaacctgacaaaaacaagaaacggggaaaggattccctatttaataaatggtgctgggaaaactggctagccatatgcaggaagctgaaacttgatcctttccttacaccttatacaaatattaattcaagatggattaaagacttaaatgttagacctaaaaccataaaaaccctagaagaaaacctaggaaataccattcaggacataggcatgggcaaggacttcatgattaaaacaccaaaagcaatggcaacaaaagccaaaattgacaaatgggatctaattaaactaaagagcttctgcacagcaaaagaacctaccatcaaagtgaacaggcaacatacagaatgggaggaaagttttgcaatctactcatctgacaaagggttaatatccagaatctgcaaagaactcaaacaaatttacacgaaaaaaacaaacaaccccatcaaaaagtgggcgaaagacatgaacagacacttctcaaaagaagacttttatgcagccaacagacacatgaaaaaatgcttatcatcactggccatcagagaaatgcaaatcaaaaccacaatgagataccatctcacaccagttagaatggggatcattaaaaagtcaggaaacaacaggtgctggagaggttgtggagaaataggaacgcttttacactgttggtgggactgtaaactagttcaaccattgtggaagacagtgtggagattcctcaaggatctagaactagaaataccatttgacccagtgatcccattactgggtatatacccaaaggattataaatcatgctactataaagacacatgcacacatatgtttattgtggcactattcacaatagcaaagacttggaaccaacccaaatgtccatcaatgatagactggataaagaaaatgtggcacatatacaccatggaatactatgcagccataaaaaggatgagtttgtagggacatggatgaagctggaaaccatcattctgagcaaactatcacaaggacagaaaaccaaacaccgcatgctctcactcataagtgggaattgaacaatgagaacacttggacacagagtggggaacatcacacattggggcctgttgtggggtggggggaggcaagggatagcattaggagaaatacctaatgtaaatgatgagttaatgggtgcagcacatgaacacggcacatgtatacatatgtaacaaacttccacattgtgcacatgtaccctagaacttaaagtataatttaaaaaaaataaaataaaataaaaaataaagaatttgatttttatattctacatcaaggtcagcagcctgtaacacataaggccaacagaagttaaccagtactcccttttcctctccaaacagctgagaatacatataatgccttccttcccccaacacacacattcacagacctgcatgttatcatatgccctgactcctctcatggaggccaacatgtggatatacatcaaccacctcacgtaacccccaacataccggaaaaataggctgtccactaggtagactatatcgtgtaatcaccattcttgagtacctataatgtgcctcctccagatgctgtgtgtattatttaatttggtccttacaaccacctatgaagtagatacattaccccaactttatggaagatgaccctgagactcagaaaatggtggaaagctgcccaactgaagctcggttcactgtgccacattgtgaaagtgtatcaacttttcctagagatagaaataatttgcaaacaccattataaaccttcaagagtttcacattttttattttggtgaaaacatcttcatatttaatattgcttaaaaaactaacaaaaaaatttaaaactgaatttctctttgattctttgaggcatttattgcaatgctgttcatttgagtagcatttgactgagtgcttgttctaaagtgcacccttggctcctagaaacccaaaccctcactgtttacgaaaagagtttttaaatgtggatatttgacttgcaagaagacagaaacccacctcattttaacttagaagaaaggaagaattcgggaggaagctcgtggaaacggtgcaaaagtcaggaaaatggatgagtctcttggtggcctgagggcctcaagtgctgctaggacctttgctctgaatgtctccccaccatgcctctcagtgtccatttcattccctctcacggactcccctcctgcccctcaggcatggccgctgaaagctctcgggctttcattttccgcttcaccaccagagaggtagttccagccaccatgatgaaacctcagagaaggacttcaattcacctggcctgagtcatgttcccacccctgccatcaggacatggcaagattgacagcccaagtgagcggcaaaggaaaagcctatttgaatatttttgtaaaagaaggaaggttctgttccactacagaaagtcaactttttaaaaatgtttttaaaactttgattatatttttagcagatggtgaatccagaaaatgtaagcaataaactcaaattctggagacatatggaaatatggtaaaaagcaggtgctttgcctctgatgtaaattctaagctgcagaataatgaattaagggaaatgacaggttaggtccttaattacattttacccaaagaagcactcttcagatgttcaaatccagtttttcctccccaagacttaaagttttgaataaacattaagtgatacatctgtttttaagtttcattccccgcccccaaatcgctgtttttaagactgcttaatgttactgtagaaatgaacactttcttaaaagtagtgatcctgtgaacaatgtaacctctgaagctcttctgctaccactcaaacctctagaaactcattaaatgcaagattgaccacattttttatactgacacaacagagcatttctgacttagaaaaaattctaagcagataactcaagaaattagggaattttcccctgaaaataaaaccatcatattctcattatagactataaacacatttctaacttctacttttatttcattctgatcaacaaatagaaaagggggatcaggacaagtcaaaataagctgttctttttttctcgctatctcagagaataacctcaaaatccagatttctgtgaataaaggaaagcaatgctttgtggaagtgtatcttcccaaagttaccctttttagatgtagttttattacatctagcccagaaaagtagtttaatgatagccatagcccttttcaaaatctatatcccaaagcttttcaggttaacaatattttaatttctagatagatggtaaagtgcttgactgtctagtcttaagaattttttcaaccttaccctgcctaagttataccatacaattaggaagttattttctggtcctagaaatttaagtatttatttatatagagagtgctgtatttttaacatcactcatttctttaatttataataaacaactagtgaatgaaaataagctcaaaaaagcttattcccttgaaatttacatttgaatgtattatgatcgtagctgttatttttaatggcagctagctacagagtgagttatcattaagtaactcagttgtctggaattaacctgactttatattaataaaccaataactcattcattcagtcagtcaacaaatacctacagagtaccatgtgtcaggcactgttaaaggtgcttaggatacatcacttaatgaacatagtaaataagtgagatatctactgagttagaaggtgtgagaacacaggcagaaaagggtgatgagtactgagagtataggatggatcaaaaggatttggagctatgacttgaaggagatgagggaactaggcatgtggagttctgcaagaagagaattccaggcagaagaaaccgccaagataatgcccgagggtgacagagtatctggcttgtaggaggaacagaaaagaagccagaatagcttgggcagaaggagggaaggaaagaagcataggaaataagattagagagatagccaattttggggctgaatgcttttaataaatacttttttgagaatttgaattattatttccataaagtgtattatgcttcatcttatacctgatcatagtgctcccttattgtcctcctaataaccagtttcttattgaaactaatttcatagttcatgtgaccagtgtaactgtatgattctattgaatttaacattctctatgtccaaatttcaggttgtggctgatatagaaaattgttttaaaaataagacaaacatttaattattccatcaatttgaactgcattatgacaaaagaaaaaaatgccaggccaggcacagtggctcatgcctgtaatcccagtactttgggaggccgaggcaggtggatcacttgaggtcaggagttcaacaccagcctagccaacatggtgaaacctgtctctactaaaaatacaaagatcagctgggtgcggcggtgggcctctataatcccagctatttgggagcctgaggcaggagaatcactttcacctgggaggcagaggttgcagtgagccatgatcgctcactgcactccagccagggtgacagagcaagaccttgtctcaaaaaaaaaaaaaaaaagcaaagaaaaaatgcatgtattcattcacaggtgaaataacatttcttcaaaatatttatgctgtcaaaagaagacacattatttgcaaatgtaaaatatttctctaagagttaactactaaagtatggagatatggtttgactgtgtccccacccaaatctcaacttgaattgtatctcccagcattctcatatgttgtgggagggacccagggggaggtaattgaatcatgggggctggtctttcccatgctattctcgtgatagtgaataagtctcatgagatctgatgggtttatcagaggtttccacttttgcttcttcctcatttttctcttgccaccaccgtgtaagaactgcctttcacctcccgccatgattctgaggcctcccctgccatgtggaactgtaaatccaattaaacctccttttcttcccagtttcaggtatgtctttatcagcagcatgaaaacggactaatacatatggcatgccactttttttagactatcatcacatcatactaccaaaaatttcttttaaaaatataatccatatctttcagaacaaatatagaatttaatacctgccacaacagtgtgctttcctaaggaatcatgttcccacactaatacctaaatccatctactctatcagaatgtgaatgcttctactgaaatgtgcatagttattggcagactgaaaaaaaaataaagtagtgcatagtgatatccaggggatagagacaaaaacaactctaagattagagatagtggaagcagtgtgctatggtaaaagtaagggggccctgaggttgtgtgaagcaacactaaattagaaaagccttagggacttccacataagtagaagcactaagtataattgaaagaagaagccaccatattcacctactccacaaatatttattgagtgtcttctatgtgctgaacccttcaacagtagctggagatataatagtgaaaaagaaagtcatggaatttatagtctggtgaggggaggcagatgctaagcaaatcatacaggtgcactcaaagaaatcatttcattacagttatcccaagtgttattgttagagtaggcagatagctaggcatgagcaggatggggagaccctgaggaaatggaggtctagaaaaatctcacacctcagagatcaccagaaacaggtaggctagttataagcagagaggaggggaaacacctatgcaggaaggaccgctccttaagagacccagtaatcatctctttgcagttaacctgccaggatgtagctaggtgtgtgctgacaaggaggggaagagagtttattagtttgttttcatgctgctgataaagacatacccgacactgggcaatttacaaaataaagaggtttaatggacttacggttctacacagctgggaaggtctcaggatcatggtggaaggcaagaaggagcaagtcacatcttacatggtggcagggaagagagaacttgtgaggggaatccctctttataaagccgtcagctctcataagacttattcactgtcatgagaacagcactggaaagacccacccccatgattcagttacctcccactgggtccctaccactacacttgggaaatgtgggagctacaattcaagatgagatttgggtggggacacaggaaaccatatcagagggcagagaaattcctaagaaatacgcaggtagaataagtatagatctgacctctatacaaccttcctgggatggtgctaatgagcaatgcagccactaggtagacttagtatccaacactgccccatgtgtgcacaccaaggggagtatattagtctgttttcacactgctgataaacacatatccaacactgggcaagttacaaaagaaagaggtttaaatggatttacggttccacatggctggggaggcctcactatcatggtggaaggcaaggaggagcaagtcacatcttacttgaatggcagcaggcaaaaagagcttgtgcaggaaaactccccttatagtaagcatcaaatctcgtgagacttactaccacgagaacagcacaggaaagacctgcccccatgattcaattacctcccaccgggtacctcacacaacacgtgggaattcaagatgagatttttgtggggacagagcagaaccatttcagggagggtcccacgagcctggggtgggaactaggcagggaaaggtaagggacttaaggcagaagcgggaaaactagacaaagaaaaaaggtgatgacttaagacagaggtgaaaacttcaagaaaaaatccaacatcataaaaacccaatgcagaactctcagggtgcgcctggcccattctctttcagcagcccgctctgcctcatctttcacaatgtcctgtccctttaaataaactctctgctccctctttcccttcatgtaaagttttctgctgtgtttgaactggccaaaacctttctcctaagactataaacgactgaggattcccgcacttccgggcaacactgtctccaattgaaagaaggctccatgtgctcaaaactttaagtgggtcacacattagagcttctgtctgggacggatgcttggcacctagtgagtgctcactacgtatttgttcacttaacgaagtatatgaaagagaagcacaggatagagtgagagcatgaaacagggaatcccaaccaaatctgggggctcagtgtgagttaagctgaaatctggaaaatatagagaagacaaggaataggaaagaaggaaagggaagaggagaaggtgggagaattttctttggagaaaacaactgatggcagcaagctctgaggagggaaacctgatccttcctaaggaattaaaaatagctctggccaggggagtgggaaggtagtgactgagagacaagtaggcaaagaccagatcctgcaaagtcttggaacctttatggagcagttgtaactttgccctaagagcagtagaaaaccactgaaggattttgatagaggaatggtatgctcagatttatgttttttactgttttgttttttgttttttcgagacagagtttggctctgtcgccaggctagagtgcagtggcgcgatctcggctcactgcaagctccacctcccgggttcacgccattctcctgcctcagcctcccgagtacctgggactacaggtgcctgccaccacgcccggctaatttttttgtatttttagtagagacggggtttcactgtgttagccaggatggtctcaatctcctgacctcgtgatccacccaccttggcctcccaaagtgctgggattacaggcatgagccaccgcaccaggcttatgtttttttttttttttaaagtgatcatggggccgtaagaaggaaaaaaaaataaatcgcaggattctatagttttctcaacactgaatttagaatttaaaaagtctgcccagaagtttcttgaatttgacttaactacacagagaaacttctgaggggaagaattttaagaaccaggatgaggttatcgatagaagacatgaattttgagtccttggaaatggtagtaacagaactctaagatgactctcttccttggtttactcacatgagtatgtcaacgttacatggtaaaagagatttggcaaacgtaattatcaatcagttcactttaagaagaggaggtaatcaaggtaggcctcatctagtcacatgagtttaaccactgctgggatggaaggtctgtgaagcaaggaactaaaaatggtgtcgataagctgagaatggtccccagtcagcagccatcaagaaaatggggatctcagtcccataattgcaaactgaattctgtcaataacctaagtaaacttgaaagcagattcttcccctgaggctccaggtaagagctccacccagcagacacctagacttcagccttgtgagacccttgatggagaaccttgttgagccctcatggactcctgacctacagaactgtgatacagtaaatgtatgttgttttaaacaactaagtatgtggtcatctgttatgcacgtacatctgtaaacaccatgttagagtgaccctctgagaataattagttgaaattttattactgtgtgtttattaggttgttttgctatatcttaagaaggaaagagtcttacttacccatttgggctgctatagcaaagtgctacagactgagtggcttataaataacagaaatttatttctcactgttctggatgctgcaagtctgatatcagagtgccagcattgttgggttctggagagggccctctaccaggttgcagactgccaactactcattgtatcttcacatggtggaaagaccatgagagagctctctggggtctcttttactagttcactaattctatccttgagaactctaccctcataacttaatcacctcccaaggaccctacctctgaataccaccacattggagattaaaatttcaacatttgaatttgatagggtggatggatacaaacattcaatccataacagaaagcaataatgatttattgaactttctattacggcacttttcattccgcaaatactctcctaagatgcatttagttcacttctgctcactttgtaagtattttacaagataacattaagtgaagaataggttaaggccagaaaatgtaaggcattgttccagaccttgaccccacatcttgtcctcacttatcaccatctcctagtcctgcaggaaagattggccacctccacaagctaatcaatattgtcacttttttgtgaaaaacaaaaggctgtgccaacaaattcctatctcccagctgcagatgataagaaagtttctttgccttgacatttgcttatctttgaccaataagcactgacatttgattatacactggactatccagcattctcctccctcccatttcccaccctaacacctgctgtctaattacttttaaattctacctctttaaaatgcaggagtaagaattaaagtaatctctcaaataattacagtcactaaatttgattaaaaatatcagaagaggctgagaaaaaaatgactgttcattagggtggaacaacatctataataaatccaaaatcttggtaatttaacattaataagaattttctattgcttgtctcacaatttggaggaggaggcatgagcaatgcttcacccagttttcagcaaccccgtccccatccatttaatgattctaccatctgctagggcctcagaatcctcctctgtatcttctgcaattactcaggctctgagggaaaaatatattataaataaggtagagaaagtagtccacttgtaatttctttggcccagaggtgatgcacatcacttccatttgcatttcactgtcaagaaacaattacatagtcacatctaaatacaaaggagctgggaattataacttggctgtgtgcccaggaggaagtgagcatggaaattgctgagtcctagctctgtatcccgtacaatagaataagatgaaatctatgagtgatccataaattttggttatcggtgttagtaattcacctttatcatggatttagaaatatgtagttccaattactactgttgcataacaaagcttagcaccataaagcaactgttttattaagcttttggattttgtgggccgcaaattcaaaaaaaggcacagaggagatagtttgtttctgctctgtgatatatggagtctcggggggatgattcagcagcaaggggctggaatcacgtagaggcatctttattcacagtgctggcagctaatgttggtcatcagttaaaaccccaagtaaaggtatttacccaatgcatgacatctcaggtccttggactttttcacaatggagtagcctcagagagtcaaatttctcacatggaagcccagagtttcaaaaacaaatgccccagaggacaggctatgtggccttttatgacctatcttcaaccacttctgttgtactctactggtctaagaattcataagcccaccctaattcaaagagaggagacatagaccgatcccctaatggaaagttggttaccgaggtcacattgcagaggggtatgtgcaatggaagatattgtggtgtctaattttggaaactataatctcccacatacattatcttagaatcactgaaagttagtgtttgaaaggattaatttctttatagaacaagagccagcaaacaatagtccactgccagttttggtaagcaaggtttaactgaaatacaccatgcctatttgttagcagatttgaggagttccaaaagataccatatgacctacaaaggcaaaagtatttattttctggccctttacagaaagagtttgcataatctatagatacaatatcaattaaacacgtggacactgaagttagactactaggttttcaaatctcagttctggaagtggccagttatgtggctttgaacaagctacttagcatctctaggctgccattttcccaccttcataattggggaaacagtaaagtctgtcattgaattgtgagcattacatgaaataattaatgaaaagggcataattagcattcataaatgctaacttgtgctgtagaattgccttaaattatcagctagatcaaatgtccatttgagtcatatgtttatctccagtgtcatctgctgcagatttcaacacatctagtgatacaggaagtccattctatctttaatcattttattagaaatttcttcctactaggttgaaatctgcccccttacagctatatgcaattaatcctggttctatctcctaaaggctctacaaaacatctcttccaaatattgggttctttgaaaaggctatctctgaattttatcttatcagaactacacatctttagttctttcaattgcctctcctaagacagagttcacatcacttttcaactttaaaattccccttagaaggaaatataaagcatttatccagaaattagcaaaagacttcaggcctgcagatagatctagatcgttggtccctaaattctccatagtatgttaatgatgtgtgttttgtgctactcagtctttttccacacttcctgctgtggaagagttgatttcttaagatcctgggacaggtgtttattgttgcctttttatgttcaatgttatagagctccagcctgtggagatctttccatatgttgataatgtagtttagactgtccactgcccttaccagctttatattacccacacatatttctgaaggcttgatccaaatcgttactaaatatcccatcaagttgaaattaatactatgagtaatcctgaactcaattacagcaactgaatgttgctttaataattgcacttattccttcctggacttccattgaccttaatcaccatttgttcaaccattctcgcttgggtgacattcctcttagtgaaagaagttggaagcaaatataaaggaaaacataagcatttctctttctctctttcaatattacacttcaaatcaagatatgtatctgtattactcaggggtctccagagaaaccaaaccaagggaagagagagattaattttaaggaattggtccacacgattgtggaagcttggtaagtccacaatcttcagagtaggtgggcaagctggagactcagggattctgctggcagaattccttcttgctcagtagaggtcagactttgttctattaacaccttcatccaattggatgaggcccatcgacatcatggaaggtaattcactttactcaaagtccactgatttcaaatgttaatggaatgcaaaaaacaccttcacagaaagatccagaatagtgtttgaccaaatatctgggcgccatggtccagccaagttgattcataaaattaaccatcagagtatctctttttataatcatttatcttacaataaaaatagctaagactatagcctatatgaagcctggatttatgttttgataattagttcttttataatagaagatctgttatataaaaccacaattaagtgtgcgtctgtctgagaaggttgtcatggtaaaatataaccatgacttttgttactaaatataaaagtacagcatctagggccaggtgcggtggctcacgcctgtaatcccaacactttaggaggccgaggtgggcggatcacctgaggtcaggagttcaagaccagcctggccaacatggtgaaacctcgcctctactaaaaatacaaaaaattagctcagcgtggtagcgggcacctataatctcagccacttgggaggctgaggcaggagaattgcctgaacacaggaggcagaagtttcagtgagctgagatcacaccattgcactccaacctaggcaacaagagtgaaactccatctcaaaaaaaaaaaagtacagcatcttaactgattattttctgtacctaagaaaaagatcagtggcggggggagaaatgagaatgcaactctgatttttaaggttagcactgttgcaagtttcagaatgcaacttaaaaggtatgatatgcttgtgttctttaaagcattcacctatttttaaaatttcactttttatatgttaaatttttaaattggcattttaatttcaaatgttatttcttcaaatgattttacaagattattgaaacaaatatctatataaataagatgtctaagcatgaaatgtgggttcaatacaatatttgtaacaaaattttactagaatttttcttaagccaacatgttgtctatggaaacaggattttattgaactagtattttagttttggttttgttttgttaagacagggtctcgctctgttccccaggctgaagtgcagtggtgcaaacatagctcacttcagcaagccattcgcccaactcagcctcccaagtagctgggactgaaggcgcacaccaccacacccagctaatttttgtattttttgtagaaatgtggtttcgtcatgttgcccaggctggtcgtgaccacctgggctcaagtgatcctccctccttggcctcccaaagtactgggattataagcatgaaccactgcactcagctgtattttggttttaaacttttatgaatctaggttttaaaaaaaagtggttttcttttctggttagccatttataataagtagaaattattgatttaaagacttttagagattttaagatggtttatgagtcctactgattattcctttcttgtgtgaaattcactgttgtcttttgttctatttttccctcttcaggtttggatgtgtggaggagaaatgtttgatgttccatgttctagagttggtcatatctacaggaagtacgttccatacaaagttccatctgggacaagcctggcaagagtgagtaactcagcatcagaacagactggggttgatatggctttctgtaaccagagtaaccaaccttgcccatggcacagtctgagaaaagctctccagtgtacagagagctcctgtgcttctcagagtcttatttccattgcttaaagaagtattaactataatgctatttcttgttacaaattggttcaaagcattttcacatacattatatttaatcttcaccattaccttctgaggtctgtgttcttgtctttattttgtagatgggaaaatgaagtctgaactaggtgcttgttcatgctcacatgaatgccaaatagcagagtaggtccgcggacctggggcagccagttctctccacccacatggagtgtagcaggatctgtaataagtcagatggaaaaaggggtaaatgggagatgggaaaaggtggatgtccaaactctgccttcttctctttcataactagggccagctctgcctcaaattttgccccatcctcaacatttcaaaattggctcagtcttaagatttttttccaatattgttttgaataaaacctttcttgtaaaccagatgcaaagatgctcttctcttctgccgtttgaaacatttttatgcttgtttaggagaacggactcacaataccatctccaaataatcctgacaatttctctgctttccatattactttcttcagggctgggtcagtttttgtcaccaccatatgtacctgctactgctgagaatcgaaatctagaaaaagagaattttatcacactgctaccctagaaatcaaatcctgaattattcattttggttcttttactaataaggctgcaagatataactatttggatcttttatataaggctcacataacaagcttttgtaaaaataaataaacgaattcaccaggaatcattagagtatcagtaacacaagggtagagctttggtctgtgttagttaccgctgtactctcagaacctaaaacggggcttagggaacactcagatatttgttgaaagaattaattaatcaggaaagctaagagaggaaaatgctggagatttaagttgttactaaaacttaaatactttttaatgagtataacaaaattttcttttacagtgaatctttgtggggcggggggagttgttcttcctttttccctttctgagagtattcatcaactgtccatttctctttagctacatccatattctctaacagcaattagagctcctagtaataacattaccttacacacaccttgaatggaaatacaggctgagtatccctcatccaaactgcttaggaccaagagtctttcagatttcagattttttccagattttgggatattcacatatacataatgagatatcttggggataagacccaagtctaaacacaaaattcatttatgtttcacatacaccttatatacatggcctgaaggtaattttatacaatatttttaataattttgtgcatgaaaccaaatttgcgttagtacttatgtgtggaattttctatttgtggcatcgtgttagcactcaaagagttttggattttggagcattttgtattttatattttcagattatggatgcccaacctgtagtaatattcctgctttcctaactaaattaaaattttaattagatgctaaaacatattcctctaagtagctgtcaaaatacactatttgaagggaaaaagcagtcacaaaatcataaagtaattaaagagctgaatttgggtaaggaaatatggtttgatttagtcataagacttaagacatatgaatcagaaaacaatagttcacaggaaagtaaatgattgaacaatttagagcacatgtcaccaatcagctgggtagatataataaatcatagcagtttaaaatatcctaaagataataatgttctctcatgtatccacttttattcactcatatgctcccctgcttgtgctctgaaaagaaccatccttccaagacaatgggtgtgtatgcttgcttcgtagtctaaagtagagtgtaaaagcttgcaggggaatgctgtgctgatccaaaaggagctattttcaaaaaaataaaactgttcatatattttcaagaaagaaattaagtactttttcaaggattgtcaaatacagagaaactggggttggcacataaaacttccaggaaaaagtgaatatttattcaactgaaaaaagtccataattctgaattttaatcttttccactcaaattttacttcagagctcatttttatttttttttctaaactgctagagcaatcagaaagtcataaatattaaagcttgactgtcactctgagaaacattttatggtttttttaagttaaaaaaagtacattaaaatgaaaaacaattctgatattttgtgggagcacctcaactacctcgctacatgctacattattaccatatcatcaaaaatgaagagagactttatatatacttcaaatgcagggccacgtctactcaactgatattttaatcttgcagcctcatcaggaaatggagatgaaggtggagacttgactccaaaggcttattttcttactctacaaagctcaattaattcttcaaaaatgtgcacttttcacattgatgattccaaaagacttccaaaatatttaaacacacacatagacacacaaatgtctgaacagccttaaacagcctactggttggtgtatactatagaaatacatttgtaaaattagttcttcagtaccttctatttacctggcattagaatctggttgcaaaagacaggatatccatatatgaaaccattagaggacagtacaaggcaagtaactgcttaaatgtatcgtaaggacatgtataggtagagggaagaggaggaagtagcgtcatagctgtgaccttcttcagtcctctcaaattaaaggacttgaaagaggaccttcaagaatatgtccactgaattaacgagtttcatataacagtggtttccaaactcaggatgaaccaattcctgactaatatttcacccagcctcagtgaactaagaaaaatgataatcccaaagataaacctgttcaacttaataacatctttttatgcagaaactataaggtttttttcattgaaaaaaaaatagaatgcaagacagtaaatttttgttagtgcccttatttggcaaaaacaaaaatcagcatcactttgtcatttcccacaaaatgtaaaaacctaggacaccataacttacacttcagcttcatctgggaataagcgtattcacttgacattaataagcctagacagttttactgagtcagctcggggcctattgtcagcacactgggacacggttgtggtgtcttgccacaaggaacaagcagcaagtcactgagggaagggatgctcatgtctagagttgcagggagactagaaagacagcagggctgtggtgacaatcatcccttctgcttcacagaagcgtgagcagctcctcagcaaaggtccactgagtgtcgctttgcacagcccaaggaggctgagtggcaaataggtggaagaatctcaaagaagagattcttctcttcattccaacaggtttttatgtgagccaagcactgtgctgaaggagcagctattactggcacctatggggacagtccacaaactcctctgtgaatgtcagtgtgttcaggaacaatcaaagccactggatctgtgacaggtggctgtaacagcagggacatgtcagaagtggagagcagtcaccccacggctaaacataccagctgattatcacacagcagtggtcttcatgggaacaacttggcccatgagagtttccttggagggtcaccacgccagagcgctgccctgcagactgtgagtggggcagtcctggaagtgcacacagccaccctcgccaatacaagacaaggttagaaccaacccttacccctagtctgtaagaaacatcagagaatgcaaatctgtatactgctgtatttcacctctgacatagtatcagtaattttttcattttaaaatttcaccctaatatcaaaattaaaataactagagaagcaagagcaaacaaattcaaaagctagcagagacaagaaataactaaaatcagagcagaactgaaggagatagagataccaaaaaaccttcaaaaaaatcaatgaatccaggagctggttttttgaaaagatcaacaaaataggtagactgctagctgactaataaagaagaaaagagagaagaactaaatagatgcaataaaaaaatgataaaggggatattaccactgatcccacagaaatacaaactaccatcagctaatactataaacacctctacccaaataaactagaaaatctggaagaaatggataaattcctggacacatataccctcccaagtctaaaccaggaagaagtcaaatccctgaatagaccaataacaaggtctgaaattgaggcagtaattaatagcctaccaaccaaaaaagtccaggaccagacggattcacagccaaattctaccagaggtacaaagaggagctaataccattccttctgaaactattccaaaaaatagatagagagggaatcctccgtaactcattttatgaggccagcatcatcctgataccaaaacctggcagagacaccacaaaaaaagaaactttctggccaatatccctaatgaacatcgatgtgaaaatcctcaataaaatactggcaaaccaaatccagcagcacatcataaagcttatccaccatgatcaagttggcttcatacctgggatgcaaggctgctcaacatacgcaaatcaataaacataatccatcacataagcagaaccaacgacaaaaaccacacgattatctcaatatatgcagaaaaggccttcgacaaaattcaacaccccttcattctgaaaactctcaataaactaggtatcgatggaacgtatctcaaaataatgagagctatttatgacaaacctacagcaatatcatactaaatgggcaaacgctggaagcattccctttgaaaaccagcacaagacaaggataccctctctcaccactccaacatagtattggaagctctggccagggcaatcaggcaagagaaagaaatagagtattcaaataggaaaagaggaagtcaaattgtctctgtttgcagatgacatgattgtgtatttagaaaaccccaccgtctcagcccaaaatctccttaagctgataggaaactttagcaaagtctcaggatacaaaatctatgtgcaaaaatcacaagcattcctatacaccaataatagagagccaaattgtgagtgaacgcccattcacaattgttactaagagaataaaatacccaggaatacaacttacagggatgtgaaggacctcttcaaggagaactaactataagaaccatccaagaacatgggagactttaaatttttttctagtttcaggataggagctaaaactgaagtcaaatctcataaaagccaaattgtacaggctgcttcccaggtcctgaaaatgttaacttagagtaaaagggatagaggttaaatggtaaaggagtagagctgggtctatgaaccgaggtctgtctggtcgaggttcatgctcctcaccataatgtttcttctagagtgcttgagataaactggagcagcctgggcatctctggtagggcaccagtttagcagagtaccaagtagaaatgggcaggcagagagttacggagggtgtgcgtaggacctgtggagttagccttggaagaccctggatgcagatcacagtgttgacctttactccttgactgtagggccttgaacaggaagtatcaggataaaaatagcagaggtaaaatagaaaggtcaaccaacaaataattattaaaatggagaaagtctaaagaaagtctaaagaaattaacatttcgaatgcaaggagcatttgtaaaaaaaaaaatcataaaatatttttattgatttgctacactgtgcacggaggtggggctcacatgtgactatgagctttccatctcagcatcccagagaaaatagtatcagtacaaaaacagggaagggaggaagaggaaaggggaagagactgagattggttttagataaggttaagtgacagcctgggatagcctggggcagccagatctggggagatacccacagattttccatccagaattctgagagcacacaaaaacttttgacagattttctttggcaaataaatgtttacttctgaaaaaagaaatgcttactgtgccagtcagtgtgctaggccctggaagtttaagtgatgaacaagttaaacacaaatctcaattcctcttaataaatggccttgacagtaacgtacagtccacaccatgcagcagtaatccacgtattccaatgccagaatatcatgaggatgagaaaagggttaaatgaaaataataaagctcattatggaatgaaatctgtatcttatatagttcactatttggaaattgttttttaatagactgtcatattataattgagattatgatgtaacaaaagagaaatatatgccctatatagcatatagcattattttatatatagccatatatatttgatattaacaaattatgtttaatgacccaataggctaatctacatacaagttacaaatgtttttgactttatgcatttacctagggtttcttagcaaagtgtaacaacctttgacaatttcctatggttattatacttcacaggcacaaagttctaagtctgaggtctgagggagaattgtggttgtgcctctgtaagctgtgaaacgacttctttatatacttcccaagatgcctttcttccttcctgtgccatctccctggtgacatccagctctgctgattccatagatcctctcagactcttgaaaatgatggaggttgggagaggcatagagaaagggaggaggaggaggtggaggaggagggcttcaatgtaaaagccagaccaccccaagtcgattaataaatgcttcttcattgttgaccatggtgtcagctttcccatctgaaatagctgaaataaaagagcacaatgtcaggcaaacgcaactcgcccttgtttatgtcagaaaaagatatcagctgaggaaaagcattaacaaaaccaaaatgactagtttgatatctgaaaataaaatcaccaacaaggttataaagtatggtggtgatgaatgggaaatctatactccctcaaattgacctttctctcccgatgactgtaaatcactgtactctcttaaagctgcccagcatacaagagcttgtggcacgataaccttggacaacaacagcagcaccacttctctctcctgctcttaaaactgcagggttcagatgctctatttgaaaccatcactgagttcaggggcatggtggcctatcatgggttttctcccaaaaagcaggaaatgatagatcttccctcaaaactcagccctcataaatggctaggacttttgtgcagaggcaattctgaaagcaataactttctctaattcttccttacaatataacctaaagggcaataaggctgtctaatacttttgctcaaaactaaagatgattcacatactgcaattatatgtttgcttctctcctgacttggtcacagtttaaaatataatacctcaggacaggcatagtggctcatgcctgtaatcccagtgcctcaggaggctgatgcaggaggatcacttgagaacaggctgggcaacatagcaaggccccagctttaaaaaagtttttttttttaaagttacctgggtgtggtggcatgtgcctatagtcccagctacttgagaggctgagaagagaggattacttgagcccgggaagtcaaggctgcagtgagccatgatcaagccactgccctccagcctgggtgacaatgtgagaccctgtatcaaaaataaaacaaaacaacataaaatataacaccctctacttagaaggagctttttattttaaaaatcaaggcatcttccataaataatgtttcattattctctatgattgatatcctctctaaaagtcaatcataaattaatgtgacaataatgattcaataaatcattaaatactatgagttcattgcatgctataaagataaatgtcatctctaacctcagagaagtctcaggctagataaatcctattaataaatatttatcaagtgcctactatgtgccaggcagaaatgcacacagcatgctacatatcctaagcaaatagcattgggccttgccagttagatcaagccgcccctttgtgatgtaacgtcacctcaccttggggcatcccctgcactggggatgaatttctggtagacaacactggtagagcactcactcacccttcaatcctcctttttaaacactgggcatttcctgcttgtgctaaccatgagaaaaataaggccaagggaaaccattctgtcagccaaggacccacagagaagaaatgagaaaattgtgtgagaaacacaaatttatttgccactcaaccctcatctactgccttaattcctaacccgatggcatcagaatttttaaactatatattttgttagtttaacaaataacgatagaatcccacattacttttaaaaattttaaacaatatggaggtaaagcatagatttttttcatatcaaacatagacactaaaaaagaaagtaaaatagcaaattgctggcaggtacagcctcttgccatttgcaagtatcatgaaaaaaatatgtgaggtaaagacaacgttattttcaaacttggtaatttcccacaaaacctcgcaaaacttttttttttttttttttgagatggagtctcactttacctagaaggtaaagttggccactgatacatgaaataatatttaaaaaacactatggactggttgcagtaaacacatatgaactcaaacctaattccacttcccaactaggaatcatttatttatagaatacagaaagtaattttctttttttttttgaaatggagtcccaccctgtcacccaggctggagtgaagtggcgtgatcttggctcactgcaacctctgcctctggggttcaagtgattctcctgcctcagcctcccaagtagctgggactacaggtgcacgccaccatgcccagctaatttttgtaattttagtagagacgggctttcaccatgttggccaggatggtctcgatctcttgacctcatgatctacctgcctcagcctcccaaagtgctgggattacaggcgcaagccaccacacccggccaacattttattattattattattattatttagagacagggtctcactctattgcccaggctgaagtgctgtggtgcaatctgtgctcactgcaacctggaactcccaagctcaagccatcctccatctcagcctcctaggtagctgggactacaggcacacgccatcatgcctggctaatttttgtatttttggtagagacggggtctcactatgttgctaaggctggtctcaaactccaggaggcctcaagcaatcctccagcctcaacctcccaaagttgtgggattataggcataagccaccatgtacagcctcaaaactattttttaaatttagtttcttccaacttatttactctaaatattttttcctcaaaagctctcacagatgttatattcttcccaacattaaggaattttgcttaatttaaatttttcaaatattccattgtgctttcccaattttcagctcagttatgacttgtgattcaattatctgatgctttccattgtgcaaaagagagcttgtaattgagtcaggtagtccccaagctatggggacaatattaagcatttcttgagctatcacatgaggaccaagattttatgttagcttttgtttatgcctattgggatattttataatgtaaatagaatatctgaatagtgatcccagataattgcataataacaagctatcatgattaatcattactttcactttgtcattcttaatgaaattaaaatgggatttatcttccacttcctatgggatcttttccagtttgttttggttattcactctcctacctggagaccttggcatttcaggcggttattgagcatttacataactttcttttttcaaagcacttgagaaacaaactacatggtgagaccagtttgtggactagagagaattttaattgcatttttatcattatccccattagaactgaccatttccctgtattcacaattccactagagcctcataaaggagaatgctggctccgacaaagaaggtccctgctgctacaaaattaagctgctgaaatttaagcaaactcaaatattttagcatgccataatctcaataaccgaaaatgcaactcttgcaaagacgagtagggctggccatttaataactgtcttccaggaccccaatcccacgtctaagccatgggagcacctggatggtagggactcatttcatggaattaacttcttcccatgagatgtgtgaatgcacagtaccactgtgcttggggcctctgcaatttcattcccattccaatcctccatgtttctgatggtttattagttcatgccaagaattccatttccaactgcaattccagcccaagtgtatctccattttagtgccagttgagatacagaaagtagttctagttgctattttgtaaactgagaaatggtcaaaaacaaaatggcagctttgtggtgtatggatgcttctgggtgttctaattctgaaaacagtttctagaaataaaattttgcagattacttacaacttggacagatataatttgtaatctaagacccctgtcatgggcatttagaaacatggggattttattttctgcctgtttgaaagtctgggaaataaaacaaggtctattaataataattggaataaatgctatagcaccttttagttcaaccacagtttgtttgaatgcttgctgtggatgttcttgtgagggaaccaaactcttgataatctctttgggtgatgattagaaaatgctggttgtgattttttaaaaatatcaaatggattaatgataatcatctagaaataaggtcgtacttcattttatacctaagttgtgatgacatgaggcaccattggcttgattaccaggaagaacaccattcagattgtcccccaaccatctgtagacattcccaaaagcctccatcgcatatgcttgtgcacccacttgtcagaagcatacccatgctgcaccgccccggatttgcttcttttgtttctgctttcgcttgcctctgtttcctgcccatgaagctgtaggtgaaggcacacctccaccaccactcacagaagcatcaaccactagctcacaatgctgagtctggaggaaccaagacttcagtcattaaagtgccagaacttctctgggtcctgagtagactcagtcaagatgactgtctcctacctgtgggccatacatactcacttggacacaaatgacctgtgtttctgtggtctctcttcaacggttccagcttctgattatctccacttttccagggtttcaaaaaatcaatcacgtaaaattattccagcatactctgaccctcacacccagccaaaacaaacaagtacaatcttaagggatacatgaaaattggcaaccatactttcactttagtcctattatccttttttttttttttttacttccaagggtagggcataacaggcattacagctttctccttgttctcttggatgacttgctttgggagaagccagcaccaagtcatgaggatactcaagcagccctgtagaatggcccatgtcgcagaaagcaagccaagtcctcctactcagcactcatagcaagcaccagtttgacagacactgagtgagccaccttggaaaaagatcttccagccccgtcaaaggcttaagattactgctacctcagccaaaatctgactggaactcatgagaaatctgatccggattgtacagcctattttattcccaagttcctgacccacagaaactgtgaaggataaaaaatgttttttattgttttaagccgctcaggtgtgagatagggtgttatttatcaataggtaatgaatacagttgtttctgcttaatagtctttcatcagcaacattcagactaattttatcttcagggacatgattacctcaggtggcacatttgaagctcaaaaattaggcaagcttgtacaccaaaggacactgttcacagaatgaaaatccagctcacagaatgagagaaaaaaatgcaaatcatacatctgataagtgcttaatatccagaatatagaaagaactcctacaacttagcaacaacaaacacacaacctgattgatatatgcaagaatctatttctggaagagaagagagagcccagaaatggattcttcaaatggtcagttgatttacataaaggtataaaggtatacattggagaaaacattattttttcaacaattgatgctagaacaattagatgttcatatccagagaagtaaataaacatcaatctgtatcttgcaccacatacaaaaattaatacaaaatcaatcatagactttaaatgtaaaggatacaattataacatttctagaatacaaaaacaaagaagaaaaattttttgagattaagcaaaaatttcttaggtatgacaccatagaaaaaaattgacaaattgaacttcattgaaattaaaaccacctatttttcaaaggcactgttaagagaataaaaagacaaggactgaaaagagatatttgcaaatcacatttctggccaaaggtttgtatccataatacataaagaattctcaaattttaataataagtaaaacggcccaatttttaaaatgggtaaatgatttgaaagacattttaccaaagaagatactcaggtggcaaataaggacatgaaaaaatgattaacatcattagtcattaggaaaatataaattaaaaccacaatgagatgctactgcatgcttttataatggccaaaattaaaaagactgaccacaccacatgttggagtaactggaaatctcatacaatgctaatgggaatgtaaaatggtacaaccactttggaaaacaattcagatttttttaaaagttagacacatacctagagtacaacctagccattccacttcaagatttttatccaggagaaatgaaggcaaatgtccataaaagacttgtacaagactgttcatacagctttatttgtaatagccccaaactggaaacaacccaagtgttcatcaacaggtaaatggagaaacaaattgtagttttttcatgtgatagaatacaataagaatgggctgggcacggtggctcatgcctataatcccagcactttgggaggctgagacaggaggatcacctgaggtcaggagttcaagaccagcctgaccaacatggtgaaaccccgtctctactaaaaaaaatacgaaagtagccaggcatggtggcatgcgcctgtaatcccagctacttgggaggctgaggcaggagaatcacttgatcccaggaggtggaggttgcagtgagccaagatcacaccattgcactccagcctgggcaaaaagagcaaaattccatctcaaaaaaaaaaaaaagaaaaaaaaagaatactataagaatgaatacatgcagctgcagctacatggataaagatcaaaatacttatactaagtgaaagaagccagacaaaaagagcacatactgtatgattctatttatataaaattctaaaaaatacaaattaaactatagtgaaaaaaagtacatcagtggttgtctggggacatagaaatgccacagaaaggagatcgggaaagggatttcaaagaggcataaagaaacctttgcaggtgatggacatgttccttatcttgatagtgttgatgattccactaatatagtatatacatatgtcaacatataccaaactattcactttaaatatgagcagtttcttgtatatcaactattcctcgataaagctgatttttaaattaggcttaccagcattttttaagacacattgttagctcatttggggtttttgtttgtttgtttgtcttatatctaaaggctacattaaatgccatcataaacaccaccatagatatccaaaatatttgggcaaaaatacaatagagatataaaatcaaagagaaagctaacccttgttcatgacagcccaaagaagataaccacctacaaacagctcacacagccttggggaagaaggaaaaggaaattgcctgtcagagaagctctgtttgtaggactagattagcctcctctccttatgctgaaagtttcccactgacttcaaagaagtgctcagatcagagaaaagtagagctaggctgaataattgtagtgaggttggggctgccttaaagacaatctcttttgagctgtacccatgatgacattatcatattatcaatgataaaagggctgtggggtgggactactgagccacaaaagcactcttaagcatcaaagaggagacaagaaatacattcaaataaaagcagaaatttaaaatcatgggatatggatacacctccttgctgtaggagtgactgtgacaaattagaaactgtttctgtttgggactggctttactagttatcactagttttggggaaaaagcgtgtgtgtgtgtgtgtgtgtgtgtgtgaagaaagaggattcactataacacaatccaccataatacaatagcttaatattgacacaagcacaatttgagaagcgggatcttgccaggacacatgtaataatcacaccttgcacaaagaaatagaaacactctactgaggtaagatggcccaaataatacaaatacagttgactcccaaataatacactgagaaactgaacagggattgaatagtctagcagtaagatctaaaatgttgctggtaaaaataataataattagtggatagatttatgcagtttcacaagccagcaggaaaaattgaactatctattttcctcatgctgtacaccaacagtgatcagtcaagctggaaatctgttcttataaactgagctagaaatgtcatttaatgttcctggtaaaatatcaattcaaagacctgacgtgtattagaattaaggaaagatttagtgttggatagcacaaagaaaacaagactagaattctaaagacctctaatgaaaggctgaatgtgttgataaatatttgagcaacacagaaaagagagattaatgccagtttgggttgaatagaggaacatttgtgacacacaaagaaccacagacaggtgacataaaaatagagaatactgttaacatcttgtacacagaagatgctccaaacaacagtttctatgtggagaattatcctgttcagcaatccattttggttatggaaaagcagccaacatggtttgcccaggataagcaaggacaaacaatgagaaagatgaattgccgggcacgaaaagggagaagaaattttaacattctggtacagccccacaaaagagacgtaagagagagatttttgagttgagcagaaccatggcaggaagctaaaagacagaaggaggaaattttagccagggagaaattccctttagcagccaagggaaaagaatccaaggggtcaaatacttcatcttacattatcatctatgctgttttgttatctaagtctctgctactgcctgaaaatcttcagtaaaagttatgcccagttgatgcaccgagagacatttgagagatgagggaaaatacctgtgcaccccaccccattcaagtctctgcaggacagaaggtagacagcaagctgggggcaagatgccaggaggagagagggatcacaaacagaaaactgaagtgaaggatgaatgtgtgaacacccctgggaatccacagaaatcttcaggaggacagggacatgcaatttgaggttaaagtatttttatttaaacctcaaaaaaacaagaactccagctaacacctggctctgtatataaggcaacctctagagatgcaacatctgatagttcaagagtaaatgattacatgtatagatctcccggcattcatgcttgactctttctttccccttgataaattttttttttttttggacatcttagcaggtccaccaatgtccattcaatctcagagaaagataggactactcagattgatttattttctcttttaccatctctggcacaagctgttattggaatgtttccatttcatgattctgcacatgtttacacagccgtaagtgttcaagtgagaaacattgctttgctcctattccactatctctgtgtatgtgaatgtgtggtatgcgtgctcctatataaataccctgacgaactccaatgagtatatgattttcctatttcctggagtgggtcaatttattgtacagtctataaaagaccaatgaaactctctttttgcaactgtttgcaatatttctcagctgtggtaccaatgttttccccaaaactaagtactgatttatgattccagtgacaaactaacacaatgttttattatttccagaatactgacctcagaaagattttatttggccagccacctggttagttgaggagtgagggctattccttgaatataataattgacactttagaaagtttctcctgatagtaaattctggagaacaggcatctataatccaaaatgtctaatgagccaatggggacattagagaatggtcaggatgttttacttatgtttaaatgtttatgtaacacttatagctagagggaaacttgttattgccatctttgcaattattatgttgtttctgttttaccatctcttgtaaaactacagaaaaggaatcgatgatttcacatgatccttggaatatgtccatgatccaactgcttgctttggagtggtttttttgaggggggcttttttggtttgatttttctttttgctgttgttgttgctgttttgtttttctttgagacagagttttgctttttttgcccgggctggagtgcagtggtgtgatctcggctcactgcaacctccacctctcgggttcaagtgattctcctgcctcagcctcccaagtagctgggattacaggcacctgccaccagcctcgctaattttttttttttttttgtatttttacataaaaatagagatggggtttcaccatgttggccaggcctggtctcaaacacctgatcttaggtgatccacctgcctcagcctcccaaagtgctgggattacagcatgagccacggcacctggccattttggagtgtttgagaaatcaacacacctagtgtgtttcaacttgaaaaggacacgatgatgcagagctacctggttagttccctagttaactatactaaagcctacttgacccttggtgacagctttccaacatgctgacttctgcctcttttacttattgatattgcctattctggttagcatttatcatgatcctctgagccttttcccattgactgcaccggaattagttagttcctctatgagttttgcaataattgccatatctatttcaaaaatccaaagcaacaatttaccatttagcaacagcacttgttttcaattgttcccatttcagtgcttttatcaatagatacatacgcacactatgaatttgttcacattcatttcatcatatggtctttcattaattcaatgattagcatgtccagatgagcacacacgtttctggaaccacacaagatgctaggtcttttaaggcaaaaatagatctatccctaacttcatggcacttatggtctgaaagtgcttacttatccaagtcaaaacagagtcctgagggacagatcttttctgcaagctactagaattttaaaggtatattttttcttaagaaaatcactttctcattattactaggtcatttgcttctgctttttgctattccccaactgtattcattttcacttatcacagaggtgtaaattgatgaaaattaagtatttccactttatttaatattgcagtttaggggaaaagatggtaactacagcctaaaatcaattttgaatataaagttttaatattatcaactagtttttttttattctaatcctcattaaaaaatttggcctagcggggtgcgctggctcacagctgtaatcccagcactttgggaggccaacgcgggtggatcatgaggtcaggaaatcaagaccctcctggctaacacagtgaaaccccatctctactaaaaatacaaaaaattagccaggcatggtagcacgtgcctgtagtcccagctacgtgggaggctgaggcaggagaatcgcttgaagctgggaggcagaggttgcagtcagccaagattgcaccactgcactccagcctgggcaacacagtgagactctgtctcaaaaaaaaaaaagaaaaaaagaaagaaaagaaaaagaaaaaagaaagaaagaaaagaaaagaaaatgtggcctgaggacaagtaaaatagaatgcatttcatacagaatgtttgtcaaaatgaaatgaaaatagtaagatgatattacagactcacactgagtttttatgtatgtagtacagtgccatcccacagcaggactctcaagacatcatctgtttcctttctggtccccaaatgaatcaggcaattccgaattggtggcaagggctagaatattacaaaaccatgttgactctgatcatctgtctgttaaggtaaactggagtccaaggagtagaaagcgttatgggccaggcaatgctgacgggatggtagggtgcacagcaatggcaagtaataatctctcagggaacaattctcacagtctcaaggtcattagcctatcttcctatctatgcacccaggcaccttagaaagaaaggaacacagagggaactgagaaatcagagctttctttgtggctctgtctcttttctgcatcttactgggttaacagagcccttcttggtgcccaccgtccaccaaaagcacccaaggagtgcacagagaatgaagagcagggacaaggtcagacaggagagacctgctgggagacactgaacacacggagtggatggagcggagtaagaaaatgtacagtctcattaggaatgaggtaccaatgatggtgtctccaaatccagcagacctctgggcatagttccaggcctgaattaggattttgtagtcattttcaagataaagcacttttcctaaatatcactagcttttactttagtcacctatgtctggttctcattaaagttcctgaccattgcagtcattttatcttctaagtgcaagtgagaaacaggagtgggtcaatgctcgcaccaactgggcacttgaaagaagaatttgaacaggacacaagaagtagagactaagggacaccagcctatgaaaatgtactgcagcacatttaagctggaggcatcaaaactggtatcttctacacaaatgcagctgttctctctactgtttagcaccatagagcctgaaggcacatcagagagcatctcatctcagctaatgcctttcctaaaggccacagaagagttccattaatgtgtggccagcccaacacccaggctctccaatttccaatcctgcaccctttttgcagctaataatagctctactatttgtggtacctattatgtgccagagacttattctaagtgctttacgggtgttgccttacttaatcctacagccacccccgtgatgcaggtatgtgctactgttgccattttcaggtgaggaatctgatatccagcatggatgagtaacttgctcaattccaaagctgacaaaagggctgagcttcctacactgaatccatacactctcctacacctaagatccatgcttattccccaccaccaaccttctgcttccttcaccccagggacacatctgtggaaaagactggctacttggtgcttcctttagccccacttcatcatgcagtaaagtactaatttctgattgatatctgtgttgcacacatagaacatcagaacacacagttttaaatgtacaaatgctcggtgatctctctaaagttgggggaaaagaataatagcttgtttgtcctcattctttccaagattcttgtttctggaaatgctttaagcaatttaatgcctgagaggaatgtcattctctccagtttcaacacctttagtttaatgtaaaaaataaaaaatgtataatcatgaaataacagagggaatgagaaagctgatgtaatagtgagctgaatctttactggctctgataaattaactaccaaattggcaattgaaccccatgccagaagtagaaatgtgtgtgaagccacaggctaattatatcataccccttgctgttactaaaactctcattgttcataaaccaccaaccagggctgcctgaggttgccgctatcttttccttttcttttttcaatttctggtgcaacaaaaaacaccttttgaatgaataaaccaataaatgacatttttgttttcctgctgcacagaacctgaagcgggtagctgagacctggatggatgaatttgccgagtacatttaccagcggcggccggagtacaggcatctctccacgggggacatctctgcccagaaggagctgcgcaagcagctcaagtgcaaggacttcaaatggttcatggctgctgtggcctgggacgtgcctaaatactaccctccagtggagcccccgcctgctgcctggggggaggtgaggaaaggttgcctgaaacctgcgcctacctatgagactgtgtgcctcccccatagcctcaggtggtgggagggactgctaaaaccttcacttttaccctgcagccaagtagcattcatttaaatcatctcaaatacatgaatgttcaacctctttttagcaattactagatttagcttcagagttgatagcctaacccagaattagtgaccactgttgattccccagatgatttttgtttgtttgtttttgtttttgtttttgttttttttgagatggagtctcgctctgtcttccaggctggaatgcaatggcgtgatcttggctcactgcaacctccacttcccaggttcaaacgattctcctaccccagcctcctgagtagctggaattataggtgcacaccacgacactcagctaatttttgtatttttagtagagacggggttttgccattttggccaggctagtctcaaactcctgacctcaggtgatcctcctgccttggcctcccaaagttttgggattacaggcatgagccactatgcctggccataaatttttaaaatacacctagaaaatatttttatttgagattagggaaatcaccatcggcgtttgtagagaattgatatatctgtcatacaagtgcgtaaatatgggcacctgatatacgtgataaaaaccctctgtcctggtgcacagccttgctgctattggtatatgcaagtacaaggcaatgaggggcctggctattttcccctccaggctatgctatgcagagtcatgaagaaatgcatttccataatatacagaactgtgacacaggcagccacattgattctttaaataagcaccaacctttccacctctgaacacttctattcagtggaaatagaatggaaaaagctaaatagccccaggtcccaaatttaaaatatctatcttttggcatagaaaagactattgcactgggttcggttccattcaatactgttgctatagcctttctccgtagaatagagtgtgctaaagcaggactaaaattggatagggtggatttatcctagcaattcaacctgctcttaacagaggatatcgggggaaatgcatgaaggctagatgttcacaccgtcccacttctccagcctttcagaaatcaagagttgattgtctcgcattgtggaagagtatcatcagtgtccttggttttctagtctctgaaagaagatgccattgcctagatagtgtctgtggctgcagagctctgagaaaaggctaccccagggcatggtaggagaggccagaggactcaggcagtgttcctgggtgagctgttccagatccctgtagaagacgtgttcagcaagtcacaggtgcactgcttgttgtgttcagagggtcactcttcatacctgggacacccaggatgaaggaaagagtcaatcctgccactacaccctccatctcctcatggtttttgcatgtgtatgtcatcctgacattgtctgcttaattcaagttattaatttggtctcatcctttgcatcttaaacattttattaaaacatccctagaatattagtaatattagcctgcttgtattaatttaactgtctaccacagactcaattcacagcagtggaaatttgaaaagaattttcttaatcctaacgtgttggaaggcatgggaagtgagttccttctacagttttttttgtttgtttgttttttatgtataaggttctgtttgtcatctttctatgatgattcaaatgctgtcctgcctagtgactaagaaatacacttgaagagcccacagtatcattgtgtgattcactacagggctaaaatctcatcaatcttttatctgccttatgtggatatgtgaatttttcttcctaccagttactatgttctgcaaactgcaactggtcacatttttcccacagtacctgattaaaccataacctgaatttataagcaccttttctaaatagactcaaatcttccactcagtttctaggaaaggtacaaccttccaggaataatcaaaatcagaaccatcttaagcccaagtaggcgatgccagtgtgtttatatctattaccctagattgcctcatacttttacaacacttgccttatccctggagacatttgcattcattatttccggcttaaacaatgagacgttgagaagatcagattttttatttttcccgagacaaggatttgctctgtcacacaggctggagtgcagtggcatgatcatggctcactgcagcctcaaactcttggactcaagtgatcctcccacctcagccttctgagtagcccagactacacattcacaccaccagtcccagctaattttttaaattttttgtagagactaggtctcaatatgttgcccatgctgatcttgaactcctggcctcaattattcatctcacctcagcctccccaagtgctggaatcgcaagcatgagccaccacacccggcaacagatttttttttcttttttaacacaaatggcaaatttctttccccaaagcctcagaacagtaaacaaataaaggtcatatttaggtttaggaaagaagaaaatggggacatagtttatgggccagttgcattcagttgaatttgttcggtgaagatgtgatgcatagcaagaatgaagacatagaggatgggaggaaggcaagaagaaaggaaatcaataaaagacaagggtttgcactgttaaatactagtttttaaaagtatctaattctcagggagaatagatctctgagagtataagtgaaacatgtacatttaatgcaggaggcaagtgaaggatttgaaatgcagcttaatcaaaatgaaataatgaaaaaagattattttctaactctaggtgggtaataatatttttaagagtggctaggctgggcacggtggttcacgcctgtaatcccagcactttgggaggcagaggtgggtggatcacctgaggtcaggagttcgagaccagcctagccaacatggtgaaaccctatctctactaaaaatacaaaaattagctgggcatggtggcatgtgcctgtaatcccagctactcgggaggctgaggtaggagaatcgcttgaacccgggaggtgccactgcactccagcctgggtgacagagtgagactgtctcaaaataaaaagaaaaaaaaaaggataaaaaattattaaaagtgcagaatatatgtgttgagcaacttaatctctgacaaaaaaaaagactttcaaaatgttgacacatgcgatttcttttgcctttcagaggatttcttaaaataagctttttattttggaataattttaaatttacattcttctaatgttaacattttatatttactttcactcgcgtccctgtgaagacaccaccaaacaggctttgtgtgagcaacaaggctgtttctttcacctgagtgcaagtgggctgagtccgaaaagaagggagataggggtggggccgttttataggatttgggtaggtaaaggaaaattacagtcaaagggggggttgttctctggctggcacgggtgggggtcacaaggtgctcagtgggggatcttctgagccaggatgagccaggaaaatgaatttcacaaggtaatgtcatcagttaaggcaggaacaggccattttcacttcttttgtggtggaatgtcatcaagttaaggcaggaaccagccatctggatgtgtacgtgcaggtcacagggaatatgatggcttagctttggctcagaggcctgacattcccatcttcttatattaataagaaaaataaaacaaaatagtgttgaagtggtggggcggcaaaatttttggggggtggtatggagagataatgcgcgatgtttctcagggctgcttcgagcaggattaggagtggcgtgggaacctagagggtgagagattaagctgaaggaagattttgtggtaaggggtgatattgtggggttgttagaagaaacatttgtcatatagaattattggtgatggcctggatatggttttgtatgaactgaaaaactaaatggaataagacaaggagaaaaacaggtattaaaggactaagaattgggaagacctaggacatctaattagagagtgcctaaggagattcagcatagccctgccagcaaagattatttatttactttaagagggagtcaagagtggcggtttggggatagcaccaggagatatcagctgtgatggcttggagaagcagtgaaaaccggcagtttttctgagaacagtgaataggagtatgactagacagaagacagtagggatgacaagttttttggggcacagtccaagttggtctggtgtctggaatgaggctggggcctaataaaaagaagcgtctatacaggagctcaaatgggctgtaccttgtagcattctgaggacaggcctgaattatgagaagggaaagaggtaaaagtattgtccagtcctttttaagttggaggctgagcttggtgaggtgtgtctttaaaagaccatttgtccattctacctttcctgaagattgaggacagtaagggatatgaagtttccactgaataccaagagcctgagaaactgcttgggtgatttgactagtaaaggccgatctgttataggactgtatagaggtgggaaggccaaaccgaggaattacgtctgacagaagagaagagatgaccgtggtggccttcttagaccctgtgggaaaggcctctacctatccagtgaaagtgtctacctagaccaagaggtattttatagtttcctgactcagggcatgttgagtaaagccaatttgccagtcctgggcgggagcaaatccccgagcttgatgtgtagggaagggagggggcctgaataatccctgaggagtagtagaatagcggatggaacactgagaagtgatttccttgaggatagatttccatgatgaaaaggaaataagaggttctaagaaatgggctagtggcttgtaacctacatggaagaggttatgaaatgatgacagaatagaatgggcctgtgtggctggaaggagatattttcctcggtctaagaaccatttgtcttgtgtgggaagagactgataggtggaagtttcagcagggcagcggggcagtaggtgggagtggtcagatgagaaggagaaaaactgaaagtgaggaatagaagttgcaacgctagctgcttttttagctatcttatcagcataagcattgtcctgagcgataggatctgatgccttctgatggcctttgcagtgaatgactctagcttcctttggaagtaaagcggctttgagaagcgtttttattaaagaggcattaatgatagaggacacttgtgtagtgagaaaacctcttgcatggtggtgcaggatatggaaggcatatttagagtcagtataaatattgacgtgtagtccttttgcaagagtgagggcttgatttaaggcaatgagttcggcttgctgagaggtagtggaggggggcagagcagtagcctcaatgatagatgtggaagataatatagcatagcctgcctttgctggtgagtggtgattaggcctggtggaactgccatcaataaaccaagtctgttcagggtgaggaacatgaaagaatatggggaaatggagtgaatgtcaggtggattagagagatacagtcatgggggtcaggtgtggtatcaggaataatgtaggaggccggattgaagtccgggccagaaacaatggtaactgtgggagactcaacaaagagtgagtacagctgaaggagccagggagcagaaagtgtatgtgtcaggtgtgaggaagaaaatagattttggaagttatgagaactgtagagaatgagttgagcatagtttgtgattctaagggcctctaaaagtattagggcagcatcagccgctgcacgcagacttgagggctaggcaaaacagtaaggtcaagttgtttggataaaaagcctacagggtgcggtcctggtccttgtgtaagaattccgactgcacagccctgcactttggctgtgggtaatggaaagggttgggatgagtcagggagagctagggtgggggtagtctctaaagctgtcttcaaggaacagaaagaggagtggggaaaggatttaggatctgtggggtcagctaggtttccttttgtgagtttatataatggttttgttaggatggcaaaaccaggtatctaaagtcgaaagtatccaaccatgcctaagaaggaaaggagttgttgttttgtagaaggtgttggggtttgagagatcagtcagacatgatcggcagggagcgcacgtgtgtttttatgagaattatgtcgagataggtaacagatgaggaagaaatttgggcttgactgaagtaatgggggctgtctgtgaagccttgaggcagtacagcccaggtaatttgctgagcctgatggatgtcagggtcagtctaagtgaaagcgaagagaggctggggtgaagggtacaaagcaatagtaaagaaagcatgtttgagatccagaatagaataatgggtttgtggagggaggtatttaggataggagagcatatggggttggcaccatggggtggataggcaaaacaatttggttgataaggcacagatcctgaactaacctgtaaggcttgtctggtttttggacaggtaaaatcggggaattgtatggagagtttataggctttaaaaggccatgctgtagcaggcgagtgataacaggctttaatccttttaaagtgcgctgcgggatgggatattggcattgagtggggtaagggtgattaggttttaatgagatggtaaggggtgcatgatcggtcactgaggagggagtagaggtgtcctatacttgtggtttaaggtggggagatacaaggagaggatgtgaaggaggctttgaactgggggaaaaggtggcaatgaggtgtggctatagcccaggaatagtcagggaagcagataacttaattaaaatgtctggacctaataagggagctgggcaggtggggataactaaaatgagtgcttaaaagagcattgtctaagttggcaccagagttggggagttttaagaggtttagaagcctggccgtcaatacctacaacagttatggaggcaagggaaacaggcccttgaaaagaagctaatgtggagtgagtagactccatgttgattaagaaggggatagacttaccctccactgtgagagttacctgaagatcggcatccttgatggtctagggggcttctgaggcaatcaggcagcgtcagtcttcagccgctaagctgagaagatctgggaaggagtcagtcagagagccttgggccagagttccaggggctctgggagtggctgccaggtgagttgaacagtccgattttcagtggggtcctgcacagatgggacatggcttaggaggaatcctgggctgcgggcattccttggcccagtggccagatatccagcacttgtagcaagctcctggaggaggtgggcctggaggaatgcctgcctgctgcggtttaggcgtttggaagttcttgtgtgctggagatgtggctggggtttgtctcacagtggagggaaggaattgcaactcagaaatacattgctacttggctgcctctactctattattgtacaccttaaaggtgaggttaattaagtcctgttgtggggtttgagggccagaatttaatttttggagttttatttaatgtcaggagcagattaggtaataaaataaaatgcatattaagaataagacggccttctgacctttcagggtctagggctgtaaagcgtctcagggttgctgccaaacaagccaaaaactgggctgggtttttatattcgacgaaaaagagcctaaacgctaactgattttgggaggggtcagataaagaaaaaggagcattaaccttgactatgcctttagctccagccacctgtttaagaggaaattgctgggcaggttggggagggctagtcacggaacgaaactgtaagccagaccgggtgtgaggaggggaggtgataaaaggattatagggttggggagcagaggctaaggaagaattgggacctggctcagcctggcgaggagcagcctggggaggaggggagaggtcagatgggtctgtagaaaaggaagattagaaagactcagcgacgcttggggttgggattgaggggacaggcaggagggaaagaaggaagatttgggataagtcgcattgggaacagagactagggagggaacaatgtgtaaaagaatgcctggacaccaggcacctcagaccatttgcccattttacgacaagaattatctagatcttgtaggatggaaaaatcaaaagtgccattttctggctatttggaatgactgtcgagtttgtattggggtcaagtggcattgtagaagaaaataaggcatttaggttttaggtcaggtatgagttgaagaggttttacgttcttgagaacacaggctaaggaagaaggaggaatggagggtggaaggctgcccatagtgaaggaggcaagcccagagaaaagagagagtagagacttggagagaaagggtgggggtgcttgccctccaggaaagtggagaaggggtagagacacggggagaaggggttggggggttcttgcccaccagaaaagcggagaaggggtagagacacagagagaaggggtgtggggtgcttgccctccaggaaagtggagaaggggtagagacatggggagaaggggttggggggttcttgcccaccagaaaagcggagaaggggtagagacacagagagaaggggtggggggtgcttgccctccaggaaagtggagaaggggtagagacacggggagaaggggttggggggttcttgcccaccagaaaagcggagaaggggtagagacacagagagaaggggtggggggtgcttgcccccccaggaaagtggagaaggggtagagagagagaaggggtcggggggttcttgcctcccagaaaagcagagaaggtgtagagacatggagataaggggttgggggttcttgcccccccagaaaagcggtacttgctgctaagggtgaaggaccaaggcaggcgtccccacgtggtcagacgcctctgaaatgtgggtgaataatcaggcaggcatccccacgtgattacacactaagggaagactgtcttcccaagtccgtgaccggcaccagagttttgggttcacgggtaaaacgtgtctcctttgtctctatcagaaaaggaaagaaattgaaattaagagaagggagagattgaaagatggtgccaagattgaaaggagaaagaggttgagggatagtgagagaggctggagaagagaataaagagaggctgcttaccagattttaaattggtgagatgttccttgggctggttggtctgaggaccagaggttgtaggtggatctttctcatggaacaaagagcaggaagacaggggattgatctcccaagggaggtcccccgatctgagtcatggcaccaaatttcacgcatgtctgtgtgaagagaccaccaaacaagctttgtgtgagcaacaaggctgtttatttcaccagggtgcaggtgggctgagtccgaaaagagagtcagcaaagggagatggggtggtgccattttataggatttgggtaggtaaaggaaaattacagtcaaaggggagggttgttctctggctggcaagggtgggggtcacaaggtgctcagtgggggagcttttgagccaggatgagccaggaaaatgaatttcaccaggtaatgtcatcagttaaggcaggaacaggccattttcacttcttttgtggtggaatgtcatcagttaaggcaggaactggccatctggatgtgtacgtgcaggtcacaggggatatgatggcttagctttggctcagaggcctgacatttaccacattaactgtggtatatttaatcaagctaagtaattaacattagtataatactattaactaaacaagactttattcagatttcactagttttttttgctaacgtcctttttctgttccaggatccaatccagtatctgaaagagctttttagtttcctataaactttaaattaattgtcagaatgggcggagttcctaaataaatgtaataagtcaattattattttagtaagaaagtgaaaaggagaatgcagactcggtggttctttttaagcatttatgggaaggaaccacaaacctccagcaatgtaaacacaagattcctttatgggagatctgggccaagaagcagggcaactcaccattttatgcacttgtacttggaacagttttccacctgcttgtctgcgccagcctgattctgggtaaacaatgacgtgcttaggcaatttttggctctggtacttggaactcagcttgtaaaggatatgttacagaccataaacagcctataaaccgccactcatttccctgacaaattcagctggattactgcacttgtctcctggctcatctccctgcttctgcctgccgcgcttcggtttattctcaacacagtccacttaaaacaaactggagacgaggccaccactcctccattcaagctttcactggctgccatctatttctaggtaaaaatgaaagtccttacctataagattctaaacaatctgacccctgttgtgtcccctccaacctcctctctgactcctcaccccctggcttcctcctctcagggcccactgtcctcgtcaccagtcttcacacaggccaggtcagtctgacctcagcacctttgcatttactattcctgcagcttagaatcctccagtctcagaaatcatatggctcccgcccttacttccttctggtcctcactcaaaaattcatcttctcagtaaggtcttccctagtcatcctatctaaaattgcaacaacacccacacacatccacatgcatacttaaacactccctactccctttcctcctttatttttctccctagcatccatcactatataacaagccatgtaatttatttttttatcatgtttctcatctatctctcccactagaaagtaaactcggtgacacaaggattttgttggtttgttgtgttgctactgctctttcgcagaaagacatagtgtctagcatatagtaggtgcttcataaatatttgttgaatgaatgaaagatgaatgaatgggggatcctggctccctgttgtcccacctgccattcacagctttgcccacacacctgtgtgtgtgaagccaccccagggcacactagacagtcactccctccatggccacacaaagtccacttctttggaaagctcggccagaaaggcagtttgagtaatgactctcaggtaactgattctcatgaacagtcgggtctgtggtccatttgatagttaaacaagttacaaaatattccgttctgacatcctatggggaagaaggagaaactccaaaagttaaaagcctctgttcagcaatttccaaactctgcctaccagcttcctacttaaaaggcagaagagattacagtcatatctgatatagcagtactctccagaagtcattccatcctctggtaggcaaggagagtgggtagagtggggaggtgatgagtcccagagagaataaataggattctgaaccatggaataaattgaacagccctcagtgctgttcaaatagaagcaatgtgctttcccccatgctatgttggatagggtaagaacaggtttaaagtggaaaactattcttaaaccactcacatatggagtgcctctttttgtgtcaagatgctaaatgaaagaaactgaattccctattattttcgccttctcctccttagaattcatgaatttgctaaagtcatttagagtgctcctttatagtctaaaaagaagagttctgcagaattctaaatatcatgtgtaagaaggaataaaagatgtaaaatagacaaacgtgtcttttccaaccagtgccataaattcttttaagaagtgtctgcttactgtcctcaatgtgccaatctgggtacatccatttgtcaccttgcgattgtgcaaactttttaaaaaatctttattttaaaaattcatgtcaataccgaactacctaggctgtttatttgaattccttcctcaagattaatgtcaccccgaattgtggaacattcacaaagacaggcaccctaaataattccagttctcctcttctgctgcaggctgctgttcttaacttcttttcacctgcttgcttctttcttctaatgttctggcagtgcacaaggcttttcaggtttctccctatcagcttacacgaaaggaagttcaacactaggagatgcattatctcaaagaccatctgaggatgcgatgttgtctctttcaaagaaattctgtgtgagtgctgctgatgtgtgatgcaggagtaaaaagcaggtgctttctgcacaacgagcgaggctccctcacattcttttgggagagccaaagccaactttcctgaattcccctgcaatctagtctcacaaccaggaaagctgcaaagtgagattgtcctgctatttccctggcaactacgcggcaaactgcctctgccctttaagtgctatatctcatcaacccagatctttaaattaagcactcattcagagatgatttatcattcagactgtattagacttgacttgatctgtcatttattttctcaggcagaggcagtgctggtacactatgctaagtcatctctctggggctcaaaaacgaggttgggaaaaatgtaagaacacataaagaactgcattaccctctcaaatatttctgtgctttctgagttttcaacattgagacagggctatgaagacaaacctaaagtgtcctataataaacacaatttgtccaggcgcagtggctcatgcctgtaatcccagcactttgggaggctgaggcaggaggatcacaaggtcaggagattgagaccaccctgtgaatggtgaaaccccgtctctactaaaaatacaaaaaattagctgggcgtggtggcaggcgcctgtagtcccagctactcgggaggctgaggtgggagaatggcgtgaacccaggaggcagagcttgcagtgagctgagattgcgccactgcatccagcctgggtgacagagtgagactctgtctcaaaaaaataaataaaataaaaattaaaagtaaaaattaaaaaaaaaaaaacaattttaattccacattcccagacgagcaaattggacatcttagtgccccaacagtggcaatttaattcaagtcataacagaattagaggtgcttccgagttaaccaatattttttttcttctcctgtatggcatatataaatttggcaaacaaaacattctgtcttatctttctgtttattttataaacatatgtatttgtatttgatatatgttaacacacataaatatatacttttttggatttgtgtgacaggagtccatgacattttaagtgtatgttagcctactcatcaattcatcttagtatttaattttcagtgaaaattagtgcctttctaattccaagaatgacactaaattaatagaatttaaatagaatgaataaaattaatctttgccaaaataaatcagttgggagaatgttagactgaaaaattaagagaattgaatagaattcactgaactatcatagcaaaatttctaatccacagccttagaaagttagcatatgtacaaaaattcaatataatttttccggtctcggacataggaatacctccaccctaccaatggggtgacatagtgacctgctggcttctgtgataactaagagtggcctctacagtggcaactgccctcaacttgccttaaacatccagtaaccatccacaagctggtggacaagaatagcgcagccaattaaaaaggagcaacggaggttcctggggtcctgggatgaaattttttaaaacagggagtcgatctttttttttttttgagatggagttttgctctgtcacgcaggctggagtgcagtcgcatgatctcggcttactgcaacctctgcctcccgagttcaagcgactctcctgcctcagcttcccaagtagctgggattacaggcatgcgccaccacgcccagctaattttggtatttttagtagagacggagtttctccatgttggccagactgatcttgaactgccctcaggtgatccacccgcctcggcctcccaaagtgctgggattacaggcgtgagccaccgcgcccagcccagggagtcaattctaagactaatgccagtatgcattattgggcttgaaatttgattttaatcatctgcaggcaggcaacagttaaagatgagagccaatattcctctaagtgtccttgaaatgtagtgagccgctgtgttagcagcaggccaccgtgggcactgccccaagctctgagaagtgtggtgactgtgccgctaaaaggtaagttgtctcttacattcacaggagagacctttttagcaacctcaaggtcatcggtcagtcttagattttgtaagcaacccaaaacatagctacctctgtcgtggtttgggaggtgtgctccccatcggcctccgtggctaaattctttctccgtgtttcattttctcacaattatctccgtgtctttgatccacttgattgcatttcctcctattgactttaggagatgcaggaattaacgtttaccttatatttccaaagttctctgtttgtgtaattgataacctagttgtattttgctcagccttcacttacattttcccttagaccttttcctttttatagagcttgcatggctctttgtgttgagattttattgcccagtcgaaatgatgcctgatcaatttctggaaaggatggcctattgtttaggcccattccaaagagaaactaaaataacaagataatctcaggaggagcttaattttctataccaatctctagcacaggaaggacaaatcagctttttcaagcttgttttagactcaagtcttccagaactaatcatacacattcaaactctttgcctatgcttttttttttgtcagaattgcatacaaatttgtagcaaatacagaagtcttccattatccatggtctcactttctgcacttttgcccaactatattatgaagtcccaactataatattaggggacttcatgatattatattattttggaacagagagagagagagaccacattgacataacttcattataatgtagtgctataattgttgtatattattatagttggtattaatctcttactgtgcctaatttataaagtaaactttaacataggtacgtatgcataagagaaaacattgtatctgtagggtttgatactatctgtggttttaagcatccctgggggtttggaatatatcctccaagaataacgggggactactgtagttttgttttgaatttcaatactcaagtacttccctgttgaaaatgatggaatgatgccagaaatagaaaagctacattttctacaatattctttacttagaatatattagcatttctgatgctaaaagcatggcaacgccatgcttttgtttaatcatcaagaccagacagaacattgaggatagcaaaagaaagaaacaaacaacatggacatgatcttacataaaactgatgacaagaaatccctcaagtactacagaacataggttagtgtcaccaaaacatcagacagcagcagatccagtgtggggccaggagagatgaagaattggtagaaaagaaaaaggggagtactgctacttctccaagaagagtactcagaaatcaacaacaagcattcacgcccaataggagaagagcctttccagaacaggaatgaaagcaatcaaatctgcaccttaccagtggaattaaaagaccctctcacaggctccaagctgaggccaatgcaaagagaccatagggaaccagtaatgtaaaccatgctaacgcagagttaccctgcatatatctgagaaacactccaaagtactaccttctggaaagacagagactcatcctctcccctcctccctctacaaaaaaagaataagaaatctgctgtgaattcaatctaaaatataacactgaggaagccagcaagacaaaagcttccaaaccagagaaggaggtatcagagatagatctcagaaagtacagaatgacaaacacattcaaaggtaacaatactgctttgaaaggaaagacctttagaactctagacaacacagagttagagcaggaagtttttgtgaaccaggcagagccctaagagacagagaagtgcccctataaaaaggccatttttttaatacttcacagtaacaacagagaagagagccctacacaagaatcttcctctaatagtccaagaaaattatctcatttatatatgagattgttcatatatggaaaataaaagcagtttacaataaaaccccatgctgagacaaggataaagataagaattaatcaaatatagttccaacacataaaaatatactacaaaagtggctataaagaagatgaaaactacaacattagatttcaaaatgagctaaaacaatcttaaaactaatcaaagcttgaaagaaccatacaaatcagaattagaactgctcagaaataagatgactagaatgatatgaaacatcattttatggaaagagaactgagaaaactcagggatgaactagaaaagaaagaaacagtatttcagaaatgaagggtatattagaagaaataaaaggacaataagagaccatggaaggcacagtaagagaaactgaggttagaagggagaatgaaactaataaaccagacacaaagaaaagagaacaaaaagaatttgtcaatgatttggaacaataagtgaaggagattcaacataaaattcccaaaagaaggaagccctctgagaagaaaaaacaactaatacataaaactataattcaaagaaaccttttcaaaataaaagatttgaatctatgtattaaaaggaccatctgggaaatccaactaagaaccatcaacactgaaacactttctaataaaatggttgtattgttaaaacaagaaaaaaaatagcatccaagcaaagaatgaatcagactttgaagtatacacattttgtaccagaagacaatgaagcagtagttgtaaagatgctcaagataagaaaatacaagccaaagattttatatccaaccaaactatccctcaagtatgaaggtgggtgctatgatttgaatttgtcccccaaagttcatgtgttggaaacgtaatcgtcaatgcaacaatgttgaacagtaggatgtttgagaggtgattaggtcatgagggcaaagccgtcatgaatgcattgatgctattatcacatatcgggggaaccagcccccaatatttcaatgtagtttatttctattttccctaagtgtcagctggtctgagaaataaagagaaaaaccacaaagagaggaattttacagctgggcagccaggggtgacatcacgtattggtaggtctgtgatgtcccccaagccacaaaaccaacaagtttttattagggatttcaaaaggggagggtgtgtacgaacagggagtaggtcacaaagatcacatgcttcaaagggcaaaaaaggagaacaaagttcacatgcttctaaggccgataaagatcacaaggcaaagggcaaagcaagatcacaaggcaagggcaaaactagaattactgatgagggtctatgttcagctgtgcatgtattgtcttgataaacatcttaaacaacagaaaacagggttcgagagcagagaaccagtctgacctcaaattcaccagggcaggattttttccccaccctaataagcctgagggtactacaggagaccggggtgtatttcagtccttatctcaccacataagacagacaatcccagagtggccatttatagacctccccccaggaatgcaattcttttcctagggtcttaatatttaatattccttgctaggagaagaattcagcgatatctctcctacttacatgtccgtgtataggctctctgcaagaagaaaaatatgactatattctgcccaaccctgcaggcagtcagacctttggttgtcttcccttgttccctgaaaattgctgttattctgttctttttcaaggtgcactgatttcatattgttcaaacacacatactttacaatcaatttgtacaatagtggtcctgaggtgacgtacattctcagcttacaaagataacaggattaagagattaaagtaaagacaggcataagaaattataagagtattatttgggaactaataaatctccatgaagtcgtcacaattaatgttcagagattgcagtaaggacaggtgtaagcaaatataaaagtattaatttggggaactgataaatgtccatgaaatcttcacaatttatgttcagagattgcagtaaagacggggtaagaaattatgaaagtattaatgtggggagctgataaatgtccgtgaaatcttcacaatttatgttcctctgctggggttccagccagtccctctgttcagggtccctgacttcctgcaacaatcacaggagtgggttattgtgggagcaagcttctaataaaagaatgagtttggctcccttccctctttctgtcacccccataggatgatgcagcaagaagggcctcattggatgcagcccctcaatcttggacttcccagtctccagaaccatgagccaaataaatttgtttattaaaaattatagtctgtgatattctgttatagccgcacaaaacagactaagacacaaggccatcaaaaagcagttataaatattcaagaactctgggattatttttaccaaaagcctttctgagcaatctgctggagaaggagcattagaaaaccaagagctgcttgaagaagcttgttgcaggctctggtagaaattggctacaggatggaggaatatacaaattatatataatctgacaatgtagaaataatacaagtaacaagtggggaaagtgagtggaaagcagaatacgtttgctgattgtcgcataggcattaaccaggagtaaaacagtatcatctatgtttagacactggggaggatggaagaaaagcagtaatagttatagccaactttagtattgcttagagaaaggtagagttaggcattaatttaaaaagagaagcttcagctattataaataatattagtgtaaaggcaagaagtggaacaaaaacacaaaccatattaaatactaaagattggaaagagaaaacaggccatatgggaaaagaccttctagataacagtaaattatgtaataaatcagtatgtcagagctgagatcaaacatataaatccacagaaagaaaaagattcagattgactaaaaaggcaactctctctgctgtatatgagacatacctaagtcaaaatgataaagaaacattaaaaattaaagaatatgcataaatatgccaggcaaatttaagtaataagaaagaagggtttgagatcttgataggaagcaaggtagaatacagagagaaaaaaagtcaaaaagttaaaagagactgagaaagacattataatatcaaagactgcaattcattgaaaacaacttacataaggcagaaactgctaaaaatctaaggagaaacagaaagaaacatgctaataatagaaccttaacacacctctcttgatccaagaatgaataagtggaccaaaatgaataaggatgtatagaacctaaaccatgtcatcaataatgtagatctaatatacctatctaactctaaagcatttttggaatttactttcctttcaaatgcacaaatttaaaagtatgttaatgttataaacaaataagatttttgaacacatatcaaaagatatctaagcctaaaattaaagaaacaaataccctacaatcttaaacttgaattagaaatttcaacatcagctactttcggaaaatagccacattctagctttgtccactgaaaaagtctagaaataacttcaatccaatcagtgagcacacctagctctcaattgtggtctctaaatagaattgttcacaaatagaactaaagattcatgaagaaatagctgattctagttgtggggcaggaaaggtagacggtgggctgagatagtttgttactctagaaagtagaaagggaagaaagctttcaaaggctggtggaggtcatgtcaaaaggacatgggagtcagctagaaggggatcccacttgccatagatgagacaacatgaacaataaaaaagtgaccccattaattaaaacaaattgaatatacaaaatgttgtaaatttaaaatgatattttttaaaagggagttaggagagaaagaaaaataaaataaaagtcactgggcaccaatggcagttgcttgggcaccaaatcatgactctagaaattgagatttaaagggaaacaagcatttgtctggcttttctggtataatgtgcatttcaggatgtccaaagagctctgtagttgagggattttatacagatgctcagataataaattcaaaaggaaagaattttctaaatcaacattttgcaattcctgatgcaataactgattaaagaaatggtcctcattagataataaaaccttagatgaagtattgatgataaacttcacaataaaattatcaagctaccatcacctaaacccactgatcaattttagcatcactgaatcatacacattctggtatgatatgatgcaacgtgaaagcattttagacaagccaggaaatcaagaaccatgcctgaaatattctttttataaaaccaaaagaacagctaactgaatttaatcaagtctttaacttcagtctataagaaattcagaagttgagggaaacttgaatagcacctcaagccaaatctagaatgtaggaatctaatttagtcaataagtccgtggcagagagaaaagaggagataggaggaactgttctagattacaagatacaaggctgaagtacaataaaatgaaacctgtttaaatcataaatattatatatgctatgatttcatataatcatatattctactagttcagttaatcatggaataagtgaaaagagatattttagataaccagaggaatgtaaatatggagcagatactggatgatagtaagtattaagtagttattgtaaatttgtggatacgtaagaaaatggttttttctctcttcctctctttgcctaccactttcacgctttctctctccctctgactccgtctttttcactttgaaaagcttgctaaagtattaggagtgaaaggacatgctgcatggtattgacttcgaaacgctccagtaaaacagagagagattgggaaatgtatagatgaggaagtacgtaaaataatgatggtgttcaaagctcaatgattggctcataaaaatgttcataataaatgtattttttaaatgaaatgcctttgaaggtatgtgggaacataataactataagaaagacaaagtatacacatgctttttggtgatattgtaggtagctaggtatcagtatttttattgtacttatgccctacagctaaaataattatattgaaatacatcaccatatcctgtcatgttgaaatggcatagtgccacagtaacaaaaaatttcattcaaagtttatatttaggatatgtatttgttctatcttagaactgttgtgaaaaaacatgagacaagatgctgtataatagacgagcagatggcacctttctgtctacctctcttcctctttctctctctctctcccccatttctcagtgttggagcactgattattagttacctagagtactttcctctttctcaccaataaataaaataacttttgaaattatacaattagtaaaatttatggactaattcatattttcaaaatgcttactgtaattagtttaattctgaaaacgtgtatgaaacatatgacccaattattcatcatttaactagatagcagtagaggccacactggtgtcatgggatccttggggtgttgttttgccagccagaagcctctgtggtatctttggtagagtttttactcgggccccctgggctcattccacccactcagcctggcagtctgcactcggttcatcctaccagcctgaatcccatgcctgtcaagggcgagccaagtgcagactggtgaggggtgtgtgagtgagtacagggtctggccactgtgtaaagccaggcatgccggctgcagcagggcaggcagctccaggcaccggcacggacactggctccctgcaaggctgcagctgcaccaggcataccacgaccagcttctactgtgggcaccagggaacacagtgatgctcagaagcctggagacaccaggaaccacagagctccaaagagggtgtcacagccctggcttggggagctcctatgtctgggatccccaaaggactgcagctcttccctctcttctctccttctggttgcccccacgtggcaagcaggggatgggtgtgtgtttcaaccatttgtgttacagctcttttagtcccatcttttggcaggtcttgagtttttgtcctgcatccaggaagaatgaggtgtgtggacaactgcagggtgagcaaggtgaagagctgctttattgagcaactgtacagctctcaggacacccaaagtgagtagctcctatctgcaggcaggtcatcccactgagtttgcagcatttagtggagaggagacccagagtgggcagcttctatctgcaggcaggtcgtcccatcaagttgaggagaccagaattgggtagctccttcccacagctggtagtccccacatctgtctgagtctggctgagtccaggggtttttatggacgtcagaagaagtgcatgctgattggtccatgggaggccatgggtgggcccagaaatggcactaaatggcaccataagttctcattctggtccgctgaactgacagcctggccaccaggcttcagggagtccctggtttgaaggtggggcttcaccagggacctgtccctttctacccaggagcctgtcccctgccgtcatccacagtgcccaggctgtttgttctgagggatgcctgcaggtacaagctgagccatcctcagccccttgcctcagccccccttccatgctcatcggcgagggggctaagggaggaggagcctggcatgtcagtgccatccggagcacacacacacccagccaggtcacagccacccaggctcagcctcaactttgcttcgaaatctgagtgggcaacaggatcggggagaagccagacagcaggagtaggcacttcggagcctgcagggttggggcggaggtggcttcccaggcccctaagagtgcagggatgcacaggtccacagctacaactgggttgctgcagctgcgccagggaggtcggagctccgcccgcttaactcggaagggggcggagctccaacctgttcctggctcccaccagctccctggagtgcccaccacctgccacacctcccccgctgtagctagctccttgacagccactgctccaagtggacacctctgccatcactggtatttaaaaaggagagagaaaattaaaaagaattgctactgaaccaggttgaggagatcctattcaccacaaccaaaattactatgtagcaatctaagttagtcattaaaagatcaaaataatcagtcattttctggtataaaaaattctatttagaagaagttaagtagctaaagctcataaaatagatttttaaattataaaattatttaaaactctaagacatagaagtcacataactgcaagatttaagcatgtgtctaaggcagggcttctgaaattcacataagtatatccctgcaggggtactcagctgcatgcccagaagtacagtacgtgggccacaggaaaccacagcatttctttccagaacatcaactgtacttaaaatttagtaggcaaaaaacatcatatgaaagtaacattgacacaaaatagatcagttacagaatagaatgcacactttataacatttttaaaatagaaagaatacttcaggaaaatgttgtacttcaatctaagattgctgactccccagacacctgtccaccttttctgatttcagcctggtccacacagaaagtttgagagacagcagcctaaagaaaaggctggatgcatgaaactgactctcctctttgaaaacctagaaacattcttttacagccttcacgatgataaggtccccaggactgattgtcaccaactaaaatgcacaggaggctgagatcaacaccaaaatatccactatttatagacaatgaaaactaatacaagtgtcacaatgctcagaaatccaggtgtgagtaaaatcagtgcatttggtctcagaaagctatgtagacatcaaatgttcattggaaacctctttattgattttgcatgagaaattactgtcaaacagaatagaaaaacatgaaatccatatcatcagcacattctctccatgtaagcagattacacaggagtcaaaaagttgtttgatgaacatggaatcagaacacagacgaagaggctgtttcacattatcagggaggccagtgggtttgtttgccagaaagaacaacactctgggtctattgatggaagcatcataccttcagctccatcctatggacagcccttccattgaagctaggaatatttgagtcagtggttatcctgagtagcatttgagaggcactgccaaaatttacttctcagtcacctttttctgtctttccataactgaacaactcctcacattctttctcttgtctatgccaggatactgagtggatcattgtggagttttgctgtctccatcaggtggttgttggctgttgtgagacctcagtttttgtcttctcagtttaaatgaatgtaaatggagacacacagcaaagaagatgcagcatagagcaatttattgtaaaggaaaaagaatatttggaaagtttggtgcagaatacactgcatactctgagagagagaggattcatggcaggctgctggtaaggatgagacagcaaagactggcactagggagactctatgggagtcttacatgatgattcataagtgggtgggaagaggtgttactaggaagcatgttctgggtggtcctctgggtgcacatgtgcagtagctgtacatgcttgttcatatgtcgcatgtctcattagcatcttaaatctccacctgtgtgtttggtttctgttttgttttgtggcacattctcgctctgttgccaggctggagtgcaatggcgtgatcacagctcactgcagcctctgcctcctgggtccaagtgattctcctgtctcagcctcctgagtagctgggattacaggcacccgccaccacacccagctaatttttggtatttttagtagagatgggatttcaccatgttggccaagctggtctcaaaactcctgacctcaggtgttccgtccgccttggcttcccaaagtgctagattatatgtgtgagtgtggttttactattataatgagcaaagggtcagtctgagaataggtaaaataaaaatttctctctacaggagaaatttcttactggatatagctttgcttgaatgactttgactatgatgtgaatgctgaggcttcttgggttgactgtatagtcccacggttgccgagtcccaagaacatggttactaatcacaaaggaagaaaagtgagcacgttagacactagttgagctctaatgaggatgagctgcttccatcattttgagcaatagacatctcactcacaggatactaagtaaatcctagagctcttgaaaccctcctaattgtgcacaatgacttctaaagagaccccgtctccacagccacaatatggcagactgcaacagagttgaaatgcgttgttcttcagtagtctcagcctgtgcaccccaagaaaaagaaaatccacaattcatccccttatgttagtaggttacccaatttcagtgcgtaaaatgagcaaataaaattccatattgaaataacttctaagttaacatttgagatatttagcacaatgctaaatattcattggctttcctcattctttaattctacaaacatatattgagctcattctgccacaaataaggcacaatatgcaatgttgtggcaaacacaacgataaacagaaaatgatcactgttctcagctcctcacagattagcacacatcctcagttctattgaattcccaggcatctctgtttaaatttcagctccaacatttactggatgaatacgttagaatcaggcaagtcactttaatgtctctcctcagcagtaaaatgaggatagtagtccctgtattatagagtttgttgaggattaactgtaaataattcctgcaaagctcttacctcaatgtctggtacatgacgagtaatcaacgtaagtcacctgttagttttggcagtgattttggtactaatagtgggtgttggtagtacaaatatttgcacatccaaattaatggttaacagtaactggagtgttggggttttttaatggcccctggccatatcaaagccaaatgaatgcagaattacccaaagattcacgtgtgccaaaattattgataatggaaacttaaagtaccccatatctaaaagagaaatacattgaattcccttccatgccaaagtaaaagtgaccaaatattctctctttaagaaaattgttctttccttccctaaaggtccaatttaccagaaaatattctggatagaagttgcaagttacataaaataagaaaactgaatatggaaaaataaattgttttcaatataatcaggcttcattgtgacattctgagtagagttcaagctcatatctagcgtataccttagtgaaactgagtagagcaatgcaagagcctcctacttttcaaatactatttcctcttcctggtcctgtctccccaagtgaactataaaattgcttatggaatttaaaagcagattggttttatatcttccagctcattcaaatattcacctggctttaggagccctttgagttaccctgcttggttcttaaacactggttgacacctaccactggaaagcttggctgttaactacttgaactacactttgaaaaaccaatcttggttagtttctcaagaagacagcatgcattgaaagggacaatctcagatgaagcaggaatagaggggtaaaataaaaacaagaatgcttaccactttctaatgtcctccccgcaatttgaagtaatccctgtccttttgggaatttccagttgttatctctcctaagacaattatgcaccatcgtggaaaaacagataatgctatatgtctttgtagcttttctccttgtgcataaaatgagggtgaaacacctcatcggtgtgagatagagtcagctctaaatatactgagaaaattgtgtttacacagaggccgtattgactacatctccacttctttcacctcacagaaaaggaattaggtcctgccttatgtgatctgctagtccccatcagactctacaacttggtttcttctcttgcacagatttacacaaagcaaaagcaactgtcccaatcactaccaaataggcactgtatgatacttttgtattatatatagacctaactttaaatttgccattttaatcagtggcataccagtacagtgacattagcatgcattcacattgttgtgcaaccagcaccactatccatcaccagaattttttttatcatcacagcctgaaactctagagccatctttattagtcacctctggctgctataacacagtgccacatagtaggtggctcgtaaacaacatacatttattgtgtcactgctcctggaggctggaattctgagatcaggatgctagcatggtcaggtcaggttctcgcgagggctgtcttcccaccttggagatagccacctcctctctgtgtgttcatatggttgtgcatatgctgggtttggcgggcgaggggaaaagacccctcttccttcctcttgttgttaagccagttttatcagattaggactccatccttatgacctcatttagcttaattacctcctaaaagccgtatcttcaaatacacttacattgacggttagggcttcaacatataaactggcaggggggagagaggggcacaattcagtccattacaccattaaacaataacttcctattcactctcccccagttcctagtaacttccattctacttttgtttctatcaatttgactgtttcaggtacctcacataagtagaatcacacaatatatttcctttagagactggcttatttcgcttagcataatgtcttcatacaacatccatgtcgttgtatgtatcagaacttggtttctttttaaggctgaataatactccattgaatgtatataccacattttctttatgcatccatctgtcaatggacacttgggttgtttccacctttaggctatgcttaataatgctgctgtgtacataggcatataaatatctgttcaagcccttgctatcaattcttttgggtatacacctagtagtggaattgctgcatcatatggtaattctgggtttaacttttttgaggaaacgttaaacttttcttccatagcagctaccccatttggcattcctaccaacagtgcacgagggttccaatttctccacatacttgccaacacttgtagttttccactgttgctgggtttttttaacagccatcctaatgaatgtgaagtgatatgtcactgtggtgttaatttgcatttccctaatgactaatgatgttaaacaccttttcatgtatttattgaacatttgtatttcttctttggagagatgtctaaaacatcttttgcctgtttctattggtctatatgtctgtctttatgcaagtaccatactgctttaattactgtagcactatagtaagcttagaaatcatgaagtgtgaacctttcgactttgttcttccttttcaagattgttttggctattttgggtcccttgagattccataggaatttaaggataaatttttatatttcttaaaaaaacattgagatattgataggacttgcattaaatctatagaatgctttgagtagtatgaacgtcttttttttttttttttttttttttagatggagtttcgctcttgttgcccaggctggagtgcagtgtgatagctcaccgcaacctctgcctcccaggttcaagcgattctcctgcctcagccacccaagtagctgggattacaggcatgcgccaccaccctggctaattttgtatttttagtagagacggggtttctccatgttggtcagactggtcttgaactcctgacctcaggtgatctgcctgcctcggcctcccaaagtactagaattacaggcatgaaccaccgcacccggccaaacatcttaacaatattaagtcttttgatccaagaacacagacatctttccatctacttatgccttcttcaatttctttctgcatgaataatattttagccaaatgtttccacaagctcactgcccttctgcccaggcaggtcccaaatgcagctcagcaggcttcccaggttcctcagagccctccctctgctctctccatgactcaatcaccacgggacatctcacaccagaataaagccaaggagctaaactagagggaggaactgtgcccttaacgtgatttttggctttattgtccctggctaagcttctttgtttatttgtgtgagtcagcttcacatttcctctagaattgagactgctatcaaaacaggccctgacatgttagccagcagccagtctatacataagacaatggtcctcatgactgaaagtcagaagagatgctgaagtctacaattagtgtggggctttcacaagctcttgaggccccaagacaaggggttggaatcccaggtttactactgactcactataaattacctatgtattgtctagcaggttgaatggcagcccacaaaaagatatgtcaaatcctaatttcaagaacatgtgaatgtgactttttctggaaaaaaaaagataagatatttttagatggaatgaaaagataatacgaaaaaaattttttttccaaaaaatatttatctgagatgagatcatcctagattttctagatgaggtataaatccaatgaaaagagtctttgtaagtagccaggcacagagggtcaactatcacatgttctcactcataagtaggtgctaaaaaatgtatacatatggatatagagagtgcaataatagacaatggagactcagaagggtgaatgggtgggagggaggtggatgatgagaaattagttaatgggtataatgtacttcatctgggcaatggattccctaaaagccctgacttgaccactacacattctacgcatgtaacaaaattgcacatgcactccataaatttatacatttttttaaaaaaagagtccttgcaagagacattcagggaaggcagagattgcataagccaccacaagccaaggaatgctggcagccaccagaggcaaagaacgtaatctcccctagagcttctggaggaagcacagccctgccgacagcttgatttcagacttctggcctccaaaactgtgagataataatttccagccaccaagtttgtgatcatttgttccagcagccacaggaaactaagacaccttgtttcctcattcaaaatatgaataatggacaggtgcggtggctcacacctgtaatcccagcactttgggaggccaaggcaggcagatcatttgaggtcaggagtttgagaccagcctggccaacatggtgaaaccttgtctctacaaataatacaaaaagtagccgggcgtggtggcacatgcctgtaataccagctactctggaggctgaggcaggagagtcacttgaacctaggaggcagaggttgcagtgagtcaagactgcaccattgcactccagcctggacaacaagtgcaaaactctgtctcaaaaaaatatatatatatgaataataatagtacctacttctagagttgttgtgatggttaaataaaattatcatggaaagcaagtagcatagggcctaccgctgcaaactctcaataaaaccctgattagcattacaaatggaggagtgaggcaacacaatgccgaagcttataagaaccagaggtccaggaaaatcattgtttttgcctgagacatctcccggttgatttttttttttttaaggttaaaaactacagtcattttcttgcttactgaagtccatggggtataggcaaaatatcacattctgcattccaaaaaataagtatcaagctcccatgtgtttgtgcaatgggagatggggagaaaactatatatgtaacaaacatatgaaaatgttcttaggccaccagatatagaaagcaaaaatactttgtgtgccaactgttgtgtctgtatatgcgtatgtattcgtccgttctcagattgctaatacagacatactagactgggtaatttataaggaaagagctttaatggacttacagttccacatgactggagaggcctcagaaaacttacaatcatggctgaaagcagctcttcacagggcagcaggagagagaataagtgctgagcaaagaaggaagccccttataaaaccatcagatctcaggagaactcactcactataacaagaacagcctgggggaaaccgcccccatgattccattatctccacctggtcctgcccttgacatgtggggattattacaatcaattcaaggtgatattttggggggcggggagcacagagccaaaccatagcagtgtacatttcttctggagagttcataactttcatcagattctcaaaaagagtctgtgtggaaacaatagacactggggactccgaaaggagggagggggcgaggacggcaaagcctgggaaacttcctactgggaactgtgttcactgtctgggtgacaggatcagtagaagcccaaacctcagtatcatgcagtatcctcttataagaaacctgcacatgcacccactgaatctaaaattaaaattgaaattaataaaaataataaattaataaaattctttcaaaaacactgccatgtaaaggaagttataattgctctaggaaattaacatttctaattactataataatgaacattttttatgcaacagtggatactaatgggaatttatgctattagaagattatgctgtgttaaccctaacaaaaaagaacctgtaccccccaaaaatgttaatcacttacataaaataatactgatggccttgaataaagtgcttaaggccaggctctaaaaaataaaccaggcaagtattacattcagccagggggctacctgtggctcaaaacatcattgctggagccttgcccatgacccaattccagcaatatgagatgagtctggattcgaggaagagatttgagagagaaatgaacagcaagtgccttcgacaatatagcaatctcccagttgtgtagtaacagaaagtgcatttaaacatgacctgcaaaaagttctagcaataaattccttttaaattgtttggtgaggcctctttgtggaactctaagattaattgcaataataataataaattgttgtcattgtgacccctcacattcataatcagacaaactagatagaaaatatttaacattttttctttatttaaaaggcaattattgagtaagtactacatcttggtaaccacctgacaggttcatcttgcctattgcctaaacagctgatttatcaagacagggaattgcaataaagagtttaatacatgtagagtcagctaaatgggatgctgaagttttcttactactcaaaccagcctccctgaaaattcgaagactaggtttttttttaaagatattttggtagtcagacagctaggaaatgaggaatgctgaatggtagggtgggaatgaaataataggaagtcaaagctgtccttttatgctgagtcagttcctaggtgggaaccacaagaccagatgagccagtttactggtctaggtggcaccacctgatcttcagaattcaggatctgaaaaatacctcaaacatcaatcttaggttttacagtagtggttatctataggagcaattgggagtttgaattcttgtggcctctggctgcgtgactcctaagccatcatttctaatcttgtggctaatttgttggttttacaaagacagtctggtccctaatcaagaggagaggggaggttgtttggagaatgggctttttacattcttcttttcaaaattaaattataaactcaattactcccaaagttagttcaggctacccccagcaatggacaaaggcagcttggaggttagaagcaagatcagctgattaggccagatttctttcactgtcataattttcccatgtcaaatttttctcactgtcataatctttgcaaaggcagttttaatctcccctcttgggtttcatcacacattattcttaaaggtaagaggagtgaaactactctgcagctgtctgcatgtattcacaggtgcctgggtggggtttcaagacttgcatgacaatgatgttagtactctcatccacagttttagcacagcacttcagtgagcagcagactagaagataatgagtcttaatgtcaggagtgaaagtccgagcttcagtcttctttgtagaattgatttgaaaccctgggggattcaggcaaatagctctgagaaccaatcagacatagggtcactagtagagagagatttgggtcaggttgttagaaagacaaattgggacacacacaaaagagaaaatttaaatatatcatctcatatatttttagtcagctttttagacctgagaatagatcagttgagttaaacagtagtgtcccattctaggaggtggcattgcagatgggctatgctcctataagtgatgaaggtaaacagatttttaataagagatatttctatggaaacagaagaaaaaggttaatgttaggcacaatctatccagatgtccaattcaaaacacttttagttacagaggaggaaggctgtggtaatttgacacatttttcttgactgtatcccaaggaataagctttagcttgtagggcctcagggaaaaaagaaggtagtagtccaaatccgaaatatggaagaaaaatttgtaagcattaatttggggacttgcaggccagaaagaatttcagtcagtccaaactgtagaacatatttttttaattaaaaacaatgaacaagaccaaaatctaacaacaattatactatagtttttagaaacataatttttctctctccagtctccgaattttattaaagacaaatcatggtaggactgatttacttgcaaaataagctttagttcatgtattagtccattctcacactgctaataaagacacatccaagactgaataatttataaaggaaaaaggtttaatagactcacagttcagcatggcggggaggcctcaggaaacctataatcatggtggaagggaaagcaaacacatccttattcacatggtggcagcaaggagaaggtggcagctaagcaaaagggggaaaagcctcttatagaaccatcagatcacatgagaactcactatcatgagaagactgtgagggtaaccacccccatgattcaattacctaccactgggtccctcccatgacacatgaggattatgggaactacaattcaagatgaagttttgggtgagggtacagccaaaccatatcagtccaattatacttggcccaattatttgcataaagtacagcaagaataattatttgttatatggtgatatgatttggatttgtgtccccaccctaatctcatgttgaattataatacccagtgttggagaagaggtctggtgggaagtgactggatcatgggggcagactctccacttgctattctcatgatagtgaatgagttcttatgagatctggttgtttaaaagtgtgtagcacctctcccttctctctctctttctccttctctggccatgtaagatgtgcctgcttccccttcaccttcaaccatgattaaaagtttcctgaggcctctccagcctactacaattcctacaatactacaggaattatagttcctgttacagcttgcagaaccgtgagccaattaaacctcttttctaataaattacccagtttcaggtatttatttaaagcagtgaaagaatggactaatacagaaaattaatactgggagtggggcattgctataaagatacctgaaaatgtggaagcagctttggaactggatagtgggcagaagttggaacaatttggagggctcagaagaagacaggaagatatgggaaagtttgaatcttcctagagacttattaaattgttgcaaccaaaatgccaatagtaatatggacaatgaagtccaggctgaggtggtctcagatggagatgaggaacttattgggaactggactaaaggtcactcttgctgtcctttagcaaagagactggtagcattgtgcccctgctctagggatctgtggaactttgaacttgagagagaggatttagggtatctggcaaaagaaatatctaagcagcaaagcattcaaggtctgccctggctgcttctaacagcatatggtcatatgcatgagaaaagagattatctcaaattgaaacttttcaaaggggaagcagagcataaaagtttagggaatttgcagcctgaccatgtggtagaaaagaaagattcattttcatgggaggaatatgcctaaataaagaggagccaaatattaatagccaaaacaatggagaaaatgccttgaagatgtttcagagaccttcatggcagcctctcccatcacaggcctggaggcctaggagggaggtatggtttcatgggccaggcccaggaccctgctgccttgtgcaatcttgagacactgctccctgcatcctatcttctccagctcctgctatagctaaaagggccccagataggtctcaggccactgctccagagggtgcaagccctaagccttggcagcttccacatggtgttaagtctgcaggtgcacagaagccaagagttcaggcttgggagcctccatctagatctcagagaatgtatggaaatgcctggatgtccaggcagaagtctgctgcaggggcctgcaggggcaagccctcatggagaacctctgctaggacagtgcagaggggaaatgtggtggcagggccctcatacagggtcctcaaactggagcactgcctggtggagctatgagaagagggccactgtcctctagacatcaaaatggtagatccactggcagcttgcactgtgcacatggaaaagctgcaggcactcaattccaacctatgaaatcaaccaaggaggctatatcttgcagagccacaagagtggagctgccaaaacttggctgatttctccctttgggaataggtgtacttatgaaatgcctgtaccctcattgtatcttggacataactaacttgttttttattttacataggcagaagggactttcctcatctcaaatgagacttttgactatgaacttttgagttaatgctgaaatgaattaacatttcaggggactgttgaaaagaggtgattatattttgcaatgtgagaaggacatgagatatgggaggagccaggggaagaatgatatggtttggatttgtgtccccacccaaatctcatgtcaaattgtaatccctagtgttggagtaggggcctggtacaaggtgattggatcatgtgggcagacttctcccttgctgttctcatgataatgagtgagttatcatgagatctggttgcttaaaagtgtgcagcacctcccccttctctctctgttctgccttctttgtccatgtgagacgtgtctgcttctccttcactttctgccatgactgaaagtttccagaggccttccagccatacttcctgtacagcctgtgaaacaatgagccaattaaacctcttttcttataaattatccagtttcaggtatttctttatagcagtgcaagaatggactaatccatatagactttttaaaaattggcttttctggaggtttctccataaggaatctcagattagactttttaaagccttgagcccagccgcaaatttatctgtgccttcagatgcttatatgattggatgaatatctctcctcttgagcctgggcccgtcaaaaattatttaccacaggtcaggaactctgtacagggactgtgtaaataaggtataagtccagttctcccaaggggcttttattggctctataagtcaactttgattccttcaagcagtctgtttatatctgaaagcatgtcattccaatttaagccttgataaagtagccagtgtctccaattgtgtcctgttataaaagaaagcagatccttattgcacctatgcaaataactatattgccataagttaagaaaactcacgggtagtttccaaattctgataaattaggtagagaaagaaatatttttttaatttttgttcataggagtatactttcttcaattgttaaaagctataaatagctcaaaagaaaaagttttctatactctgaaaaacagaacaaaaaagatcagcagtatgtcaagcagtaagtcataaaaaggttatttgggtcttctgttagttcagttcatgcaattaacctttgttcttcctgttgttgagccagcagtgctcctgaacagatcagctgtctacaagagtcctgaaagttttttttttttaatttcaatgacccaatctcccaagttatcaaaaacctgcactcaaaagcagctgtcagagtcttatagctgattataaactgccgtttgtaaaggatcaaaacaagataacaattatctgtggaaaacaaaaatcttagtatagccacaattaaagacaaaatcaacaaggaaatctggtcatatctgtggcacacaataatttaacataaccattattaatcataaaatatactgagacatatcagaattacaggaatcttacaaagttttgaagcacaaatttataacacatttctatgaatataactcaaagaaaattaaaaaccattttatatttgaaaatgctttctgtatgattttaatataccaaataagctgaatatgtccctttttggaattcaggggacctaattcttaaaaagttaatgaagccaaaaaagacttaatttataatttgattttggaaagtttgtcaaatatcaaagatttaaaacacttggtatcataaaatagaattccatgtcactataagtaatttctttaacaaaaatgataactcaaaaattttaaaaagacttaaacttttactcattaatagaggggagattcagctttccaaccaacaagatccaataaagacagtatgaagacaactgaatctatctcttctctctttttgccttttttctgtagttgatttaaaaggcaaaatatattttattatctcaatattacatgaaaatcttgttcaaaagagaaaatcctattttacttttgtattcacgtatgatttatgttaaacccagtttttgtttttttttgttttttttgttttgagacagagtcttgctctgtcacccaggctgcagtgcagtggcatgatctcggctcactgcaattctctgcctcccaggttcaagcgattctcctaactcagcctcctgagtagctaagactacaggggcatgccaccacactcagctaatttttgtgttgttttttttttagtagagacgggattttgccatgttggccaggctggtctggagctcctgacctcaaattatcctcccacctcagcctcccaaagtgctaggattatgggcatgagccactgctcccagcctaaacccaatttttaataaaacctcataaacaaatttatctcattttaattagtgtgtaagcataagatatggttttgacaactccattattactttataatttcttgttaaaaagcagatcaatattttaagaaaatcttgttattttgacacagagcccagttccggccctgcattttattttaatgtttcatttatgggaaaactaaataatatccttttaattttagccaatttgctcacacacagaatttctcttacaagatgaatctatcataaaccttataaacttgcttaaacttttagttctatcttctcctttattaaatttagaacaattcctaaaccctctaagctagacccaaaaaaccaaattcgtatgtgtttttgccaatagcatacaactcctatttttaagcataagcaattttagttatgtaccaggtgcagagcctaggacacaggacagaactgcagataatgtctgactctttccaactagctaagggacatggctaaatccacatgtcctcaggccttacttacgatttaaaatttggaaaatatttctaaagcaggcaagaagacacctatcaaaagtcacagaagcggtgtgtaactttaaagcctctagtaaatacagtatctgaactgcctaatttagatgaaatgtctaaattgtgaagacatttttattttattttaccaataatctttaaaactgtctttatttttcaaagcttattagagtcctgtgaactaaaaggcattaaagtttctatttttctggcaaaataatttgatttaagtgcttatttttaaaggcaattaattagagctcttttatttattttaataatgaggcatcacacatacacacaacatatatgaatacacagaagcagatctggtagaatctgctgcttttaattttttaaacagtctgggtagcaccagctaatccatcagaatgcagggtctgaaaaatacctcaaacgtcagtcttaggttttacaacagtgatgttatctataggagcaactgggaggttattatcttgtggcctttggctgcatgactcctgagctatagtttctaatcttgtgaataatttgttggttttacaaaggtcatcggatcgctaagcaagcagggagtttattttggggagaagatgtattgtctttttttcaaagttcaactataagctaaattactccaaaagttagttcaccctacccctaagaatgaacaagggcagcttggaggttagaagtgagatcagtcgatgaggtcagatttctttcactgacataattttcctatgtcagatttgtctcactgccataatctttgcaaaggcagttcatctcatgaactgaattgtgtccccccaaaaattcgtatgttgaagccctaatccccaattgtctgtgtttgaagatagggtgtttagaaagtgaaacaggtcctaagggtggtgccctaatctaataggactggtgtcctgataagaagagaagagacaccagggatgtgtgcacacagagaaaaggctatgtagggacacaggtaaaaagtggccatctgcaagcctaggaaagaggcctcataggaggccaaatcctgctgacaccttgatcttgagcttcctgactccagaactgagaatctctcttgtttaagccacctaatctgtggtattttgttatagcagctctagctatataccaaaaccattccaggtgccagttacagaggtgattaaggcaagcttctcctgaagaatggcttactggcatgaggttacattacagaccactgcaagaaatagaccccactcagcctctcatggctacttgatgagctttcacttgatatggcctggactggctgattaggttgtgcatgcaatggggctaattagaactagaactagactactgttcgcttccctcaaaacctcttttgttttgctctgttatcattttgttttgttctgttctgctttattttcagggagaaataatctcactgtcttcccaagaaaggataaatcttggcttttccgggcatggtggcacatgcatgtactcccagctactcgggaggctgaggcagaagaatcactagaacccaggaggcggaggttgcagtgagccgagattgtgccactgcactccagcctgggcaacagcagagaaactccatctcaaaaacaaacaaacaaaaaaaatattggcttttgacacccacccttcatatcacagtccgaccaaaccccaacccgttcattgtcagaactatccactcattgaatctagcatgattcattgcatccacagtaagaaatttgaggagggagattaaataaaatgcttaaatgagaagcacgtatgagatttttcagaaagctgactggagcattcacatattatcagattactacaataactgttgtataagatggtgccctgggtagcatttctgatgtcactggtttggaaggagtatatttgctttttttatagaaaatatcaatcagttttccctatcagttttgcatgaattttccttgctacaggaaacagtgatggactgctggtcagtgtgacttggaactttaaggctagacctttgaaattcaacagtttaggtccccattagtttgattttagagcaggagttaagaaatagtttgaagatgtatttttaccacacctcagctgtgagctccacaaaacagaaaggccattgctttataatttaaggctcacagagaaatatttcagggaagtagttataccatgaaatactttacaaatgttacattacagtttcatatgccaaatgaaatttgacattttcacctttgttccccttaaagagccaagtcatctcttttaatatgttgaatgtgtttagcagtgctgacattcgcaatagataacccagaccgtgaattattttacctgaaaataaagacaatttgcaggccttccttagaagaccggctattacactcaagaatgggctcaagagaatctacttctctagagaacttgaaaagccccatgggtctcaggggttttgctgccatcctgtccagggctaaaaggtcatatcctcagaaccagtcccatgattttgattgcaggtcttcatggactaatggtcctgaatcttacacagagcttaacaactgtatattagaccatattttcaacctgctcacatttcaaccatctgacctgacttcaaagggagaattattttatctagacaccatattgtgtgagtagtttttcaagtactaaaaatttgctttatcttcaaagcctgtgactatggcccttggctttgaggataatattggaagtggcttttcatgattgtactagaaccagagcaaatcttagatttattggcaattcatatatgaatccaaccattgggagaagtgtttatattcataaaatagcactctagaaaaaaaatgacaggaatattaaatgtggagacattagttaaaagatcagctgcttaccccgcacagtgtggttcagtgaaaatacagctgcatgccattttctgactgatgatgcaggaaatatgatgaccagccacgtccagcttgcaggccacttgaggtttcttcccacaatctgggagtggaagggggccacactgtctccacagcacataagccaacttctgtggctttccttcaaagcagcattccctgcttttaaatatcttgacgcaggttcaagtggagcacaggaactgctattcccgtagattctttctcccacagaatactgaaaactcatgaactcctgacttaaagtacctttcaggattttcagttatccttttgatgagtttctctgcagatattcttgaagtctcacggtgaagttttctatcagatctcattttctctcctcttgtgcacccttaatttacttatctgagttttgtaaattgtagggagaaaaagaagagctaaagtaaacttgttcatctcctaagttacttcttataactgttttaaatgcctgctttcatgtttctgacatgccatgctcttttgtctcataacaaatatttgaataactcatttcaaaacataacattgtcacctgagttttcaaaaacccttggtcagccaagctggcttttggttatttcctcacctgaccacgcctctgttccaacagggcactcatgagagaatctataacaaaacacttctttccttgactttatgaaatcacagcacaaaaacctaagaaaaaaatttaactgtggtagaatgatttatattcctttggatacatacccagtaataggacaaatgcatgatatgttcattgcagcactattcacaatagcaaagacatggaatctatctaaatgtccatcagtgacagattggataaagaaaatgtgacacacacacacacacacacacacaccatggaatactatgcaaccataaaaaaaatgagatcatgtcctttgcagggacatggatgaagctggaggccgttatccttagcaaactaacgcaggaacagaaaatcaaatattacatgttctcacttacaagtgggagctaaatgatgagaacacatggatgcatagaggggaacagcacacaccgggggctatgggagggtggagggtgggaggaaggagagatcaggaaaaataactattaaatactaggcttggtatctgggtgacaaaataatctgtacaacaaacccccatgacacaagtttacctatatgacaaacctgcacatggacccctgaacctaaaataaagttaaaactttttttaacttaaaagaagaattaatagtttcggagggctctcattctcatgtgatcagaaaaacacaaattgttccatatgctctgtttacaaagagtaagtccaagctagcaaagctttctaatcttcaaagatgatatgagagggcaggaataaacttgcactcaggcagaaccaagtagagtgatgtacccctggctgttgatcacaagacgagctactttccagtgaactgtatgagtcaggatgaagtcaccactcttctgccattttctaacttttcctttcagaaatggatttttttaagtccaggtttaaaatctagagcctcttgcaaaggttaggagatgtttgctcctattgctactccatggtgccttttcttgtgccaccgcagcctcccctagagtcaagccactcatgggtaaccaggtcttcttcttcagtcttgtattttgaagacttcattgtcatgtctccatcccttggcagccccgagtgttaaagtgattttctttctaactccacttcagtgtctctatctgtaccagactccaatcctatttttgactaggatcacttcttttctaaacccaaggactcacagccttctttaatttccatgtgtttccttgagctcagtaaagcagttgccacagatttaacgcctaaaatgacattttttccagtgaattagttataaccattaccatttgcttggtaaaaagagcccaggtctaggaattagacatgggtgcgaatcctgcctgctgtctgctggttggatagtactggacaaaccacctactttctcggagcctcagttgcaaacgtgaatgaaaacacagcatggcgagagtgcagatgaggaagtgaaatgatgcccgtgaaagcatccagttcagtaagaaccttaatttattttccttctagcagaaaagagttgcttatcctaaccccaaaaggtagtagagtagcttatttatatgaatttctctctgtgtctatttgtgaaaatcaacttgtttttggccagagatccttaacttaaaactttctattttgtgataatagactgggaagggtgagtgggggcagggggaagggtgaagagatgtggattaaagagtacaaacatgcagtaagatagagggagtaaattcaatgtttgataacagagtggcatgactatacttcataaaaatgtattgtgtttgggagatggacaccgtaaataccctgacttggtcactatgctttatatgcatgtaatggaatttctcatgttccccataaattcacacaagtaaaaaagtttttgttttgatgccagacatgtttcacaaataataaaatgcttagcttcaagtggcaagacatggctttaggaaaaggtgatttgaagcagaacacatataaacctaagggccctctgataatatttctgctgtgggctcttctttctcttgcataatgtaagccagcttctgaaatgagtagtcccaacaagtcccagggcaagagagagatgccaaagcaattacatttatggtaaattcagaaaaggaaaatgtgcacaagataggaagaaaatctctgcaggcataatttgaaggaaaggcactaggtggtctctgccagcagtcattggatgtgactagcatggagcaattagaggtggaatggatctgtttaagcaaaaatggtgtgatggctatgaggcaaagccttaaatagtgaaaaatcctataagaatcacaaaagcattcctagtatgttgcatttatatgctgcttttaatttctacaagcacttcacaatttttttatcagagtctcaaatgaattatgttagggcttatatgtaattctattctcaaatatccctatccccaaaatgtttattttaattctgcttttctcctgtatatatcattcccatcactatcaagcttcttgaaagagaaacttccatttgttgactctgttcaccttccatttttttctcagtcctcttggcaatctgtcttctaccttcattcatgaaaccacagaaactgtcctttgaaaggtctctggtgacttccttattgccaaatccaacagcctctccctaggcctcccctactggatccctctatgaaatttgacactgcagctcacccctcccaccttgaaactcttctcccaggcttctttatgatttcttcttattttctccttcttatttctagctacactttctttgctcactttcaaaaaaagtcattccctggagttcccccctcaatcttctcaaattcatttctattctttgcttgagtgagatcatgtacttctattatttcaattcttactcatacgtggttgcatcagtccaagtccagccagaagacagaaatcacaccagtaatttgaatagggacattttaatattaaaaaaaaaaaaaaaacgttggctggtaaaaggggtaaaagagggctctagggagtactgaagcagcaactccaaaaaacaataactatcattagggctgaggaatgtgagcaaggcaggaacttggaaacttagaagaactctccaacttttcccacgccaaggttgagattcaggcctcatttgatgtggtgtggctgtcatatacatgcagcttggtagtgataaagaaacttgcaggacatagcagctgctgcttatctctgagggccactcctgcgagggctgctctcttccaccccaccccacatgcccatttactggctatcacatggaaaaactgtgcatgcgtgcgcactcacacacacacacgaaaaaccttcctcctgctcagcccttccagtgtccttccagcaccctctattagcaaaattgtatccactgacaaaattgtatccactgacaaaggagaaatatctacagggtccatcttgagaatcacaaactaaggcaaaaaaggatttgaagttgaaaggcaaaatattagtagaatattagcaaaatattagtagaacagtagataagagcatatacccaaataggcatttcttaccctgacccatcttccaaatttcagacttctaggtgtctatatatagatgtcccagagacacctcaaactcagcatgccttctttattatactcatggaaacagttgtcaagagctgtaatttttatttaaaatgtctaaacacatatcttcttttgaatacatattatatatatatatatataatttggatatattatttggatacattctatcattagttcagattctcattgccaattagaactagtacccattatgacaattacataactctccacctgtctttctcataatcaccagaatttactgtctaaaacaagtttttgttctcaaaaacatttaatgatctttttgccaacagaacaaggtctaaatcccttatcttgatatttaagactcttcacaaaatggcaccaatacactgccccagtctcatttcttactacatcttgatactactgctactactactatgaaacattaacatctattgagcacataatatggtccatacactaaaacaaatatatgtataatctcatttaatactcacatcacatttatgaagcattatccttaattttaaggaaaaaaactgaggcaaaaataagttaagttaacttgcttaatgccatgcagccctactaaatggtgaaatcaaactctgggcagtctaacttcagaatatgtgcatttaaccactacattatatgtctcccgaaaaataaatgagagtagaaacacatttaacaaatgggtctaaagactcataaaaaaccacaaaatgttactgaaagaaattgcatatctaaataaatggaaaaacatcccatgttcatggatttaaaaacgtgttattgttaaatggtgatactacgcaaagtgatctacagattagatgcaatctatcaaaatctaaatggaatattttgtgaaaatagaaaaacccatcctaaaatttatatggaatctcaaaggaacctgaataatgaaaacaatcttgaacaagaaaaacaaagttggagaacccacatttcctaatttcaaaacttaatacaaagctacagtaatccaaaaaatgtgtggtacaggcataaagatagacatatagaccaagggaatccaatagattgccaagaaataagccctcacatgcaaagttaattgatttttgacaagggtgccaatatcactcaataaggaatggacagtctgttcaacaaatggtgctgggaaaactggatatccactactaatggattgaattatgtctccccaaaatttatatgttgaaatcctaatccttggtacctcagaatgtaaccttatttggaaatcaggttattgcagatgtaattaattaagatgagattattctgagtatggtgggccccaatccaatatgattggtgtcttcataaaaaggggaaatttggacaccagcacacacacaaacagaacatcaagtgaacataaaagcagaaaccagcatgatatgttaacaagccaaggaacatcaaagattgccacaaaccaccagaaactaggagagaagcatattatgtactctctttcacagccctcaggaggaaccaacctgcaaacaccttgatcttggtcttttagcctccaaaactgtcaggcaataaattgctgtagtttaatccacttggtttgtggtgctttccttcggaagccatttcaaactaatatatctacgtgcaaaaaaatgaggttgtaaaatttactttacactatacacaaaatttaattctaaatggacctaaacataagagctaaaactataaaactcagaataaaacataggggaaaatctccatggcattggaatgtcaatgatctcttaaatatgacactaaagcacaggcaacaaaagaaaacaaatagataaattggacttcatgaaagttaaaacttttgtgcatcaaaggcacaattgacagaatgaaaaggtaacccactgaataggataaaatatttacaagtcatatatctgataagggattaagatctagaatatatattttcaaaactccttaaacaaaaataaaaccacaaatgactcaattcagaaataggcaaagaacctgaataggcatttctccaaactatacaaatgctcaataaacaaatgaaaaggttttcaacatcattagtcattagggaaaagcaaatcaaaaccacaatgaaataccagtttacatccactaggatggctattacataaaccaaaaaaactacaagtgttggcaaaaatatgaagaaattggaaccattgtacattgcttgtgggaatgtaaaatggttcagctactgtggaaaacactttcatggttcctcaaaaagttaaacatagaattaccttaggacccagcaatttcattcctaggtgtatgggcaaaataattgaaaacaaggatgggaaagatatttacatgccagtgttcacagaagcattattcacagtagccaaaaagtagaaacaggccaggagcagtggctcacgcctgtaatcccagcactttgggaggcagaggtgggcagatcaagaggtcaggagatcgagaccatcctggccaacatggtgaaacgctgtctctactaaattaccaaaagttagccaggtgtggtggtgcacacctgtagtcccagctactcaggaggctgaggcagcggaatcacttgaacccaggaggtggagagtacagtgagccaagattgtgccactgcactccagcctggtgacagagtgagactccatctcaagaaaaagtaaataaaaaagtagaaacagtgcaagtatccatcaatagatgaatggatacaaatttggcatatttatatatgtatatatttatatatgtgtttattcatataaatatatatgaggtcgggcatggtggctcacacctgtaatcccagcactttgggaggccaaggtgggtggatcatgaggtcaggagatcgagaccatcctggctaataaggtgaaaccctgtctctactaaaaatacaaaaaaattagccaggcgtggtggtgcacacctgtggtcccagctacttgggaggctgaggcaggagaatcacttgaacccaggaggcggaggttgcagtgagccgagatcgggccactgcactccagcctgggggacagagtgagactccgtctcaaaaaaaaaaaaaaaaaaagaatattggccttaaaaggaaatgaagttccgatacatgctacaatgttaagttaaataagccagacacaaaatggcaaacacggtatggttccatttatatgaggtttacaaaatattatttatagtcagtagaatagacagtaccaggggttgggggagaaggggaagtagggagttattgcttaatgattaatagttgctgtttcgaattatgaaatattttagacatagatcttggtgatggttacacaacattttgaatgcacttaatgctattcaattgaacatttaaaatggttaaaataataaactttacattatgtatattttatcacaattttttaaaacagctcatgagaagatgtcaaagggctgggagactgggatggagaggaaaggagtgggacattcagtacctaggactagaatcagcagaaattgttcattcattgaggggtagggaggtgggtatgtttggtgtggcgctcaaattgccaaattgagatcttgggggattgtgtaagacacagtgaagattaaccagtgatacacactgaagaacaggcctgcaatgctgggccaaggcttgttcatctgcattctccttcgacttaagtgccgtgagcaatcccatgatacaatagaaatgtgatttggccatggcagcaccccatttaccatcacagacaattcagccaaaaaaattaacaaacaaataaatagtagctaacatttactgaccacttgcaacgtacaaacactgtgccaggcacttcgcatgcatctgtttaatcctcacaactgccctctgaggcatgatcgtcttcattttacaaaccttatgttgagccatgctatatcatgtgccattccctaaaaaatgctgtacactgtcaaacttcaatatccgtattcatttctgattcctaaggcaatagtgtccttctgtcattttactgtgtacattcaattctactcatcctccagggccccttccaatgtcatccatcctaccaagtgctccaagcccatctcacccagaacggtcatttcctcttcaggtctcacttagcatttagtctcttaagaagatgtcttcagagtaatgtctccctgatatatgtgggctccttgagaacagaagccagtttttcttagtctttgaatttctaactacaaagtgcctttcattcaaaatcactctcagaatgttgacttcctgtaaatggatgaattgagctttaaaaaggacaggaggctgaagagggaagatcgcttgagcccaggagttaaagactgtggcaagctgtgtgagctgtgaacacgccactgcagtctagcctgggcaacagagcaagaccctatctcttgaaaaaaaaaatgaggttatagggaacctcatttgtacctcctgagcagaacccagacctgcttagtctccatccagttctctttctgtgttaccctagtgtcttctgtctttccagctctgcaaataaatttgcattctaaaatcaactatagtccagaggttgggcagagtggctcacgcctataatcccagcactttgagaggccaaggcagcggatcatctgaggtcaggagttcaagaccagcctgcccaacatgatgaaaccgcatctctactaaaaatacaaaattagctgggagtagtggtgcatgattgtaatcccagctatttgggaggctgaggcaggaagattgcttgaacccaggaggtggagattgcagtgagccgagattgagccattgcactccagcctggggaacaagagtgaaactccatctaactaactaactaactaaataaataaataaataaaatcaactatagtccataaaagggagcatcttaatttttttgccacgttaaaaattcacagccagaaatattggaagtctcaagcctttcttccattcaggtcctctctgatgtcctcactagaccatcaggtgcacaaaggataggactggttcttttttaattttttgctgtatacctggtttccagcagagtgcctacgacatagcaggtacctagtaaatgttgaatgaggaatgaacccaccacttcttacttaaaagacctaaggctaccaggaggaattagcagaccatgctggctcatttgttaagctaaggctagtccctctctaacagccagttgaatcccctaccccacatctactaggctccttgacatttatgccacattccccttctcttgtacctctctgataaaaacctcctgtgttgggagctggggggccggtattaagctaagcctgacttcccttgcagacctaaagaactcctttactctctgccagaccttttcttgatccttgcccaaaaggagattatctcggtaattcctgtcacaaattatgattctccttttcctcatttttctccttcccacccattcctagccaagcactgcctcattttctaatcctgttaagtgtctctcaggattccgtgacacaattgcaatgctgtcaagccctgaaactgggcatcaaaggaataaggcctgaaaatgattgattctgccatagacatatttaatatcccgtgtcctaagtttgggcccatgtgtatgtgtgtgaactgcttcaccttcagccagaggtacagagcccatgttgaaaaaatatgaatcatcataagtgttcttgtctacatttaaaaaaaatatattattagcgtgaataaacaagtattagaatcagttctattagaattgtatccacttgtttattttaatggagttgagtttgtgagcaaaatgagagaatctgaacatgtgctggagagaagcaggtggacaggtaagaagagaagcaagtgggaatggctggatactaatcttgaggaagagctggatattaatctcatatccagctgcctaccttatcctatagtgaactcacagcatttcctctctggcacaactttttgctggaatttacacagatgtagacaattatgcctttgaaacctgaaatttggcttccaaagcagtttatcccattgtctacacagatgccacttgagtgagaatttagaaaattcaagagtctagaaaatggtatcctccatccctgccagaggccttttgagctcataacatttaaaaacaaaacaaggcactccaataggctttggtgcatatccacaggcagatttggcagacttgtcactcagtgttcctggcttgggtatgtttttttctcccccacatcctccttttccaggagcagagctgctccacatgtgagttcaaatgccagccgacataggagagtaagcttctcccctgggacccactggccatgaacctgcaagcagctgctttttcttcccaaatgtgttcagagctcctggactcaagtagagagaaaaatagtgccttgaagttgtcttcagtataaactgatactggttctctaagaagagtgtgtctgtgagttaaatggcccaagaatgaaaagaaaggcctgctcagagttctgtcaggtagctttcaggttatagacagctttagaaaaccaacacgctgcactcagataaggagatcaaataggagatttacagagtgtgccaggctcaagacagcaatagcaaaatctacctttgaccttctgggtgtttctatttcactagagaaactccatcacacatcaggaaattgattttacaaaacgtgtattttaagcttggcttcacaaattctagagagaagttcctccctggtacttatttcaaggaaggtgtagtaaaggtaaaagaaatgagagcaaatcaggtgccttctgacaaccagccaagttcattccctgtctttctagatctcctacactgagagaaggaatgcaactagttcccaaggggtcagggcaggcattttccctaattcagggttcaaatctggagtcgatgggttccaggaaaaccaacttgaaagtgcttggacatatccacttatagttttgtttgtttgtttcaaaaatgtccaccactttccttggattctcagagaaatctgtaggcaaaaccaggttaagaactgttcccctgtactctgcattatttcacattaccttgtcatcagggacagagatcctgaaagcagagccccagcagtagcagatgaagccaacctgttgcctaagtccctattgaataaggagattagtacccaccacattgattccctcctgactggcatccccaacctctactcctagaataaatgaaatatgaactactctttccaccaccaccattctgtcccagcattatttattcctttcatgatactccgtatatttcataaaaacctcctctctgcctcattgcccaccccagcaggaacaggcccaggtgggtattcttctgttgcagagactcctttccttatctactcatccaggcaaaagaaccttggttaaatcatcagttgggcccatcctggttttgtttccattcttataaggacctgaaggtattatcataatccaggactatataagggcttaaaaaggattaagatcattgactttctgtaagcatacacacctaaatagcaaactatcaagaatatccatctctgctacaggctgtgcttctgacactatcaggaagattggcgaaaccttcaagcaggaagatatgatggaagggccaggcgtggtggctcacacctgtaatcccaacactttgggaggccgaggcaggtggatcaagtgaggtcgggagttcaagaccagcctggccaacatggtgaaaccccatctctataaaaataccaaaattagcttggcgtggtggcacacgcctgtaatcccagctattcaggaggctgaggtaggataattgcttgaacctgggaggtggaggttgcagtgagccgagattgcgccactgcactccagcctgggtgacagagtgaaacttggtctcaaaaaaaaaaacaagatatgacaaaaggacatgtctctgcccagactctacttctgttgctgtttcagcttttgacactttttatcaccactcttttcccacctctaagtattgagttccttatatcagtgctaacataattgtaaagaattatccttttttccactctgcaaattttcaaaggtcaggctttatgtagagaatctttatccattacagtatttcagcaataacactgtctttcctattttgctaatactctagagtgacatttaatttatcatccaaaagcaatgctaaactatgacaataggtgtagaccaagaccattgtagccaaactgaagccaaaggtcaccatgttccgcacagaaccatgcagggctaagtggttcactcgcctccatcacatcctataactgcaacatccgcctcatattggatctctctcccgctagcatgatagtggtagaaggtgctttgaagcaggaagataataaattccaaattaagcactatctgaaaagaaaagtctcccattttactgaagtcataaactctaggctactgcctatgttgcattatcaacacattctttgccccaaccagctgcagtttggctgtttaaccatcccatgttctttagcatgtcgagtagaccatgttttaaccataataggcctgttgcctgatgtgtacagcaagtcaatacaccaagatatgaggttgcagcagagaaagagtttaattatagggccgctaaatgaggagacgggaggaaacctcaaatctgtctccccaaggagtttggggctaggatttttaagggttttggagtaggctgaagttaggaaatcattgattggtcacagagagcagcataaggtcatgggacagggagatgaagaaacaatattctcatgttgatccatttcctctgtgagggtctttaaactggctgcagtcagctgttccactggaattcaatatctgcttaagcaattcttaagcaaaaaccttatgattctaacatcagaaatcctatgtataggaacaatggagatgcaaatagtcagtgtctagtgctacagactttcagttacaaggaagtgggtcaaagtacagactgattaatattgaattataactatatttctttccagaattcttgttaagcctgtgaagatggcttcaatgttacatttaattccttgatttttctccataaattgcatacaaattcaaggtctcattcaatatgcatgtaaccaaaaagataatctatgtcttacttaatctacaccatggttgttaggagccaatgataaaatacgacatagccccacactcaaaattctttcttctttccacagatccgaaatgtggcagcaaatctctgtgtggacagcaagcatggagccaccggaacagagctgaggctggacatctgtgtcaaggatggttctgaaagaacatggtctcatgaacaggtgagtcacctcccagaagccagggcagtgggaaccagtcgggggctgatgcagacacagagggatgcagctggaacaaatctccgaatggtgcagatggtacttgtgggacctggagtgaggccgctgtatcaccaaccagctctgcagttcagtgaatcacttaatgtctctgtttatgtttcttctcagagcagttgtgatgatcagttcagataatgtacacaattatcctctaaatatgagaaaggatgggagaaatgtggattgcgaccctagtcttacttcttttcccagaatggtagtttaacagaggaagcctgtagagtgctttggaacacttccaactaaatttcatggttttaatgactctgctgttctgtgtttgtgatgtcatcttaaacttgcttttcccctgaccatgaacagatcactttacatgggcctcctgttgttgtagtagtttttaatcttacatgtgaaggatgtaagcaacagcaccccaacatggacttcaggaaatactttaaggctatgtattgcttttattgatttttgttttgtttgcttttttctatttttgggggcacatagtaggtgtatatatggggtacatgaaatgttttgatacagtcatgcaatgcataacaatcacatcatgtaaaatggtgtccatcccctcaagcatttatcctttgtgttacaaacaatccaattatattattttacttattttgaaatgtacaattaacttattattgactatagtcaccgtgttgtgctatcaaatactaggtctttttcattctttctattttttgtacccatttagcatccccacctcccactccccacctcacaccctcccactacccttgccagcctctggtaaccatccttctactatcatctccatgggttcaattgttttgatttttagatcccacaaataagtgaaaatatgcaatgtttgtctttccatacctggcttatttcacttaacataatgacctccagttccatccatgttgttgcaaatgacaggatctcgttcttctttatggctgaatagtactccattatgcataggtaccacattttctttattcattcatctattgatggacacttaggttgcctccaaattttggccattgtgaacagtgctgcatcaaacatgggagtgcaggtgtctcctcgatatactgatttcctttcttttgggtatacacccagcagtggtattgctggatcacatgatagctcaatttttagtgtgttttttttgttgttttttttgttttgttttgttttgtttttaaacggagtctcgctctgtcaccaggctggagtgcagtggcgcaatctcggctcactacaacctccgactccctggttcaaacgattctccttcctcagcctcccgagaagctgggattacaggcacacaccaccatgcccagctaatttttgtatttttttttttttttttagtagagacaggggttcaccatgttggccagaatggtctcgatctcctgacctcatgatctgcccaccttggcctcccaaagtgctgggattacaggcataagccaccacgcccagccaatttttagttttttgaggaacctccaaactgttctccatagtacctgtactaagttacattcctgccaacaatgtaaaagttttcccatttctccgtatcctcaacagcatttgttattgcctatcttttggataaaagccatttcaactggggtgagatgataactcattgtagttttgatctgcatttctttgatgatcgataatcttgggcatcttttcatatgccagtttgccatttgtatgtcttcttttgagaaatatctattaaaatcttctgccaatttttaatcaaattattaggttttttacatagagttgtttgagctccttatctattacagttattaatcccttgtcagatgggtattttgcaaatattttctcccattctgtgggttgtctcttcactgtgttgattgtttcctttgccgtgcagaagctttttagtttgatgtgatccaatttgtctatttttgctttggctgcctgtgcttggggggtattactcaagacattttgcccagaccaatgtcctggagagtttcctcaatgttttcttgtagtagttgtatagtttgaggtcttagatttaagtctttaatccattttaatttgatttttgtacatgacaagagatggggtcaatctactctccagagtagctgggattacaggcttctgcatgtggatatccagttttcccagcaccatttattaaagagactgtcttttccccagtgtacgttcttggtacctttgtcaaaaatgagttgactgtaggtgtgtggatttgtttttgggttctctattctgttctgtgtaagacttaattgcttttaattgaaaaacatttcattgcaactcagtttaagtgagatgtgatttctaaccctcttagaaatttgaaagtccttgcaagcagcttccctgatactgtgtcacctgtgaaagggaaaagatagtgggcaaaattgcctttgctctcttttagcgttttcgtttcttgtattttagagatggggtcttgctctgtcacccaggctggagtgcagtgatgtgatcaaagctcactgcagcctcaaactcctgggctcaagcgatcctcttgcctcagcagcctgagtagctcagaccacaggtgcataccaccaagctcacctaacccttttcactgttttaattttaaattaagaaatatttcaatagaaagctatagaaaatatcatagcagatatttatgtactcatcacactcatctcttatgaaaagcaaaaaagcaagcaagcagttcccagtaaggcgttactgcctcctatagccagattcctctggtgcccatcttgtacattaaactagaaaaggtccaccatgcccagcgcaggatgttaaagagttgtccagatgtgttgagattcacctccctcgccccacctcactgcccctccctgccctctaccacgcattacaatgcagagcatcatgatgcgaggaaaacagccacagaacaagtccacaatacaatccagagatgttcagtccatcaacagtgcctctcccctaaccactgatccaatctttgaaccctctccccacagcctcatggtattctaggaggactgtgggccttgtagccaggccaacctggattttagtttaaaccatgtggccttgtgaagttgtgaaatctttctaggccatagttcttccatcttggacagggtggttaggagaataaatcttggggcagcatcttgcacatgcagcaggtgcagagtaatatcctctccctcctgccttccttctctcaaacactcacaaatccctttatgctaataccaaattagaaacctctctcaggtccaaggcagctgggactttggcttcatttatctgttcccagcatagtcagcaaatactagttattattcactcaaatgcgccctgcatggctgggcacggtgactcgcgcctataatcccagcactttgggaggctgaggcgggtggctcacttgaggtcaggagttcgagaccagcctggctaacattttgaaaccccgtctctactaaaaatacaaaaatcagccaggcgtggtggctgattatatacatatatccagaggggtttatagaaggctctgtgactcccagatttattgataggaatcaaatatcagtgaaaagttatttgcctcctccttcctctgtctgtttctataagctccatggggatgttactggggacctgaggaatggtgttggactgttaactccaacaagcaattctgacttcagcctgggagcaagagagaaggctttagaagctatcggtaaggctggcatctagagtggaaaagaacttttttaaaaagaaaaaggaggaaaccataaggaaaagcttcatttcttgggctaaattcctctctaccatctctattcaacccaactaagaaacacacatggccagctggtgaatataaagcaggccttaatgtctgaactgggcttagtatttctatccagtaatgctctagaatgaaatcttctctggcctgcagattttatttgacagcggaacatggatataaacaaaggcaacgatattgcatacactttaaaaattgctggttcactccccgcaccccccacgtcccccaactccccacctcccacccccaggctaaaatgcaaaaatctatggcccgtaattcaagaaatggtcaccagagggcagcactagacaagcagaaaactacataggcagaacagaaagaccagttaatacagctctttaaaaagatttcctgtctctagagatcctaaaaatgaagctacagtaggattaaataaggttgataagtggtggaaaatgcatcatgtttgaaatattgccatatattgacttggaggttaaaacattacaagctgtttcattcaccagtaattaactgtaagctttattcaatatatcactcagtgacttacaagaattaggaagcactcttctacatttagattaaaattcctgcatgaggaaggcatatcggaacatgacaattatggattttctttttaattcaaaaacattcaaaaaacacaaaaggagacttattagagttgaaataatccgtttttttccaaaaaaaaaagtggcaaaaattaaaaaaaggaaaaaacaaaattgttacatgggaaataaaaaagagtccattgaaggacctgtataagaaaatgccttctgctgcagaacactggtggtgactaacgtggtttctgtgaaggaagcaaatgtatgattcattttgccagggcaatctgcatagctgtttgatatcatggtagcattatgcttcctttagggatcaagaaagaaaaacaaaaatagatcctaataagactataaggtctggaaagaacattccccagctcccattgagtccaagggagaggagtggcggggaggaacccccttggtctagtttggctgttcccactctgcaggcccagcagcaggctctgatgtcatgctggggagcaagtgttgcagcccagctttcgtcctcccgaggaagcaaacactggctccctctccagggcctaggggaaggttcacaaagacagaagcaagcaaatgtgtgcatccaggggacagatttttttcctttcttttttctctctttgggaaaaaagagtctcattatcaagacagagcgaactgatgggtgcaaactgcaaggagaaacatgctgtatctcaggtttctgcaaacctcataacaatgaaataaaacatcacaatccagacagagaaaaatattttctgctgtctcaagtcaggtagcaagagcaagagataagtgtattggcagtaccaaatccagtgaccttattcatataatacaaacggacccaggcaacatgacacatatcacattaatattaaagcaaagaaataagagttaacattgtgatatggtttggctgtgtccccaaatctcatcttgaattgtagttcgcataatccccatgtgtcatgggagggacccagtgggaggtaatttaatcatgagggcagttaccttcatgctgttttcctgatagtgactgagttctcataagatctgatggttctataaggcgcttttcccccttttgtttggcactgctccttgctgccgccatgtgacgatggatgtgtttgcttcctcttctgccatgattgtaagtttcctgaggccttcccagccatgctgaaatgtgaatgaattaaacatctctcatttataatttactcagtctcaggtatgtctttattagcagcatgagaacagactaatacagtaaattgatactggtagggtagggtgctgctataaggatacctgaaaatgtggcagcaactgtggaactgggtaacagacagaggttggaacagtttggagggctcagaagaagaaaggaaaatgtgagaaagtttggaacttgctagagatttggagggctcagaagacaggaaaatgcaggaaagtttggaacttcctagagacttgttaaattactttgaccaaaatgctgataatgataaggacaatgaagtccaggctgaggtggtctcagatggagatgaagaacttgttgggaactggagtaaaagtcactcttgttatgcaaagagactggtggcattttgcccctgccctagagatctgtggaactttgaacttgagagtgatgatttagggtatgtggcagaagaaatctctaagtagcaaagcattcaggaggaagcagagcacaaaatttggaaaatttgcagcctaacgatgagatagaaaaaaaaatttctggagataaattccagcctgctacagaaatttgcataattaatgagcagccaaatgttaatcaccaagacaatagggaatatgtctccagagcaaatcacagaccttcacagcagcccctcccatcacagacccagaggtctaggagtcaaaaatggtttcttgggccaggcccagggccccctgctctgtgtggcctcaggacacggtgccgtgtcccagctgcttcagctccagcatggctaaaaggtgccaaggtacagctcaggccattgattcagagggtgcaagccccaagccttagcaccttccatgtagtgttgggcctgcaggtgcacagaagtcaataattaagcttggggaacctccacctagatttcagaggatgtatggaaatgcctggctgtccgggcagaggtgtgctatagtggtgggatcctcttggagaacctctgctagggtagtgcagaagggaaatgtggggttggagcccctacacagagtccccactggggcactacctagtggatctgggagaagagggccaccatcctccagaccccagtatggtagacccactgacagcttgcaccatgcacctgaaaaagccacaggcactcaatgccagcctgcgaaagcagctgggagggggctgaaacctgtaaagccacaggggcagagctgtccaaggccatggaagcccacttcttgcatcagcataacctggatgtgagacatggagtcaaaggagatcattttggaactttaaggtttaatgactgccccactggattttggacttgcatggggcctttagtccctatgttttggccaatttctcccatatggaatggctgtgtttacccaatgcctgtacccacattgtatctaggaataaccaacttgcatttgattttacaggctcataggcggagggtacttgccttgtctcagatgagactttggacttagacttttgagttaatgttggaatgagttaagactttgggggactattggaagggcatgattgtgttttgaaatgtgaggacatgagatttggaaggggccaggggcagaatgatatggtttggctgtgtctccacccaaatctcatcttgaattgtagttcccataatccccacatgttgtgggagggacccagtgggaggtaatttgatcatgggggtggttaccctcatgttgttctcatgacagtgagtgagttctcatgagatctgatggctttataaggggcttttcccccttttgcttggcactgctccttgctgtcaccatgtgaaggaggatgtgtttgctttatcttctaccatgattgtaagtttcctgaggcctccccagccatgctgagctgtgagtcaattaaacctctttcttttataaattacccagtcttgggtatgtctttattagcagcatgagaatggactaatatacattgtaaatctatgttttaaaggatcattcaaaagaagaaagcagagaaattaacatcaacttactttaacactgaggaatttaaggttgaaaagaaatcaagggttattgtacaggaaacctgaagaaaatctacattcttctgtcaataagagcaggccaagggtgaagacaaactataaatgtcacaatgacattacccaaagcaaacaatgaatataattcaatgaatataatttcataatgtctgtttctgctttgacaagcttgcagacaggaaaatgtgccaatgaaaagactcaatgcctgattggtttgacatggccactgagataagataaatggcaataagaagtatttcaaagacctaagagagaaaaaaatgagctaatcgtaggtgtagaagaataaagtaattgatataatctgaagatgtatcaccttggatgcaggaaagtaatcaacaggtaataataataatacataaaacactgtgaaaatgacaagctaaccatcaggctacaaatgtaagcatgatcatggcactacaatacgcagaaacaagaaacagaggtcacctaaggatgccctcagatataattgtgacaataggtgaataaagttgcccaacagacagatttgccagtgtttgctgtaacacaggtattcttttggacttaactgatgcatttagtaaaatgtatgaaaaggccatctaccaaagaagggaggacttttgaggtgtgacagaagcaagacactcattttctgcaggcctgattttccctaactgactcatgagggactgtactaggtagtgattacattccctttaagctctggccttctgagtgtataaaaaccaaagacagagagatggagacagagagggaaataaatcaatcaagaccacttgttcctgcattggttggactgcctatagtacaagggaaatgtgctatttaaataaaataaagatttaatcaaagccaatggcaggtttattcgccaggaaatttctattaatttctattccaatgataggtaactgaatccagagtcatcaaagttgaaaattcaaaatataagcattatcatttgctattgttgtaattaaacagcacaaactcatttgagagactaaaaagagattcattaattttgatagttaacatataataacagataattgtgggttttatttattcaatagaaatttaattgaggatctattgtgtgtcataaattgttctgggtgctggaaacacaaaggtaaaaatgctccaagccctgcaactaaggatctcactgtctagggagggatagagaaacataagtggacaatcatgatgaaataggtaagggatggaaaggagtaagcagttcaaagaggatggcttcctggatgagtggacacttgaactgaatcttacatgacagatgagcattacctaggttggctagtgaatgtctgttttccaaccagagggatttacgtgaacacggcacagaaggaaatacacagcctggtttgtgtgagaactacagaggttttagcattgctggaacataaacttgaaggaaaggaatgtaggtggaaagaacagcaaaggccagattgtggagcgttcctaagaggtcaaagagtttgaactttattctctaggggttatgtgaaaaggttgtgagattttagattgagagggaacaaggccacacaggcctttccaacagacttccttggaggctgaggaaggcagatgtgtggtaaccaaaaaagccagtttggagatcattgcaagagctattgagagcaatggttgtgggcatagaagggaatgaacaaattccagaaatgtttataaaacaaaaatggtaagacttggtcattgattagatgaggatggtaagggagacaaaggagttaaagactccaaggttgataaagtgcatgacatgaccaccaattaaaccaaaatagaggggcaggaacaaggcagaagagaagaaaatcaattgcatttagaacatgctggatctgagatgtccatgggacatgcagctgggaaattctgcaaggaactggacataagatggatgatgagtgaccggcatactggtgagagttgaaatgagagtgtaaaagaccaaccaggggaggtgcaaggacagggtccaagagagaaccctgagcaacacctgcagtggagagatgcatgaaagagagggtggtgagacagttataggacaacagaggtgcacagtgcttcaaaatccaagagagcagtgagttctgaatagaagagagtgatcaaaatctgaatagacatttccttgagaagccattcttctctgcaggatttaaatgaatctaaaaatgtctcagtccacaattatactttaaaaactctaggaaaaaagactacacaattcatcttcatgaatttatttcaaatgtctattctaaaaaccccttgttcttctatatgaaatcttctcttttatcctgtcttccagggtaacagagtacgcagtggccatgattgagaaggtcgctgttcacatgctcgtttaggtcatttcttgagaccacttaacccagttctttgtatttgtcttcagattcctcaccacttaactatctttgttagccatccctggaattttgccaggttctctacatttcctttcctaggtggaacctaacagctgaaatatactgagggcctggtcagtgcatagtgtattatctgcatacagctcagcattgtgctttcttttatatccacagggtttccctgacagctcttttttattttgcaattcacagtttggcttcacacagccagcctgccgtaagtcctattgtaagaattacataaccttcctgggattttagaattgggagcaatcacagggctcatctagtccattttcacacttaaggatttctcctactgtacctttcaaatacccttatttgttgtacagttcaaataactcaagcaaatgctcttcccctacaggtgtgtggcttgtttgcttgttaatacattgtaaagccaacttagtgcataagtcacatttttaatataatagaatgggatggatataatagaatggtataatatgatagaatgggataatataatagaatgggatacataatagaattggagaggctggactaggataggaatgtgttggatggaatatcagagtcaattaaactcagtaaaggtaaatatcatttcatgaaacttctgtttctattggaatcaagggaggtctctgtgtgtgtgtgcatgagctgcatttcttactgtgagttacagtctaaaactttctacattgccctgcagaattactcttaccaaccctagggaaattaattggcccattcttcacttcatcaagcttagctttcctttacattaggtttttcaaggtgctagcatcaattcggctcatctctactctttgtctctttagctaatctgcaaatttgggcaaactgtgtaggatttgttccagtaacattttagctaaataaagaccgtagagtgttattaaggactttctggccaggcacagtggctcatgcctgtaatcccagcactttgggaagccaaggcgggcaaatcacctgaggtcaggagtttgagactagcctagccaacatggtgaaaccccgtctctactaaaaatacaaaaattagccaggcgtggtggcgtgcgcctgtaatcccagctactcgggaggctgaggcaggagaatcgcttgaacctgggaggtggaggatgcagtgagccgagatcgcaccactgcactccagcctgggagacagggtgagactctgtctgaaaacaaacaaacaaaaaaagactttatttctctctctgaccctcatccctctcccctctgtctttcctccctctgtcctcttactcgttctccttcaatctccttcttccatgcccctccctgcatctctttttctaccatcctctgtattttctctggtacctgattggaaactcttcatttgtgttttttggcagcctggaccaaaagtgcagctgttactgctacagcactttatgacacgtgccttttccaacacctctgttaggctgagacttagctctttttggcagatcacaaagcaggagttctacattgctaaaagacataccttcccccgcccttgcatcttctctccaaaacaaactcactgcagcttttctgctactgttgctttgctagctttttacctttggatggagagaagatattcgacccggtgagccactgcatacccggaaattctgctttgatgcgatctcacacaacagccccgttacactctatgactgtcatggcatgaaggggaaccagctctggggataccggaaggtaagagtcagtccactgtggtcattctcaaattactgtggtttaagttattcttactcagttttctttgaaaacacaccgttttaggcctggcgcagtcactcacacctgtaatcctggcactctgggaggtcgaggtgggcagatcacctgaggttggagtttgagaccagcctgaccaacatagcgaaaccccatctctactgaaaatacaaaaaaaagtcaggcgtagtgatgggtgcctgtaatcccagctactcaggaggctgaggcaggagaatcactttgagcatgggagggggagattgcagtgagccaagatcgtgccactacactccagcctgggtgacagggcaagactctgttaagaaaagaaagagagagagagaaaaggaaggaaggaaagaaggaaggaaggaaggaaggaaggaaggaaggaaggaaggaaggaaggaaggaaggaaagaaggaaggaaggaaggaaagaaggaaggaaggaaggaaagaaggaaggaaaagagagagagaaggcaggaaggcaggaagggagagagggagggagggaggaaggaaggaaggaaggaaggaaggaaggaaggaagttttgaaagttttacctagtcatacatacacatatttggctcacacatctggagatcaccagcaaaggtgaagggaaaaatcgtgtgtgtagaaaggggcaagcttttggcttcgcttgttatatgtgtggccatcacaatcagttatgattgaaaaatggctttgagccagaacaagggatgggtctaggtttaactcagaacactcccaaaaggaggaaccacatatccaataagcaaaaccacgcatacataatttttaacatcaccattcacaacacacatacacacagattgtggcatccattcattttttatgtatctcaggctcacttgcttgggacctgtctgggttaagacaatgatgtttacacaaatatttatacatctatgtagatataattgctgcaatccttatacaaaaagtgacccatttacattttcaccaaaatcctgcccaaatgtagcaaagaagaatttacttggggaatttaaaagtttcaaaaattataaagttaacagtgaatggtaggaaaaattcaaaaacatatataaagtcacattttattgagttaataaaataaagagcaattaagttattgtttgaaaatatttttattgtttccttttgacaactttttagaatactttacaaaattgcttttcaaattctttgcttttggggatagaacttggctgtcaattagcaattactccataagctccattctgccctctcaaatccatggacctgctggggccttctcagccagggataagatgccttctgtttgctttttcacactctgaggccagccttgcctcaggctataaggaaaatggaatatcccccactttattcatgaacttggccatcctgtggctgaggcaaggtcagtgtccccccaaattacagaaagctaaaggagagaagtggtggagagtcagtgtggggagagggaggactggttatgttacttgttgccttacttaataagcattctggtttccacctcttagagatgagctcctaaaactatactcatccaaaggtggacttgtttgtataagtttattctgcatcccacccccacccaaacacctggcaggttgtggctgtgtctagcaaaattacaaaacatcagttgagccgagcacagtagctcacgcttgtcatcccaacactttgggaggagaggcgggcagatcacctgaggtcaggagttcaagacaagcctggccaacatggtgaaaccccatctggactaaaaaatacaaaattagccaggcatgttggtgcatgcctatagtcccagctactcgggaggctgaggcaggagaattgcctgatcctgggaggcagaagttgcagtgagccaagatcacaccattgcactgcactccagcctgggcgacaagagcgaaactccatcccaaaaaaagcaaaaaaaaatcagttgttatatccttctacaaaacaatctagaatgaaaggagctcagaagatggtatctgattaaaaatgaagctgggggaatatcactgcaatagtaaaacctcgccgttttctttatgaaatgtataataaatgattcatcttatcaaactattttgctattcaacatgatacagcctgtgtgtggtgcaataaagtaaggttttttttaatgattatattctgacatctaaagagttactttctgcgcacatcgataaaatagctgactggccatttgcttagtatgttagtggttcctaatgaacagaacatttcttattactgtacatttatagcatgacacaccaaccactcaataatatgcaattaagccaagaaaatgcaattgtttttattagggagcttacaaaagtttacagatggataagaacaactaatacacagagctcctggggagaaaaaaaactggctgcagtggtttcaaggggaaactcttatgagctttaatattaaacctttccaggatcctaagggatttgtgaaaggaaaccactagattcaattgtgctgtggctctcttctcagctttttgtagctgttggtattgcattacttagcaaaaggttacactccatgtgtatttatatagcaagcaaggtatttatacttaatcaggaacatgcaaaggctcaaaatggaaagtttctgaaatatcacatcttggtggatgactcaggcctattcagacacacctgttttagaaaattcctcttgttttttccaagggctatgcctaaggcataaagagaaaaagcacaaagagaaatctctctggtgtgttaccttatctatttggatgcagtacttggctctgggggcttctggcagttttagatgtttttgtttgttttttgagacggagttttgctcttgttgcccaggctggggtcaatggcgtgatctcggctcactgcaacctcctttcccaggttcaggcgattctcctgcctcagcctcccaagtagccaggaccacaggcatgaccaccatgcccagataattttgtatttttagtagagacagggtttcaccatgttgaccacgctggtctcgaactcctgacctcaggggatccgcccaccttagccacccaaaatgctgggattacaggcacaagccaccgtgcccagcctggaactcccactttttataagtgccatgctcttaaggaataagatcaatatttcctaggagagttccccaatgccttggattcagtgtcactgataccagccaacccctccctcccagctacatggagatatcttggagagagaaggtggccagaagccaccttgcttgggtggatgaaagttgttttcggaccttgcttcctggtttcagcaactctcattccgcttttagttatttttagatgtggctctttgccaccacaaaaggagaaaagcatccttattctatgatgctggggctatgttcagttgaacagctgtttcctacaataacaggcacccaggaagaggaatcctgttcctggttttcttttaccaccagggggacccctgttacaagaacagtgaattgttgaggcaacctcagtaaaaatatttgtcctcacccagcatcaaacaggaaactgtctttcctcttcttcaatccccattggtcactaagatttgtcacccacttccatccccagtcattggtcactaagacttgtcacctgcccccatcagccaataactctgaaatccacccgctctttgccatttctatagccagcccctgcctggttcagtcttcacatcttacccctgggttattgcaatggcttcctaaagggctgccctgcttcctgtctttccccttccccttccccatcttccaccctgaagccagagggagatttcacaaaacctggtcatggtattcctctgtttcatgacttcatttggtttctcattgagtagaagatagagtgctttagcctctcaatactcatctggatccttcacaacctggccaacataacagccgaccatcagcccttagagttattcaggcttaatacaccccaattcatcctgaaattgtaaggggatcttgaatagttgttttgcttttatgactttcaagtgcttcaccaacataataatgataataactgagtgagataaactatggaaaacttctagcacagtttctgatcataagatttccatctgtgttggtgacaatgcactttttacactgatcatcatggcaaggtatatcctaatataccacatcattaaagcaatctctcctaggcaatattgacagttgttatccctccaaaattgagcgctatctcccatgcccttttcattttaagtaaacattttattagattatagcatatgtcttaatttgggtttccccatatatacaacctaaagtaagaattttaatgcacatggtttatttgggatatagccccaaaaattcttgacagggagtgaggaagtgaaatggaggagatatcagagccaataaagggtgcattatcaagcaagtaccaccgcaggcaattagaactcaatcctactgaagatctctggaaatggtatatagaacacacatcagggagtcaattttttggtcaggttcctgaccaaagattgactggaatggtgtataaataccccaactcccttgatacctctggcctgctgctcttacagacagaaccattcttaaggccggagaaagtccttaagcagagagatgcagtgacatccgggccagcatgcactgaaatggaaaggcctgaagggccatgctcagggtacaggcactgccaagaatccaggtgctctgcatcctcaccaacacttggtattgtcagtttctttttcttttttattctgtgattgtaaagtgatatgtttgttagccattttggatatcttatttgtgcagcacctacttgagtcttttgcccattttcaaaacatgggctgtctggctttttcacacagatttttagggattttttctatatataagtgcctcattggatgtatgcattgcaatatcttattcttgttggtgtcttgtcttttttctgtttagtggagtgtcttaatgaaagctattatttatgattcgtgggttttgtgttctgtttaggaaatcctggccttcatgtagttagtcttccaagtcatctttggaaattttattgcttaatgttctacatttcggtttataattccctgatatatctgtatatctatatagatatatataattttttgagacggactttcgctctgtcagccaagctggagtgcagtggtgtgatcttggctcccagcaatctccacctcccgggttcaagcgagactccttcctcagcctccccaagtagctaggattacaggcacatgccacccagctactttttgtatttttagtagagacggggtttcaccacgttggccaggctggtctcgaactcctgacctcatgatcccgcccacctctacctcccaatgtgctgggattacaggcgtgagccaccgcgcccagccctccctgaaatatttttatgtgtataatgtaagataagggttgattcatatacagagatagaaatagatatagatatatattgatagagacatgctattgatcaatcaccatttatttaaaagaccattttttcccactgcactgaagtgacgcttttattgtaagtcaagaggtcttatatacactggtccattgttaaatcctcaagtttttaccatgtaactaaatagtcttagccatacagaaagtaagctaataaaataaactaaattaatctaataggaagtatagccaaaaacccacaactaccatcactcttagtggtgaaatgttaaagctctcctccagagatggggaataaaatagaatgttgactataatcatgtttttcaaccttttataggatatctaatcagtgtaatcaggcaagatatagacctttaaaggaataagaattggaaaggaagaaataaaacagtccattcgtagatgtcatgttagggtatttagaaaatccaaaagattatgcagctgaagtattttaaaaatgaatagatacaattagcataggcccaagatgaaaatgaattgtttatatactagcaacaaaaaatagaaaatgaagtttaaaagtgattccatttggtcactgtgaaaagcacaaaataggaataaatcacggcaaagatgtgaaagacttttatgcagaaaactacaaagcatcactaagaaaaatcttaaaaactatagagggatccatcatgttcaaggattatgtctcaatattgtgaagatgtcagtttttaaatgatccaaacatttaatgcaaaaccaaacaaatctcaggaggcttatttgtggaaattgataacctgattccaaaatttacatggaaaatgtaagggacaagaatagctaagaaaatcttgaagaaggaaaaaaaagtactaaaacattataaaagcaccaggtatcaaaacattacaaaggtgtattattaaggcaatgtactcgcctgaggatagactgactgaggctctctagaaggtgaagcctgggtattgatattctttgaaaggtcccgagagattctaatagacagtcagatggagaatcacttttgtagctctaatttttactttctttctttaatctactcctcccttttgctctagttggaatttccccctctttctgtactcctatagcattttgtttccttctttctacttaaaacactgtatattatacatacttagccccctcacccccgccaactacctgagggcaagaactttttaaaaaatgtctatatggcctgcctaatacctaatatatgaagttcctaaataagcattcattgactggcttaaagaaccactagttcaattattgatatgagccctgccttcataaaccccaacctgtgctggataaaacttaacacatttatttgtctcaaaactacatatgcaacctcccaacgaccaaaaataaaagatttaaaattactttctttagttgctctctgggggttcttataatttaactttcataataaaggacttgcaaatagcatcaaacaggaagtacaggtaagaaggcacctgccaggctaaattgataacagtgtaaccattccattcatttaaaaagtgagtgggtggaatttttggcatctgcctacatttgactatttgttgttaacttatgatatatgccaggttttggcctctcagttcataaaatgaggatgtaccagtccacaaagatgccagatagaagggctcgaggttgttattttaaatcattctggacaggtattgatttgggaccaaaaaataaggaaagtgtatataacaagtttaacttaaaagtcatgtaattcaactctggttctgataaatgaagtcactaaaaaatcctggacatgtggtcagaggttgggcagtcacactctcccaggtcagtcctaattgccagaaagctcttccctggcctttgattaccacacagattatatttaattcattttactcaagacagatcccaaatatttgaacaaatacctgcctggtttttaatccaattaaatggcccaatttcctgccactgctctccatatgacttaatttgaacccacctccatctcctggacactcacccctaaagtactgcagatagtcttagagagtaacatgattcccagaacacaatattgtaagaatgttgtcaacaaagaaagtagaataagtttctagcaccttttgttatgagcttctagcatgctttgctgtgagcaatgtctctgttaatttagcctgagttgattgatttcctgccttaacttcacacactcagcttcttaatgagctttcagtactggagaaaaaaaatctcagtctttttctcttgctttgctaaacagacatatctctccaatcttatatctgtacaggtcatcttttacattatgttgctatccacttttttccattaaactctatcctattataattatcccaacctggatttaaacattttgattcaacttaatagcaattgaactataatttgtttcatccacagattggatcagcatccattcatgccttcatctaaattgttgatcccagtgcaaagtcaagcactgagccctctatcatacagcagaggtaacaaaatccattaatgagcatcatttggaggaagttactcaaccagataaaaattcatgtaaaattatcttctagaccaccgttctccagcttgcccataagaaaacaaaattggactcttcaaacatcttgctgaaaaccagatgcccaatgtctgcaacataccccttttggtaacagaggacttatgttatcctaagaagttgtgattcttatgcagaaaatttcagtgcaaattgaaaattcagttaccttttcaaagaagaattaggctaactctcaggaggactatacattcgccccagcaatgaagctgccttttcaataattaattctatcttcccatcctgtttttagctgtatgtctaacccagctgaaatcacttaggttgttatgaccttctaacttttgccatttcaacttagcaatattcctactgattacctaacatacttaactgccattctctgatcactccgaaatagaaaggctctgttacaactctcctggggctcttccgtaaagagaaagtctttgtgaactgaacgcctgcccagatctagactgtcaaacagaaaagaatcttgttaataggaactatgaaaaaatcaaattagtgtttgttgatcaggacaattctttcctaccaagcaggtgcggggtgggagcaggactggtagttggctcagccaagaaaagagatgaaacataactcaaagactctgtgcccggtctgtgttcttaacctctgagttacgtttcatccctaatcctagcattttgggaggccgaggcatttgagaggccaagacagatcattagagcccaggagctcaagatcagcatgggcaacatggtgaaaacctgtctctaccaaaaaaaaaaaaaaaaaagctgggcatagtggcacagacctgtggtcccagctatttgggaggctgaggcaggaggatcacatgaacctggaaggactaggctacagtgagtcatgccactgcactcctgcactccagcctgggtgacccagcaagatcctgtctcaagaaaagaaaagagagagagagagagagagagagcacaggctctggctcctgcagggcctcataatagtcactggccccactgtggatgctggctttgggaccttgggcaactttcttactatgaatttctgtttcttcatttataaaatgggaataataattccctttattatctactttagtatgtgccttagcaggttattctgatgattaaaaaaaatttaagtgcacctagagcatagcacataacaagagttcaattgatgttagccgctactataccatgcattcagcaagataacttctgatttgattttcgctctccaaatagatttgcatacagaaatagatgggctaactagtcatatttctacactgtacatttctgtactattttaactatttagttatagctaaatcttagaatatcaatttcatgagagcaggaatttttctctgctttctttcgtgcactctttccggcatctaaaacactctgtggcacataataggtacttaattcaaattcactgaatgaatgaataagtgaatctagcttcctgtttgtccacattcactatctcttcaggttgcttaagtgggtttaggtagggaaaaaaaaaagagagagagagagaaactctgggtagaatacttagcactgcttgatgcctagatacacatttgacaaatagtagctattatgttcacatgacttcatgcaggtttactgaggggagctaaagagatatggatagacggaaacaaggtgcaaaacttacgggcttattctactcatggagatttcagtacagaggggaagcggacaaatactacttaaaggaagtgtacaggataatatgagaacacaaaacactgggcactatccagatcagaagggtgaagaagccttctctgacaaactaacttctaaatggagaccgaaaagatggagacttttacctttttagataggtaaagaaagtgatggagaaaaagaccacagacatctggatcaacttgtgcaaggccctgagataagcaagatattggttttctcagaacagaaagaagccagttgaaatgcatacgtgcaacagaaaatgaactattaggttggtgcaaaagtcattgcagtttttaccattaaaagtaatacaagggctgggcgctgtggctcacgcctgtaatcccagcactttgggaggccgaggcgggtggatcacgaggtcaggagatcaagaccatcctggctaacacggtgaaaccccgtctctactaaaaatacaaaaagaattagccgggcgtggtggcggatgactgtagtcccagctactcgggaggctgaggcaggagaatggcgtgaacccgggaggcggagcttgcagtgagccgagatcgtgccactgcactccagcctcggcgacagagcgagactccgtctcaaaaaaaaaaaaaaaaagttatatacggtcagacatcccagcctgggcaacatggcaaaaccccatctctacaaaaaaatacaaaaattagctgtgtgtggtggcagcacgcatgtggtcccagctactcaggctgagagggaacgattgtttgagcctgggatgtcgaggctgcagtgagccaaggtggcgccactgtgcttcagcctgggcaacaaagtgagaccctgtctcaaaaatataaaaaaggccagacatctgtagaagcaggactacacaagaccttgtaggtcatgctaagaatttagctaagagagtgtgaagtgtttgaatggattgcagagcaggcatctaacacatcaggattgatttttttttttcatgatcccggctgctctcaggagaattgaggatagattgtgcacatcactggaccacagcccaaaaatgctggtgagaagagcagaaggagggtttgaaggtttgctgtagccagcaccgtctcagcactcacaccaaggggctctgtcagggcattaagaaacattatttcttttcttttttttttgagacggagtctcgctctgtcgcccaggctagagtgcagtggcgtgatctcagctcactgcaacctcctcctcctgggttcaagtgattctggtgcctcagcttcccaagtagctgggattacaggcatgcgccaccatgcccagctaactttagtgttttttagtagagatggggtttcactatgttggccagtctggtctcaaactcctggacctcaggagttccacccgcctcggcctcccaaggtgctgggattacaggcatgagccactgtgcccagccaagaaacattatttctgattggccaaattaaccactgatgcaggaagaccaattttctcctccagtgaggaattctagctgtcaaaaaaaaaaaaaaaaatggaaaagggtagacaaaaagactgctttgtcccttttatgcctatcaaggtgttatttgcgttctctcagatgccaacagtaaaaataggcagaaaaagcctccttgatttgtccttcttccagatggctcaaaggatagtcaaatatcaaccttgttcttctgcacaaccctaagaggtgggaaagcagatcttttaattccctgtctcatcccactcccctcctgcccactccattcactttacagatggaaaccctgaatcactgacaaactaagtgaccacaaaaggttattgtcagagataaaactaggattaaaactggtttcttaattccaagccttcattccctcatagccatattagacacaaaaggctttggacaggaaggagttctctcttacagaaacatcctcttccaatgtatactcttaaaatgaatctttctacttacatggaaattgataggagggggtaactcgagtctcccaacttgacacagaggagctaccctgagatccagtctatatctaactgctcactgggcatctaaactttgatgtctcgtaagcatctccaactcgtcatacctaaaactgaactcattatcattcccacaccaatcctgtttctctttctgcatttcttgcctgaatacagcttttcctctagacatccacctcctccctctacctcaacctccacatctcattaatcagaatgcccaatgcatttcacttctcagatcactccctgggtcacccccaactcatccccattggtctcgtttttgcatcagctgaaatctgaatcattgcggtagcctctggtggttctctcttactgtagtccaatgcctttccatccctcctccatcttcctcactgccaccctaactatagaccctgtgactcttgttcaaatctcccaatgaccattccgagatactttcatgagaagtcaatccttagcactgtaccaccatctcatcatgatgtagcccctgcctacctcttggatatcctcgtctggactttttccccttgctccagctataccatatgacttgctggtctgtggcacaagacccaacctccatcacctctgacaacatctcctcactctggcttcctcattgttctctaaccaccagggtgcatagctgcttagggcccagaccctggccattccctctgggtgggaaggtctgagactctttgcatggttaattagcttaccttctttgagactcctcagatgttaccttctcagtgagattttccctggccactcaattcaatgttcacactggccccacccctggcactccaggtccttctgaccgccttgatttttttcatgtcacctctgaacaggctatgtgtttacatactatgttcattgctcattgtctgtgcccccactgccccaacctcacccctacctctggaaaagaagctccaggagggcagggatttttgtctctttaagtttatattccaagcacctaaaatagtgcctggcaaatagcaggtgcccaatatattttttgttgaataagttgaatgcataagtatatatattattttatatattttttcatatgttcttccttaaatctagaacaacctaattcatatcctactcaccctcatctacaatctcattgacacttttttactacaaacatttctttttttttttattatactttaagttctagggtacatgtgcacaacatgcaggtttgttacatatgtatacatgtgccatgctctttttttttttttttgagttgcagtttcgctcttgttgcctgggctggagtgcaatggcgcaatctcggctcaccgcaacctccgcctcccaggttcaagcaattgtcctgcttcagcctcccgagtagttgggattacaggcatgtaccaccaggcccagctaattttgtatttttagtacagacgggatttccccatgttgctcaggctggtctcgaacttctgacctcaggtgatccgcccgccttggcctcccaaagtgctgggattacaggcatgagccaccgcgcctggcctactacaaacatttcttgtttacctattggtctcccctatgtcgtgggtcagttggtgcctcttaggttatctttccatgctctctcctcatacacaccagaaaataaaagtcacttcataaatatttgtcaaactcaactgatgtgattaatgttatcttctaggcaaaggacctaaacacatagatcagatacaagatctgatcataattgcacagaagagctcatttcagagccatagataccttctctccataaatcctttcggttaaaatgggaggtactattgcatcaatttagataaccagttgaggcagaggctaacttttgaaaattctattttgccaggacttcagaaaacacaatttggtgtcgaatagctggtctcagaccagatggttggtacattctgatttttagaactagggatgctccctgactgaaaacaaagtagtggaaagggagggaggaatcactattacttagttatttacttataggcaggacactatgccagtgattttatatctattaactctttttatcctcaaaataaatatgtgaggcatactgtcatttacatgttacagataagtaacctgaggttcagaaaattaaacaagttgtccaagattacatagcaggactgaaatttgatgaatcccctacgccacaaatccaagcactttccccatgactgttgtctctccgccccctatgtggtagtttcattcttggaatcaccttcctatatataatggactcatatacctattttactatctttgcatctttagcatttggttcttttatgaccagtgtggaatcttttctgtaactcacacattcttttagagttcagagcctacaggactatggaacctaataaagtctagcacaaacccatgagtgccacaaagtgtcacacacatgccaatcaagtccacgggcctgctacaaagaagtgcccctttcaatgagctacctggaaaggcacacctacacttgccaagggtggaccgatcgactggcattgagcattgattaggaagtagtcctggattcaaacttttgcatttcctctcaaggatttctaattttctcaggcaaaacaaaacaaaaccaaaacaaacagaaaaacacaaaaatagatggagtaggcatccaggaaaagtgggaggagtaaagggaaatgcactgctggattacactgtgaatagccagagcacaggccatgccatcctccaggactggacaaagaacaacctagttaaaagcacagaaaggacatcttctatcgtcctttagggagggttgttttagaacagcagacttgccgaaacactcagaagtctattccacaaaaaaaactgtgttcagttctgttacagccatcaatgctgtgaccactgaggtgaagggcagaggagggaaaggctgtcatagaaccaaagaccacattcaaaagacaattacttgatccactgacttaagtccaaccaggaaaagcaccaggaaagacaattagtgattcacaagctcagctgagtagaaacgtaaagatggcaatgatgtagcttagccccaaggtcaaaagtggaaaatgcttgctatgggcaaggcagagggtgctttgagaagcttcacctccgggacttgctgagcactcccaagacaagggtgagcagagctctgtctccaaccagggaacaattagtctgtggatctactgatcactgtggatggtctctagtttgacacctcgtcatttgtctctgtcactagtgacctttggaataaaatgctcattcaattttatgactaggagaggctccagagatttatctaatcccccccacctcattttactgatgaagcttctcagacatagacagatgaagggaatccaatttttcaacttttatgagaacatgaagtacaagaacagaaaacattctggatggttcagggtagtggtatatttgcatactcgacttggttcagcccaggagtacacctgtatttctcagagcatgtgttccaatatgggatttggaaaaatatgatcagttgatggttcagaaaataatgtttgaaaaaataaaatgttcagaaagtctggtttggcatttgcatgcatactgaggtacacaagctagggaagaaaagagaatagaaacatgtcctactccttttctcatttcttaactctcatgaagttatgtgttttgagggggaaattgtgctcatctggagggtccacatgagcatttttttttttttgagacagagtcttgctctgtctcccaggctggagtgcagtggcctgatctcggctcactgcaacctccgcctcctgggttcaagcgattctcctgcctccgcctcccacgtagctggatttacagatgtgcaccaccacgcctggctaatttttatatttttattagagacggggtttcaccatgttggccagactggtctcgaattcctggcctcatgtgatctgcccgccatggcctcccaaagtgctggaatcacaggcgtcagccacggtacccagccccacatgagctattgataaaggtaacaacaggaaaaaatacagatagtgaagagggggcaagaagtgcatgtgtatagaacaaagtgaattagaatgtagcaggtcacctagaatttttatgactataacagcttaagagtgctctttgaaaaactgacctaaatgtattagatccgtgtagcttcactattggttggggctgggagaatgagcatgagagatgctggggaagaagagagaagacagcgaaggagactgctgcctgaggagccacagcagcggctgggagagggcatctgggacagcaaatatctaggaccctcagaaagaagggctggcggagtgagctgcagcctgcattctccttcctcctggaagctgcttcctccaccccagaggagagggaggagagagtttctcagagtctttccctggggtcagacacgggtggaattaatgaagcaagatggaaagaaaatggcaaggagatctcaggagccctctttgtgtaaggaaagtaaaatccacaataaactcaggaaactcataaagagagcagaagagaatagcaagcctttgtattaggcacagctctttgtttacactgaaaatagaaacaggcaaactaaattgcctgcaggttgcctttctccttccttattctttcttccttcatgcagtgcttaactatgcaaacatccggatcctaaaaggacattaaatattggttgatggagtcttaaaatccaggagcaacccagaaatgtttacaaagggtgcctgagaaactcctaattctaaaagcattgcaagtttagtattcctcagataaaggtaaccagagcctgtaaaccttccctaaactaaataataaaacattacttgatcttaaaatataagcagggatttggggatgttttcttgtattattggcattatagacaacattagaggtaaaatttattactagttaggaaatttttcttttagcattaccttttccccacttaacacaattaaaagagggtgtgtgttaacagagcttgttcagataatgagcttgctcactacttaaactttctgtcctcgtggtatattttcattcactgagctgttatctgcatcatgtacctgggggcttttttaaaatgaatgttgcctcctccattttgcagaaagcaatgagaacggcagcactggaacacctgcattatatcaataaagggattgagaggagactgaagctcaagaactagcaaatttgaatttgtacattcagctattgcctgtgtgtcccttgtcccaaactcatattcatcttctgaaaagggcagctgagaacccggcacttttgactgctgcttttttttttcttttgtatttctctttcccattagagattcaatgtgagggaattatgactcttctagtcattgtgtgtgcgtgtgagcagggggtattatttactgcggactaaaatacaattttttgtgtatgtgtttcttcccagatagctacattattggttacttgccaagcaaccccatatacttactattttcaaaatttaagcagatagcaaaaagctcaccacagagcagaaaatgaatggattgcttttttaaaagaagtggatgattgaatgaataaatacatttattgtctctaattgaacctgcttgtaggccctacatagtgccaatacagcctacaaattcacattccacatgggcaactccacctgctattgtttgatttgggagctgttctatttacacaataaatatatactgaaatataaacagaaatatcttacttctgtatattttgggttgtaaccattcaccacgtattacaacagtcttttcttttcttcctcactcctccaggacagaacattattccatcctgtgagcaacagctgcatggattgcaaccccgcagagaagaagattttcatggccagatgtgaccctctctctgagactcagcagtggatttttgaacacattaatatgactgttttagaaaaatttaaccaccatgccaactcctagaaagaagaaaggaagaaagagtgattacctacaggttataaattaaattttagccagcatctgggtcgaaggagtcaggaataacatttcctcgatccaggaaggctggtttaaaaatttgcaaatgccatgtcaaagtaggttgttttgaagaacttcctgcatctgaagaacttggctgagaatctcaccagctgcttctgagaactcgagactagcagttcccttgctggccaagggcaaagataatttagggacttttcaaaacaactgctgagctaataaatcctagcatttctcaggtcaaatcctgcagtagtgagtagctatgaatggatcctattaactgggtgggaggggggtgaaaatggagtgcatgactgctctgacaacctgaggatatcacaggtttagaactagccaagcttaaggggtgagctgtactctttggtgccattctctgactaagaatgggttcagcaggtttaacccttaaaagtgctgcagatgatttcagagtgctcacactattctgttttttttatttttatttttaaatgagggtgcaatatctaatgtaagacttaaattacataatgaaatggacatccagtgttcccattctttcgtttatatttgccatttttttttcagagcaaagtttcttttttatgaaagttcatgctccatgaatccactgaatttctaattcagtgcccttctatgaatccagttaaaaacaaaagcaaaagcaaaaatctatgctatcaagttactccaaagaaagatttcacagaagcagcaaaaccatataagatttaggagagggacttccctgggaaatctatttttacttttctattatttttaaaatcttaaaagtctgatatttgtccagtcataatttttattaagcaaggaaatggagtgagtttgatgtaatttgtttaggagattcttaaacccaaataaatctacactccaagtgatatgtgaaaatggcttagttcacttcaattctgtttagtcagtggtgggagcttagaagtggttttatttgttcgtttgtttgggttttgcttttgttttttatttttttcttgttttttttttgtagtgttgaattaatgatgttcttttatttggaagctcataaaaggaattaccattaataaagtgtttctgacaccattttctgttaatgggacaatatttcggggatgaagaaaggaatgctccgaaaactaaatggaacacttaatccttaaagcaattttttactgttcaataatatcacattgggggaagaaaacacaggtatcaaggtggttcttgggaaaaaagaatcatgtttattatatatctctcaagtttttttggtataaaaatgttttaactttgctttctttttggtttttgtttgaagttggttttcctgttaataaaaatttatataacatcttggatctagagcattaaattttagaactgggaggactcctaggatccagtccctttacttcttcagatgaatcacaaaagcccagaaaggcccaactcctggcaaggctgatgtcttctgagccctattcctgtgttttttatcttgtactgtgttgcctcactcttacccaagctggttctggatattactgtgatttaacttgagattttcagtcactagatgagaatactatgcctccctggggatgcccactaaagtaatattcacactcagaaactttaatacagtacatgaagcctcttcttatacatgttcgtgattttttatctccctgaaacttaatgaaaatgtctagttaaacaaccaggctatagttggggaagagttatttcattatctttactgatttttcaagcattcttttgaagagctatttttttttctttttctttttgattatactttaagttctgggatacatgtggagaatgtgcaggtttgttacataagtatacacatgccatggtagttcgctgcacccatcaacccctcatctacattaggtacttctcctaatgctttccttcccctagtcccccacccactgacagaccccagtgtgtgatgttccccagtgtatgatgttcccctccctgtgtccatgtgttctcattgttcagctcccacttatgagtgagaatatgtggtgtttggttttctgttcctgtgttagtttgctgagaatgatggtttccagcttcatccatgtccctgcaaaggacatgaactcatccttttttatggctgcatagtattccatggtgtatatgtgccacattttctttatccagtctatcattgatgggcatttggattggttccaagtctgtgctattgcgaacagtgctgcaataaaagtatgtgtgcatgtgtctttatagtagaatgatttctaatcctttgggtatatacccagtaatggaattgctgggtcaaatggtatttccagttctagatccttggggaaatgccacactgtcttccacaatggttgaactaatttacactcccaccaccagtgtaaaattgttcctatttctccacatcctctccagcatctgttgtttcctgactttttaatgatcgccattctaactggtgtgagatgttatctcattgtggttttgatttgcatttctctaatgaccagtgatgatgagctttttttcatatgtttgttggctgcataaatgtctccttttgagagttgtctgttcatatcctttgcccactttttgatggggtcatttttttgttgtaaatttgtttaagttctttgtagattctggatattagccctttgtcagatagatagattgcaaaaatgttctcccattctgtaggttgcctgttcactctgatgatagttcattttgctgtgcagaagctctttagtttaattagatcccatttgtcaattttggcttttgttgccattgctttaatgttttagtcatgaagtctttgcccatgcctatgtcctgaatggtatttcttaggttttcttctaaggtttttatggttttgggtcttatgtttaagtctttaatacatcttgagttaatttttgtacaaggtgtaatgaaggagtccagtttcagttttctgcatatggctagccagttttcccaacaccatttattaaatagggaatcttttctccattgcttgtttttgtcaggtttgtcaaagatcagatggttgtagatgtgtggctttatttctgaggcctctattctcttccattggtctatatatctgttttggtaccagtaccatgctgttttggttactgtagccttgtagcatagtttgaagtcaggtagcatgaagtccttcacatccctttgtaagttgtattcctaggcattttattctctttgtagtaattgtgaatgggagttcactcatgatttggctctctattagtgatgtataggaatgcctgtgatttttgcacattgattttgtatcctgagactttgctgaagttgcttatcagcttaaggagtttttgggctgagacaatggggttttctgaatatacaatcatgtcatctgcaaacagagataatttgactccctgtcttcctatttgaataccctttatttctttctcttgcctgattgccctggccagaacttccaataataatttgaataggagtggtgagaggacatccttgtcttgtgccagttttcaaagggaatgcttccagcttttgcccattgagtatgatattggctgtgggtttgtcataaatttgaagagctatttttttaaccttctgtcacagagatattttgtataggtcaagagatctcgaagcattcaagaagcatactggagaaaatcaatagtgagaaattaacctgtgtgttgagcaattccagagagtgaatgaagatttatctcaagtgttcagacagcaatcttgttgtagaattagatgatcctataaaaattcacattatgtcattaaacagctgactgctatttacagttctatgaaagagacaaccctgggttctgtaccctgcaaagctcagattcgcaatgatcttgtaggatgctataatcatggaaagctagccataacatgtttggctctgtcctttgagaaagcctgaatatattgcattattttggtgtgacacacagaggtcaaccaagattggtctcttgatctctgaataaaataatgtaatattttggggcctatttgagggtggaaggtgagaagagggagaggatcaagaaaaataacttactggtactgggcttaatacctgggtgatgaaataatctgtacaacaaatcgccatgacacaagtttactaatataacaaacctgcacatgcactcctgaacttaaaagttttaaaaaattaaattaaattttttaaatgtaatataaaaaattaatttttaaatgtaatataaaaaaataattttttaaatgtaatataaaaaattaattttttaaatgtaatataaaaaattaattttttaaatgtaatataaaaaattaattttttaaattaaggaatgcttgagacattgaggccaaaattaaaactctaaactgtcaagcaactgttaaatgtgtgcaaataggaaacaaatagaatgaaatgaagcctcgagaacctacccctaagccaaagggcacaacattgctaataagcacatctgaggaggcatttccactccactgaaggttaagactctgtctacccaaagcaccgctactaccatgctgaaaagtagaaaactatgtatgttggtatgtttatttaacaaaggggactgaacaatcctcagaaagactctctttcctggaaataacatgatttgaaaattggacagtaggccaggcacatgggtcacacttgtaatctcagcactttgggaggccgaggcgggcggatcacgaggtcaagagatcgaggccatcctggccaacatggtgaaaccccgtctctactaaaaatacaaaaattagctgggcatggtggtgtgcacctgtagtcccagctactagggaggctgaagcaggagaatcatttgaacccaggaggcagaggttgcagtgagccgagatcgtgccactgcattccagcctggcgacagagcaagactctgtctcaaaaaaataataataataaataaaaataaattggacagtagagtactgacctacccttttatcagaatgggaggaaaaatcataatctggccttggaaattgctacttctccatcataagacatggttttgccagaataattaatttttaaaatcttttttatgtatttacaaagaaaaagctgtgctttaaagcaatcatgaactaaacataggacttacacttttttcaaggctggattaataccctggcaatagcaatgtattggcttctatgtccactggtatttacttaaaaacattaatatgatcacataactgtttttaaaagtattcactatatcagaagcttcagggagtaatgcaagttccagaattgctttatgaattgataacctaaaactttatgcaataaatgaataacagaaaatgaaaatggacctacaagcaatgaaagagtgtgttaggcccgttcttctcatgtttcttggaaaacatgaaacccatgccaacacttgacatcatttcctttaggagcaatgttttaaaagaagccaaatataaataagtaaatacctattaatattttgtgcttcttcctctcagatgaaaaacttttatttctatctttttataaatatctccataaggaaatagtaaaaaagaatgctttcttggaaaaataagctctatgaagtttatggctgacctatcaaaagagttagcgccccaggcgcagtggctcacacctataatcccagcactgtgggaagccaaggtgggaggatcacttgagcccaggagttcaagatcagcctgggcaacataatgaaacctcgcctctacaaaaaataaaaaaaattagctgggtgtcataacacatgcctataatcccagctactggggaggctgaggcgggaggatcacttgagcccaggaggttgaggctgcagtgagccatgatcgcaccactgcactccagcctaggtgacagtgagatcctgtctttaaaaaaaaaaaaaaaaattcaatcacactttgattacaaagctggctatccagcagtcatagagggccacacctgccactgtgggacattcttggcccaggatatcacacacctaaggactcagaagaaagttgatgataaggctatgccagatgtgcctttgacttcttgtcttactgcagaatctcccccagaactaggcagttcacctgaccctcccctgaagaagagtgctaggttatattttttcagaatttagaatcatcctaacaatatgacattgtgaacattgatttatccctaaaaactcatttagtaaaatgtctttaggcttgttaccctggcaggattatgaggctgcaacgcgcttccataaacacatgctggagatatgctggaaataaagcatttcttataaatcatgagaaagaatgcctcaaagggaaaatatttttaagtgattccctatgattctgggagtacatataaatggagataagtaaattgtatctctcaacatggggcatgcttcattctctcccttcacctcatcgaccagtcctgctcctgccatcattcctctcagatgacaccaccaactgtaattactctccatgtgtgaaacggtggccgaggacactgaagcgtgacaagtggccagtctttcccacactgccgacattggaagattgctctttgatttatgtctatagcctttgcttgcagaactgggagctgtttgcaactctatttggtagacttgacattgacctgaagcttttattcatagtcactcatctctgagcttgacataccagactggtgtgtctggtactgcagcctcttggcagacaacagctcaggcacatgtttgatgcttcacttcagagaaacctggaaacatttcttccatccctgctgcctgaagttgcctgcttcttcccaaagcacaatagcttcctgggctttccacaggcctctgctgtccttctttgctcatttcaacgtggttctccaactgacctcagtacagaaaggctggttatatttcagaatctttttgtcgatgagtttattctgactttactcaccttgagggggctattcataactaaacagcttaggtgctgggtttacctatgttactttatgcgtatgatttttgtcctgtgtgatttttaataatgccccttttactgtttttttaaatttttacttttattatttttgagagggagtcttgctctgtcacgcaggctggagagaagtggtgcaatcttggctgactgcagcctctgcctcccaggttcaagcaattcttgtgcctcagcctcccgagtagctggaattacaggcatgtgccaccacacttcactaatttttatatttttagtagagacatggtctcaccatgttgaccaggctagtctcgaattcctgaccccaagtgatccacctaccttggcctcccaaagtgctgggattacagacctgagtcactgcatgccagcctgtttttattttttagagacagggtcttgctctgtcgcccaggctggagtgcagtggtgcaatcttagttcactgcaacctcaaactccagggctcgggtgatcttctcgccttggcttcccaaagtgctggggttacaggtgcgcaccaccatgcctggccccttttactcttaaaagtgttctagtttcagtaacgaattaaatactcaccctatttataatccacgtgcctgtttataattcctgtaggaaagaaaatgtattttgcttattaaggcttacagtctacaagaaatcaactcgacttattccttcccttcaaacaggaccagaccaaaatcagcttcttgatgactgtgtattgcattcacacgggtctttacaagttacttaatgaaagctttgtaatcaagagttctatatccacctaaatctctttgctgaatgaagtctaatttaaatgattttttcataatttaaaaaatttatttgaaatcaatgcagtcattttatattttttcaagctcaaaacagtagatcgccaacatggcctattaaccacactattaattctcaatattatggtaaggtgtagatagatagatgatagatagatagatagatagatagatggtagatagatgatgggtggacatgctatttgcattattgcttttgtttttctaagcaattttatatgtattatctcactccacacttataacaatctctggtgtagataatattataatcctcatgaaaaaaactgaaggactcagagttaaggggcttgcaaggggctagcaagttaacagcagaatcaggactagatagattcaggccttctaatatgtagacctctgttccttccattctccatggtagtttatacctcactacagggtcattcacccagagcaaagcccatatgagttgtatggaggtacctcaaaatagcaagatcactcattccttagggacttctgtttttaaccccttaattatgtttgttcttctctgtacctgtgtgtttttgttgattttcccacaagcttattaaagtaagaactgaatccaggattagtccttcttaatgagatttctaaggtacttttaagaaaagaagtgatctattaaagctatttgcatagctctagatgacaaatccaaaagcaaatactgtgttcttggtaattatcaatgggttcagtcctcagggagaggaaaacagtcattaagcaaagaatttgcactcacttcgcagtaagactccaagctgaccttcttttaatagtcttatttctgaaaagttgtcaggcacatctcttagccatctgagactctcggtctgcactgatgtgaattctctctggcagtttttctcttctgagggtacaagttaaacatgtgtattactaggcattttggtccgtttgggctgctttaacaaaatatcatacactgggtaacttacagataataggaatgtatttcttacagttctggaggctgggaagtccaagatggaggagcaggcagattcagtgtctgctgaggccccagtttctggtttaaataaagatcacatcttctcactgtggcctcacatagtgaaaggggcaagggagctctcaggggcctctttcttaagggcactaatcccaattatgaaagctctgccttcatgacctcatcacttcctaaaaggtctccctcctaataccatcactgtggaggtcaggatttcaatatataaatttggggggtagggacacaaacatttagaatatagcaccaggtcttaccccaaatctactatatcagaatttctgggttaggccactagatacagaaaattctattatcaaagagataaataattgctttgtgccccagttcctaatttcctaccactagcaaatccaagttaattctctgacatggttgttcacaaataaacactgcagatgtctggaagaatgatcagttgtaatccgaagctattataaatttgcattgagagaaacatgcctaagaacattttatttcaaaaatcctctggcttttgttaggtcagtgatcattgaaccttagtgtttaaacacctggaggtaatgttaaaacacagattgctgggccaccccttagtgatggaaatgaggctcaagaatttacatttccaacatgttgctagatgatgctgatgccgatggtccacatttggaccacatttggagtccacattttgaaagctattggttcagaccaatggtctcaccacttcgaaaatatcttcttaaagataattttgttaatgttacatgtgtttagaaagccttagttatatttaagaggcatctattggaaatgataaaaccccaacacactcaaaattcaaacaagcgttaatttaatccaataaatatttatagctggaagaaagtttctcctataaattctttaaagcaggatcacagaatttgaagaccaagaataggcagtattatggtatcacagtaaatatcttttcaatcacttaaatttctcaattaaagtataacaaatacatcaagacccctacttgaagtgcctggtattgagtctcacattaataatctgatattattgtccctttctctaaattcctagtgaacttcattctactgtagaatagaactgaaaatcaaaagaaggcatagcatggtgaactgatttactcaatattgtttttcagtgtattagtccttctgcccccaaaccatgctttttctcaagttttgtcttgggaaaggaaacattaatttctgatggcaaataaccagccaagataatttcaaatacattgtgtaaatacagttgagctatggttccccccatctttgaaaaaatgctacaagtttaattaaaagtcttttaagtgtaacaatatctcactatgctcaactcagttcactaactttgttagaaaaaagttgcagaaggtaaggaaaagcttagaatttctgctgttttaactgtggttctctcagatttgtaactttcttttcattgaaaataaacactaagaccttctttaatggtcatttctacctcatcctctgtcttcagaaacaaaaggtaatttaatttttttcttttcagtttatttaaatttcagcctctaatggcacacacagtaaatcctccacattatttttttccaaatatttttctgttatttttgtgtatactaaggatgcatgaaagagaatgtatgggaaagggtgtttcactttactgatgtttgctattcaaatctctaccacccagaaaattgtttgttatggaatttatagtgtggttttgcaccaataatccaagccatgtgttcagattttatggtgaaaaaaaaaatgcagcagatgcaagatatcctattagggtcaaaacctagacagtgcatctcaaatcaaaaggataaaattagatgatcaggactttcagtttttgttaaagataaagggagtattgagggcctgtccaacactccctattctagtaaagaatggatgaaaggaggtgggaaagtgtctatgggtgggattgggagagagaaagaaacagccatgctttattgcttaagacaatttttttaatgtcctagaggaagcagcagggaagtgtcagagtgactgagatgtcaaagaaataatctcacaaaagaaatgctgcatttgaagcaaggagccgcttctcattaatgtctacccgctagcaaatggttagggtcagaaacatgtacattctccaaaactgccttcagttggaagacaaggatatatatatatgtatataaaggagctcaaacaagtattaaataactctgcagagtcagccattgaaatgtttaaaataaaacaatctttgggacaattcatctggacaataaatgcctctgcttgaaaaagcgtctggagttgaggttcttttattgtgaacgacaggaaggacttaactggaggaaagctaatgaccttgtttctacattcctcagacatcagtcgtctgccagaaaatcgcctatgaggttgaggcagtgacggtttaaaatggccagggagaaagtctacagagaaaatgagctgcagcttcagtggcagtttctaaaaatgttggtgaatatttccgctatggagcaaagcaacacacgttccactatctgctaccagagctaagccgctggccaagatgcaaagctctttgagaaattattctttctgttttaaaaaattcttttctatttccatcaaccccgagtaaacttcctccaagaaagttaaaacatcagatgagtgaaaatcctttggtaggaaaatcaaaggatctttcttgttggagtaaagagaaatgttagaacgggaaaatctccagtcttccctcatatcgtactttgtgtgtctcttctcccaaactaggataactgtttcaggcaacgtcagcagcttggtcttttgctctgagggtgcaacattctctctagatttatttcaataaatgtttgttgaactcacaagagtgagtttttgcattagactaaaaagtatatgcagctagggaaaaatgtctggttagttgtcaaaaaacgactgctacagtctttctttcacatttgaaattggacaaatcctcaatccctttagactttcttaggattgtgtgaaatacgataataaacatgaaattgcttcataacttgcaaagcaaaatgtaaatgaaagagtttactatttaatgaaaccctgtcctccagcagcctataatctagcaaagtgcttcttaggtagggtggccatattatttattgtgcaaccagataattttttagagtgaaatgaggtgttacttgcaattacagaggaaaagcagatgaaaataaggaccgattttcttcttaaagacattgaacaaaatactcatggacaatatgaaatattaaaatagaacccacagtcaacatgtaggggttcacaaagtaggtttgggtttgagtacttggattacttattgaaaagtcctaggccaggcatggtggcttatgcctgtaatcccagtactttgggaggccaaggcaggcagatcacctgaggtcatgttcgagaccagcctggccaacatggtgaaattccgtctctactaaaaatacaaaaattagcccaggcatggtagcgggcacctgtaatcccacctagttgggaggctaaggcaggagaatcacttgaaccctggaggcagaggttgcagtgagttgagatcaaaccattgcactccagcctgggcaacaagagtgaaattctgtctcaaaaaaaaagaaaagaaaagaaaacgaaaaatcctttgaaataatttaggcaacgtggttctattttactgtttttaagttcgagcatgaagctttatctaaaataaaattgtttgcgtgctgttatagctagattataatatctaggctattcactgcttgaaaatgtccctacaacctgtattcatcaatcatgtatcaaaataacatcataataaccagcttaatttagagtatataaataaaaaacatataaacaaggtgctttacaaaggaaatacagtcttctactctgttttgatatgcaactatatacacttaattaaaaagtaaagaaaaagtgaaagtagaattcacaaaacaattgaattgtcaaacaccttccacaatattaaaattgttattttgtaatttgctttatgtatattgccaataaaattgtgtttcacttgatgaatgaggattttggaaggagactgctgtcagggaatttagcaataaaacaaagcagtgaaaaagatattagctttttattgctaatttacttccttggctttgtattgcaccaggggtaattcctctatcaaatgtggtaataatgtctgatagacttacctgataaatgtgccccatcttcagaatgtaggacgagctgtgtttgttcaattttactgcatcctgagacaaatgaaattggggaaaagctgctatgaaatgaagctattttctacagagtttgttcttgacaagctatattgcagccccagccataataaagagacaatgactcatctggtgtatagcaaaacaatgaaaataaacaaacaaaaacaaatataaagttcctaaatgttattccagcaatagacctgtaaagagatatcagttaatctaaaatatgtatatattagatgcttaacattttttgttggatgcatgaatggatagcaggaataatgcctacttcaacgcactactttcaatatttcccataattcaacctagaaaatgaaaagcagagagagaaagagatagataaaataagaagagagggagaatgagagaggaagaaaagtaaccgagagtaaatgaaagtcttcactcaaaatcataaggaatgtatcttaactgaatattttgattgatatgatgcattgttttataattgctgctccaaggaaaaaattgaggcatgaggaaaatataccccattgggcagtgggcaggaaaaaaaaatctctgtcaaagagcacaaatcttatttacaatggacctttaatgactctaagctgctttaactcccatgtagttcccccattggaagaagattataaaagactgctctcctctttcccagctcacactgatgtttttaccccattcaaaatgagtatggtaatggcattcactaaggattatcaacatttgagaaaaataaaaaagatccaatacaagctgagaagaatacaaattatctatggagcttccattgatggaaatggcaagtatagatattaatatattacatgagtcattcgtggtagacattcatcttaatggcttagacctcaataaagctaaggcagagggacccattgtataatagttttaggactcttcactgctaatggaacaagctctaaccctttccaaaggagcctggagcaccagaatcgcggagagagaaaaaacagtggaagctgtgtatgatttcccagtatactcacatttatccacttatgagcaggaatctgtgatctgaaagctttccagagtgaaatgatttctaaaactaagcaacaagaaatgcatgaaactgagaaaggagacaagtctaaggtgaacattgggctataacacaatcataaaaggcttcagaaataactgaagaaggctgactgttcttgacctataactttacctcattttgcttgtactgctgaatcgcataaatggaaaataagcaaaagcagtggttgttgtaattactttcataatggtgacgattttgacttgatgtgaattaatattcttaaacttcttcaaggtacattgcatttggccaattcttcttattctaaatcaccacaaaagaacaaggcttaccatacatcttaacaaagctggtttttgtttttgtttctaattcctaaggtcatcaactctaattttacagaagttaagctttgttctaattggctatataatcaggggtaagtaacctaatttctataattgagggtatttattcctacattgcactgtacattgttccttacaagtagaagactatgtgattttgtagtaataataaagtcaaaaagggtgtccatgttaagctatgagaattcaatctggagaacatggagcatattttccctcacttggagggctagggtaagagtaattattggcaatgttggactgaacaaacagtacactccgtaaaaaatgagatggccaacattattaattgcataagatattggctcattcattcatcaaacgtttattggttgacactaaccatgcaagtttacaaaaacctgcaatacagcttcatggcaaagctttctcctatgaagctttttacataataaaattcagggagaaaaatagtcaaatgtatactcagtaaaccttgccagaaggctgaaaatctgtttcccaattgaaaaaccacagccagatatcatgtataaaggaaagtcattcatagtaatcttactctccctttactattgttttttaatagatgactgaagattactgagagaataagataaaaagaaaaagacagaaaatattgaatatgtttgaagtctttaacccttataaaataaaaatatccaatcatcttcactacaggaaggaaactaggaatatacatctttgggagtaaaagacacctccccttccttttcctaaatagtcccttctggctcaattagctgatagaggagagctatttcacccttgaaatcctaacaaggtggcatgggaagggcagcagtgctccattccttgttgggcccacccctggatcttgatcagggattaggggtgtcacagttaattcattcataacatataaagctccaaagtttctacatttttaactgagctaaaggaatttaaatttttcctaaaataatatcattttcactcccttgtactctgttatgctttctcagtagcacgagaagggattagagttacagttagtcctgagaattgaggataaccctggttctgatgataggacaacatcagacacgtgaaggccacccatcattgtcacaagggaacaacacagaacagatacctcagggaattcctggtgatttagtcacccacctttccccgctttgcctcttgggatctctgagctctaatggtggagaaaagggaaagagataagggtcagttcttccctttgagggaaagtcctgagaaagcagtgcacagccattgaaggtccgaggccattcgctctgtacaacacactgataaaaaacaaacctgtgaaaaataaagtctagttaactcaggcaaatgcttttgaaaaagtcaaattcaaagtctatcaaatgttaactaattaggagacaatttctctacatacagtgagcaggcttccatttgcattccctggcttcagatttctcttcaaagagacatattaaacagtgcactgatatttttcaacctggcaggaaatgtgccagctgcaccagccattggaaagggaagactattatcccaattgccaattttaaccaacccagtaagtaaatagcctgggcctaatctttataggcagttaaactgtgcagtgcttaataaatactcctgggtggctgtgttaaagcaaaacaaagaatactgctggataacaagacagctgcaaaaattaacgttagctcccagaggagataggagtttccggatcacagaagctatctgtgacaagagagatacctattacaaaagagtgattattaaagaacactttaattattattaaaagaacaataagccactgcagatacatttaaggcattctacaatcaattttaagataagtaacgttgcctgaagtacaaaagataacaaaatacaaaccccatccaaatgtatcaaagcctggcaattaacttctcattaccagaaacaaactttgtgtaaaatggctattgaagaaggatattggtccaggaaggcaataatggagtttggtgggtcagaccttgagttttctacaaaatgtatagcttcttttttcaactaagtgtaaaaatccttgccagaagcaggaaaaatctatatgctaatcatatttccaattgggctcaaactgaaggaagttaagaggagagcacaaacatgactcagagggcaaagagactgacatacacaaagaaattattaaaagattctcaaatgcccagctctgctgagtaacgaccgagaggagacatgattgtcattggaaagtgtccatagagtaaacaacagtcagagtcattactgagctgaatagaaggactaaattggggtaaaattaaggacagagagatttaaactgaatgtccgtgatgagaagggctgccagatagtgaaacatctccccagggttaaccaggagacatcctctcagaaggctttcaaaagtcaggctctaccatgaaccaaaggagcatttttccaatccaaagaaatgaaaaaaaaaatccctccttaaagagcaggattatatttttggaggggggcaggaataattatctgaggtttctcctagagaaggaaaagtctgtgttgaatcaacaagggaagctcattttagaggaggtggggacaaaggcaggaagcatgaaaaagggaatgtcaccagccagcagaaaagaggtaggaagcaacaccctgtctagactccataaaaacaatgacagacccatgactggcaaacacttctgcagtggttttgtgctgaaagtgatggcacaggcatctccctgagctcatcagcatgacgtggtttttcctagcagtagcctcaacagttggtgataacctaccatgtaaattccttgtatccttaagctaagaaataattctctaaaaaccataggaggctagtctttgtagtattttctatttttaactaatggcacttaacagagtagtggtttagaatacaagcttggcatcaagcggatctgggttcgaatttcacctcatttactgtatgactattggccctctaatatagcctttcaatgacccaaattgtcagctgaaaatggggtgataatttatacctttagcaatcagtgctcttggttgcaagaattacactggaaaacatcagcagaggaggaatttattggaaggatattagaaagctcgtagaatcaacagtagcagctgagaaaatgggtgggaattaagggaggtagagcgcgctgagccatgagcaaggctatgccacagaaactgcctggtgagggtgtcactgtatgaattgctgctcccacacactgtcagactctgctgccactggacactggatgctgttcccatcccctctgtgtcatcattatgaagtgaattctaaaagatcgctgcctcttgtttatctcacttaagattctcattcaatactgggagcacctgattggccaagcctcagccacaatgcctgtagcatagctgccaggggaacagagaaaaggtagtagctgatcctttgcatcttctttagtgtaaggcaggatgcagtgtcccatggagatttacaaagtgcatgttttcctccatataagaaagagattcgaacactggaaagccaaaactcaggacaaacatctttcctagttcacctctatgtctgcccaactttgcctacattcttcttcccctaattaaacttccaaaaaatgttcacacctaacaaaacacaatgacccttatatagtgaataaccccctcccaaacagaaaacaagacatcgattctcacaccaactggaatccaggctgtctgaatgatgttaatcactctaaggtgtataacaatctcatcttgatatccatcaaccaatgaaccaaattgtaacatgagtaactctaccttaggctgttggaaagagagaggaaagaaaaagaaaaacagcaaatatgcaagtgtctgtctaacccatatctatcaggttctgagctcagaaagtaaaacgtcggataggagatgttatttatacatttgacagtaaagaaggaaatacagataggaagaaaatcagtggtcattatatctataattggtcactaggccatagctacaattttatttcctcttccatggcccctttgctgctcagagttcttttcctagtaaggccacccaaatctttatttctgagagatataggtcctttgggggttctgcctatatagaattgtagtagccttccctattcaatgtcacctctggttgcagtagaagaaaatacctcagaatatgcccccaatgtcacaacagaagcccactttcactttgaagctcaggatcagtcaccacaaccaacaccaaatcctctattccaatggcctaaggagaccaaaatgatcatgttgtagtttccaattcagtagaaccatagttttgtttcctggaagacacactcatcccttgagtacttaaggttctagccaatagtagccagggtcaaaagactagaagcaaaaatttcaaattggtcattaggtataattatttctattccttggttccaagatacatgtattcaaactggacaaagcatcataaattggtctaagaaaataaagttggtatcagctgtatacagcaccttgaacaatgttatatcccagctggtattacaaataagtcgttaacacacatttcaacaaagtcagctgcttttgaatgatgggaaacatgtg

SEQ ID NO: 5651 - DNA, 216200 bp, Homo sapiens
  RAI14 gene - 34692275 - 34868474 of chr5; NCBI Entrez Gene ID: 26064; Build 35; sequence includes 20,000 bases upstream of initiation codon and 20,000 bases downstream of termination codon of the gene
atttgaggtgacacattcaaaccaaagcactaattctctcttcagttgcaatttatctgccatttaatccatctagtacattttatattttaattgttatattttacatttctagaaattctatttggttcttttcaaaactgcagttattcttgatggtcttttgttcattccttagagtcatcattccctctgttacttcataaacagtttaagcatactcattttacattcttttttagataattctatgcccaaaaacttcttggggtctaattttgcccacaaatttgtgctgagtggtggtttattttatgggagcttattttctcgtgtgtttgtaattttctgttctttgttcatataaagttcctcttaaatgtaggaatcctgaagagtctgagttgaaggtgcttcccaccagatggcaggtattgcggtgttatgaactagaaatacgtttcaattaattgttttgagagagagggtcttgctctgtcacccaggctggagtgcagtggcacaatctctgctcattgtagcctcaacttcccagggctcaagtggtcctcccacctcagcctcctgaatagctgggactacagacacatgccactgtgcctgactaatttttttttaattttttattttttgtggagatggggttttgccatattggccaggctggtcgcaaactcctgggctcaagggattctcccacttcgccctcccaaagtgctgggattacaggcatggcttactattaaaaataatttttctacttggggtttcctggaccatgtcagtagtgtaggcactaaatatccatggggataggcttgggattataaattctcaggaaagtctcatttttgtttttgtttttcattcctttgaccaatgcctgagacaaacacatttccttgttgacttccttttgccagaagatggattttattttcctaacccaacttttcacttgagggagttggtatttgggacccctagctccttcctttaccctaattctcccactgaaaaccaggttcccaggatcagcagatgctctgtgcttccgagttttcacaccattttattgcaacattttatttcctttgaatctcacttactttcttagaagtgtagttgtgcatttggccaaatgtttggtgtgtcttatccagtaattttttgtgtttgtggaggggaatttttttcagaatttcgccagctctgttgctagaggcagaaggttttctcaggctctggaggctggagcttctgcaaccacttagaccttcatcagtcatgtatgaagcaactgtgctcttgcttcagtttaggggaacacagtgcctcctttctcctgtgcttctgtgaatgaggttccaataacccagggacatagtctgttgtagtgtattagtccattctcacattgctataaagaaataaagagactgggtaatttacaaagaaaagaggtttcattgactcacagttccacatggctggggaggcctcaggaaacttacaatcttggtggaaggggaagcaggcacatcttacatggcagcagtcgagagagagagagagaaagagagagagatgtgagagcaagtagggaaaactttctgacaaaatcatcagattttgtgagaattcactcactatcacaagaacagcatgggggaaactgtccccatgatccaatcacctcccagtaggtccttcccttgatacctggggattacaatttgagatgagatttgggtaggaacacagagccaaaccatatcatgtagcaaacagatcctgaggctaggactcaaaaaaccagagttctgccggcgcagtggttcttgcctgtaatcctagcactttaggaggccaagatgggtggaacatctaaggtcaggagttcaagacctgtctggctaatatggtgaaaccccttctctactaaaaatatcaaaaagtagccaggtgtggtggcgggcgcctgtaaccccagctactcaggaggctgagacaggagaattgcttgaacccgagaggcagaggctgcagtgagtcgacattgcaccattgcattccagcctgggcaacgagagcgaaacgccctctcaaaaacacacacacacacacacacacacacacacacaccagagttctagttttgactcttctctgtagacaaatacctaagactctctgaaactgcttttcaaatctgcaaaataaggtagtaattattgccttaggttttttttataagtaggagggtaaaaatatgacaagaggatgtgaaagtactttgttaactctaaagaagactggtataaatgcaagctactctgtaactgacccaagataaagtaccaagcattctctctgaagagcaatactctatgctcagatatgcctgctcctagggtagtatctacctattgagggtcttcagaatcatttgccaggactaaaaatatatcatattttagtaaacacacatattgtgtaatatcaatatcttccttttatttataagcaacacaaggctacagtagtaaaaaggaggggttgaaagaaaacgaactcttaaatattatacaaattgtatactcttgcaccttaggtgttcagcctatctaaatatttgtgctcatttagtttcatttgttttgttttcattccttgaatttcttccagatcttttcacatcatttgagtaccttaggccagattcattagaaaaacatctgcccatttgtctcacctggaccaaaggagcccactctgaacatctctaagctttcccatttgcctctagactgtgtctttttcaatgacctgcccctttggaaagggcaaagtgtagatgtgcagtgggcatctccaccctcatccccccactgtttatgtttgcctctgcattttgcaacccaaaagggtttatttttttctccaatgttttaaagatttactacccacagtagttccttagatgagcagcttcacagagagcagaaaaggtacagtgttttcactgtgtccaatataaattgaagatgtttctagcatgttaggggcactcacttttgacacactttgtccagctgtaagttcagtaaatttcatttttttctctttcacaaattcccttggaggattccttaaacaagtctctaggtgtcaaacttcttccttaggttttcccaagggcaaatatattcattccacatttcctgcctaatgtgtgccttaacctttgccttccagctgtgtacacttcatgaagatggtcccaacattcactggatcacctgacaaggcaagcaagtgagcactctctccatacagttgtctgttttgaatctggtgggcagagatatcacacttttctctgtacctcctggaggacggggaggaaggataatgacatgaaaaacatgaaaaatatttctttaatgactattttagtggctcccatctccctgtaacagaaatgtgctcacaaacctttatccatgctaagatggctagatgcttacctatggtgggctgtgacttttgtgtccccagtgaaccacgcttcccagcattcatgcctgtgtacagcccttcccatgtggaccctggccttggccatgtgactaatttttgtccatgggatgttggcaagcatgatgtagcagagattgataagcacttgcacactggggtgcatccttgtggaacactccttcttggaatccagctgccattttatgaggaagcccaagaaactatgtgaaggagaactgaggtcccagccaacaatctctagctgactccagccagggaccaccagcagctactgagtgtatgagtgaggccattccacatctttcagccatcccaggatcccagctactaccacatgaagcagaatgatcaacccacagaattataagaaataccaagaaaatcacaaatacctcacccctgacatcattgagtcagtgatccaaagccaccacttttcaaaatatgaggaaaacaagcccctattttattaaaaccactgttatctcaatacaggcagctgctttggatgctaatcatgtttcagtgaccacgttactagcatggaagctctgtagtatggtgtcgttctcaactctggctgcacataagaatagcaatctctgtgagtggagaagagtttacagtacttatattttggttcctgtagcttcataagatttcaacagagtattatgcctcacattttctttttttattattattatacttaaattctagggtacatgtgcacaatgtgcaggtttgttacataggtttacatgtgccatgttggtttgctgcacccattaactcttcatttacattaggtatttctcctaatgctatccctccccctgcccccgatcccatgacaggccccagggtgtgatgttctccaccctgtgtccaagtgttctcattgttcaattatcacctatgagtgaaaacatgcagtgtttggttttctgtccttgtgatagtttgctcggaatgatggtttccagctgcatccatgtccctgcaagggacatgaactcatccttttttatgactgcatagtattccatggtgtatatgtgccacattttcttaatccagtctatcattggtggacatttggattggttccaagtcttcgctattgtgaatagtgctgcaataaacatatgggtgcatgtatcttcatagtagcatgatttataatcctttgggtatatacccaataatggggttgctgggtcaaatggtatttctagttctagatccttgaggaatcaccacattgtcttccacaatggttgaactagtttacagtcccaccaacaatgtaaaagtgttcttatttctccacattatctccagcatctgttgtttcctgactttttaatgatcatcattttaactggtgtgagatggtatctcattgtggttttgatctgcatttctctgatgcccagtgatgatgagcattttttcatgtgtctgttggctgcataaacgttttcacttgagaagtgtctgttcacatcctttgcccacttgttgatggggtactttttttcttgtaaatttgtttaagttctttgtagattctggatattagccctttgtcagatgagtagattgcaaacattttctcccattctgtaggttgcctgttcactctgatggtagtttcttttgctgtgcagaagctctttagtttaattagatcccatttgtctattttggcgtttgttgccattgcttttggtgttttagacatgaagtccttgaccctgactatgtcctgaatggtattgcctagggtttcttctaggatttttatggttttaggtctaacgtttaagtctttaatccatcttgaattaatttttgtgtaaggtgtaaggaagcgatccagtttcagctttctacatatgactagccagttttcccagcaccatttattaaatagggaatcctttccccatttcttgtttttgtcaggtttgtcaaagatcagatggttgtagatgtgtggtgttacttctgaggcctgtgttctgttccattggtctacatatctgttttggtaccagtaccatgctgttttggttactgtagacttgtagtatagtttgaagtcaggtagcatgatgcccccagctttgttctttttgcttaggattgtcttggcaatgcaggctcttttttggttccatatgaactttaaagtagttttttccaattctgtgaagaaagtcattggtagcttgatgaggatggcattgaatctataaattactttgggcagtatggccattttcattatattgattctttctatccatcagcatggaatgttcttccatttgtttgtgtcttcttttatttcatcgagcagtggtttgtagttctccttgaagaggcctttcacatccctaagtctgattcctaggtattttattctctttgaagcaagtgtgaatgggagttcacccatgatttggctctctgtttgtctgttattagtatataggaatgcttgtgatttttgcacattgattttgtatcctgagactttgctgaagttgcttatcagcttaaggagattttgggctgagatgatggggttttctaaatatacaatcatgtcatctgcaaagagagacaatttgacttcctctcttcctatttgaatatgctttatttcttactcttgactgattgccccggccagaacttccaatgctatatcgaacaggagtggtgagagagggcatccctgtcttgtgacagttttcaaagggaatgcttccggtttttgtccattcagtatgatactagctgtgggtttgtcataaatagctcttattattttgagatatgtttcatcaatacatagtttattgagagtttttagcatgaggggctgttgaattttgtcgaaagccttttctgcatttattgagataatcatgtggtttttgtcactggttctgtttatgtggtggattatgtttattgatttgcgtatgttgaaccaggcttgcatcccagggatgaagcccacttgatcatggtggataagctttttgatgtgctgctggatttggtttgccagtattttattgaggattttcacatcgatgttctcagggatattggtctaaaattctctttttttgttgtgtctctgccaggatttggtatcaggatgatgctggcctcataaaatgagttagggagtattccctctttttctattgattggaatagtttcagaaggaatggtaccagctcctctttgtacctctggtagaattcggctgtgaatctgtctggtcctggactttttttggttggtaagctattaattattgcctcaatttcagagcctgttattggtctattcagagattcaacttcttcttggtttagtcttaggagggtgtatgtgtccaggaattatttctcctagattttctagttcatttgtgtagaggtgtttatagtattctctgatggtagtgtgcatttctgtgggattcgtggtgatatcccctttatcattttttattgcatctatttgattcttctctattttgttctttattagtcttactagtggtctgtcaattttgttgatcttttcagaaaaacagctcctggattcgttgattttttgaagggttttttgtgtctctatctccttcagttctgctctgatcttagttatttcttgtcttctgctagcttttgaatttgtttgctcttgcttctctagttcttttaattgtgatgttagggtgttgattttagatctttcttgctttctcttgtgggcatttagtgctataaatttccctctacaagctgctttaaatgtgtcccagagattctggtatgttgtgtctttgttctcattggtttcaaagaacatctttatctctgccttcatttcattatttacccagtagtcattcaggagcaggttgttcagtttccatacagttgtgcggttttgagtgagtttcttaatcctgagttctaatttgattgcactgtggtctgacagacagtttgttgtgatttctgttcttttacatttgctgaggagtgctttacttccaaccatgtggtcaattttggaataagtgcgatgtggtgttgagaagaatgtacattctgttgatttggggtggagagttctgtagatgtctattaggtcctcttggtgcagagctgagttcaagtcctgcatatccttgttaaccttctgtctccttgatctgtctaatattgaaagtggggtattaaagtctcccattattactgtgtgggagtctaagtctctttgtaggtctctaaggacttgctttatgaatctgggtgctcctgtattgggtgcatatatatttaggatagttaactcttcttattgaattgatccctttaccattgtgtaatggccttctttgtctcttttgatctttgttggtttaaagcctgttttctcggagagtaggattgcaacccctgcttttttttgctttccatttgcttggtaggtctttctccatccctttattttgaacctatgtgtgtctcagcacgtgagatgggtctcctgaatatggtacactgatgggtcttgactctttatccaatttgccagtctgtgtcttttaattgggacattcaggccattgacatttaaggttaatattgttatgtgtgaatttgatcctgtcattatgatgttagttggttattttgcccgttaattgatgcagtttcttcctagcatcgatggtctttacaatttggcatgtttttgcagtggctggtaccgtttgttcctttccatgtttagtgcttcctttaggagctcttgtaaggcaggcctggtgatgacaaagtctctcagcatttgcttgtctgtaaaggattttatttctctttcacttatgaagcttactttggctggatatgacattctgggctgaaaattcttttctttaagaatgttgtatattggcccccactgtcttctggcttgtagagtttctgccgagagatcagctgttagtgtgatgggcttccctttgtgggtaacccgaccttcctctctgtctccccttaacatttttccttcatttcaaccttggtgaatctgacgattatgtgtcttggggctgaacttcttgaggagtatctttgtggtgttctctgtatttcctgaatttgaatgttagcctgccttgctaggttggggaggttctcctcgatgataacctgaagagtgtcttccaagttggttctattctccccatcactttcgggtacaccaatcaaacgtagatttggtcttttcacatagtgccatatttcttggaggctttgtttgtttctttttactcctttttctctaaacttctcttcttgctttatttcattaatttgatcttcaatcactgataccctttcttccacttgatgaaatcagctattgaagcttgtgcatgcatcacgtagttctcatgccatggttttcagctccatcagttcatttaaggtcttctttacactgtttattctagttagccattcgtctaatcttttttcaaggtttttagcttccttgcgatgggttcaaacatcctcctttagctcggagaagtttgttattaccaaacttctgaagcctactcctgtcagctcgtcaaagtcattctccatccagctttgttcctttgctggcaaggagctgcgatcctttggaagagaagaggtgctctgatttttagaatgttcagcttttctgctctggtttctccccatctttgtggttttatctacctttggtctttgatgatggtgacctacagatggggttttggtgtggatgtcctttttgttgatgctgatgctattcctttccgtttgttagttttccttctaacagtcaggtccctcagctgcaggtctgttggagtttgctggaggtccactccagaccctgtttgcctgggtatcaccagcagaggctacagaacagcaaatattgcagaacagcaactattgctgcctgatccttcccctggaagcttggtctctgcctctatgaggtgtcttcccctgcctctgtgaggtgtcagttggcccctactgggaagtgtctcccagttaggctacatgaggttcagagacccacttgaggaggcagtctgtctgttctctgagctcaaacaccattctgggagaaccactgctccttcagagctgtcagacagggaaatttaagtctgcagaagtttctgctgccttctgttcagctatgtgctgcccagaggtgcccccagaggccttgctgagctgcagtggtctccacccagttcgagcttctctagctgctttgtttacctactcaagcctcagcaatggcggatgcccctcctactgccaggctgctgccttgcaggccgatctcagactactgcgctagcagtgagcaaggctccatgggcatgggacccgctgagctaggtgcgggatacaatctcctggtgttccatttgctaagaccattggaaaagcacagtatttgggtgagagtgtcctgtttttccaagtacagtctgtcactgcttcccttggctaggaaagtgaactcccctgaccccttgtgcttcccgggtgaggcgatgccccgctctgcttcagctcaccctccatgggctgcacccactgtccaaccagtcccaatgagatgaaccatgtacctcagctggaaatgcagaaatcactcatcttctgtgtccatcacactgggagctgcagaccagagctgttcctattcggccatcttggaatggactcccctatgcctcacattttcaagggcacagcttgctgggcaacaaggcttggcaaaactgcagaatagcaccaaaggactagatagctggcttggtgtggtggctcacgcctgtaatcccaacactttgggaggccaaggctggtggatcacctgaggtcaggagtttgagaccagcctgtataacatggcaaaaacccacctctacttaaaatacaaaaactagctgggtatggtggtgggtgcctgtaatcccagctactggggaggctgaggcatgagaatcactcgaacctgggaggtagaggttgcagtgagctgagatcgcgccactgcactccagcctgggcaacagagcgagactccatctcaaaaaaaaaaaagagctagataacaacatgaagtcagttgctgacttcttttgttgaccatctgtccatgaatatcaatatgccatctctccaatctctccagacaggacagaagctccttgagggttgagaacatctcatatttcttttttgtgtatgtgtgcaatgttgtatcttacataccagtcaataaataaagtttccatttaaaacttagcaaatggcatcttagaaatgttaatctttgatctatgacctttttaaagacagttgaattaatttccatagataccactctcttatttcccctcagactttacaactgtcttatgcttctcaatgttagtaatatttactgatattatttatttagttcttactctgtgccagacactattgtacaggcttcgtatatattaattatttaatctccaaaataacccaagaggcaggtactaatgttacccccatttggcagataaggaaaatgaagccaagggagattaagtaatctgcccccaaaaacacagctactaagtggagaaactggggtttaaatttactacctgatagaggacttcttgtttcccttcttaaaataaattctttcattttttttctttagtccatatttaaaaacaaagagaagagtcaggcacagtggtgcatgcgtgttgtcccagctacttgggaggctgaggtgggaaaatccattgagcccaggagtttgagaccagcctgggtgacatagcaagaccctgtctcaaaacatagttaataaaaaatacattttagtctagacacgggggctcccaggactttgggaagtcaaggtgggaggatcgcttgcactcagaagttcgagataagcctgggcaacaaagtgagaccctatctctatagaaacaaacaaacaaagtcccacaaggtaaataataacaatactaataaataaatacaatatttttaaaaagagaaaataaaagtgattttcaccatgaatgctgcccagtagctgacaactgcttgggggtgtagaagcccactcttgaggccatgctaggagaacccctgcctgggtgtgccttctttgttctcactgaccatctgcagaactggtctcactcacaccattcaaaaatttatccaaaataccactctaaactctaatgattttccatccctctcaaacaaacatgcaaatcagcttggccagacttggagcagaaggcagtgtggtcaggaagggagaatccagatgagaaggagcacacaggatgttctcataatttacatttgttcatatgagcatgttatgttggatgtaaatggagagcgtcctcttaagacacacagtttaagtaaaaatatttcaaaatgcttcccagaaacccacaaagcaaacacgagacccactcagacctctacaaccctctctttgaccttgatccctgagtcttttggtggcaagtttcccaggctcactcggtgccaccttactttgttttctggttctctccaagggcttccaaaattcccttccctgttacataatctgaaaggacaaacttccctctggttggccaaaagtgacctggatatccttaacaccagaatcttccctccccacttttgtggtctattatcctgaagtcagtatgtcttcttggcttttgtgttctcagccttccaggaatccacaagtggaagtcgcatggcctctcttcctgcttctggtggcttctgggaccttccactctaaactctaatcatttagaaggaatgctattcatgtggaaggaatattttcacagcggtctccctgactcccacagttccatccctctcctcttttctggttccatgttctggcatgtcacagtatagtcaagcacattttcacagccttcatctttttattctggaactcaaaccagaagtctaagacaaaaaactacatggctctttttgaaagagaaggcaaaaaaagaataataatttagatagaagaattctcatcctgaatgtgagaaacctgcttaaagtgcatagctggatagttacaaaagtttgtattaaagcaaaacaaagaacttgtggaatgttttcagtatcttcacagtaggccgggcatggtagctcacacctataatcccagcactttgggaggctgaggtaggcagatcacttgaggtcaggagttcgagaccagcctggccaacatggtgaaaccccatctctactaaaatacaaaaattagatgggcattgtggtgtgcacctgtaatcccagctactcggaaggatgaggcaggagaatcgcttgaaccaggaggcagaggctgcagtgagctgagattgccccactgcactctagccttggtgacagagtgagactctgtctcaaaaaaaaaaaaactatatatatagatatagatacatatcttcacagtagtacagccatatgtcttaagcatgaccaatctgctgtgaaaagtgtctcttaaaactgtgttcatggtcgagtgtggtggctcatacctataatcccagtacttgggaaggccaaggcaagagggtcacttgagcccaggagcttgagactagcgtaggcaacatggtgagaccctgtcactacaaaaaataaaaaatttaagtgaacatggtggcatatacttgtggtcccagctacttgggaggctgaggcaagaggatcagttgagcccaggaggtcgaggctacagtgagttgtgtgccactgtgctccagcttaggtgacagagtgagaccatctcaaaaaaaaaaaaaaaaagaaaagaaaaaaaatgttcactcatacagtacaaagatagatttttaaaactatgtagtctactaaggattttaaagaaagcaaacaaaaaatggaagaatgaaaatgaataacagaagccaaatggatacagagcctttgaaaaacatgaacaaagccgggtgtggtggcatgtacctgtagtcccagctactggggaggctgaagtgagaggatcacttgagcatggggttgcagtaagccgaggtcgcaccactgcactccagcctgggcgacagagcaagaacttatccaaaaaaaaaaaaaaaaggctgggcgcagtggctcatgcctgtaatcccagcactttgggaggctgaggcaggtgaatcacaaggtcaggagtttgagtccagcctggccaatatggtgaaatctctgtctctactaaaaaaaaatacaaaaattatccaggcgtagtggtggatgcctgtagtcctagctacccaggaggctgaggaaggagagtcgcttgaacctgggaggcggaaattgcagtgagctgagatcatgccattgcactccagcctgggtgacagagcgagactccatctcaaaaaaaaaaaggaaaagaaaaacatagacaagaaaccattaatagatttgaaataattcatcagcaaaagtagtacacagatttactaccggtgcactatttggataagaaagaacacaaaatatctcataagcagaaattgacctcaatgaagaaaacaggaatctcagagggcaggtttaactccataatagaaaacaaatgtaccagagagataccaacaaaaatagcaactcagtttagaatcactctgtcaagaaatctttctggagcatcaacttttgcaaggtccatggcaagaaccaccccaccctttttacctaatttccctctgcttgcaatgctaagtcaagagccagatgctctgacatggctgggacaaccaataaagcagtggccccatttaatgatgatctagggaaagactgtaaaataccaatgcttgggccccacaccagaccactttagtaagtatcctagggtatggggccaaggcagttggtgacttttaaaagcaggtgattctaaatgggctgccaagattgtgatccactgtagaggaagcaagaaaagctgcacctggtgtacttgtggctccaaacaccacattattgcttctgactctgtgctttgtggaaaccacttctcttagtcttctgataacccattaactgccttcttgatgttcatgaactcctcataataccctcctccagcaccgtaattggagaatattttatggaatttctgatatgcatagccgaacaaccaacttggccatactgatggctatttggatcttaaaaatgtccttttgaagaagagaaggccaccaagattagctttccatttttatttgcctgttccaaggctgatgtcgcttgggtcctaagtgctctcatagcagtcttctgcctgcagaacggggagaagtaatgaggtcaatatcagagtttgtaaatacaggcagcctgaagacaatatacagaggagtgtttcaaaggtccactctggtcaggcatccaagctttgattctcggctccactctttctggttttacgacttgggcaagttgctggatctacttgaaactcagtttctgcacctgtgaaaacagggtaatactacatccaagttgctgtgaggattaagaaaaatctcccacctactaaaatttcaatcctatgttagctcttagcagagagtgttgcacagcagttaagaatgatgcctctggagtcagcttaccctcgtttaaatcccagcattgctactcactagctgagtggctttgggcaagttacttaatctctctgtgctccagttccctcttgtgccccaaagggataattatacctacagggctgatgtcatgattaaatgacctaacattaggacgacctgacatcccagtttgcttaggacagttccagtttctgcctttagtcctagtgttctggctggcttagaagttacccatcctctttcactctcaaaattgtcccagattagacaattaagtagacagtcatcatagttaatatatacatggcatagaaaagtacttagtatagaatagctgctaaatatgtgttagctgctaatattagctcctacagcagtactaaccaatagaaatatgtaagccatgtatacttttaaattttcagcaaccacatttctaaaggtaaaaaagaaataggtgaaattagtgttgagatttaacccaatatatcccaaaattatttcaatgcctaatataaaaagtattagtgagacatttttttcattttgtaaaatactaactctttgaaatctggtgtgaattgcatttacagcacagcacaattcagactagcaacatttcaagtgtccagcagccatgtgtggctagcagctaacatgctgcccagcacagctctgaggatttatattcctcccgtgtgatgatggaccagagagtcttacagccttctcaggtctgtaatgccgagtttgagatgcttagcttctctgccacactctgcaagcagggcactgatgcaggtcttcggaatgtatttattgccaaagatcttagcctcgtttcctcggcaggtgcccaacctcactgagaagaatattgtagtagcctcttacccttggagaaatctctgctgactccctggcaagtggaaaaaccatgagccaattagtgttttgcaggctacttcattactatggtcttactaattatgaaaaggaatgccaaggttattttattaattttcccatgttacagttttcttctatttggaaacatccccaggaaaatacaaaaagtgttttttctatgaatatttggactttttctggtagattatctccctccaaccttctgattgtgttattgcatttttattctattctctggactgggtccaatatctccacattcctctaaatcatgctgcctctaactagacccagaagtacagtcagctcctgaccaaacaccaaataaagtggagaatgactttttggctgtggtgtgatatctatctctccttcctcctgcaggggcagtttcttgttatcccaacaagtcttagctttggttcctcagacttgggcaatcaagatactcataatctaagaagaaccagtattgatgaaggatgagcaaggaaaaagggatgatatcatttaatctcaagaataaaaattgagcccactcaatcaatgaatttcatttgtgatgtcctggatggcaacactctttggagtttacaattgtattgctttgacaagactgacctgctagtgtgatcagaaaacaatgtttcgtcatgaaatgacagggcagttttgcttatgaagggtctacaaactaagagaataggtttaggatgtcagaactgaaaaagatcgggtatggtggcacatgcctgtaatcccagcactttgggaggccgaggcaggcagatcgcttgagcccaggagttcgagaccagtctgggcaacatggcgtaaccctgtctctaccaaaagtacaaaaaaaaaaaaaaaaaaaaaattaccgggtgtggtggcccacacctgtagtcccagctagtgaggtgggacctgggggctgaggtgggaggaaagcttcagcttggaggttgaggctgcagtgagccatgattgtgccactgcactcctgcctgggcaccaaagtgagacaaagatagaaagaagacagagagagagagagaaaggaaggaaggaaggaaggaaggaaaaaaaggaaaagaaggaaagagagaaaaaagaaaacaaaagaaaagaaagatcttggaggtcatgtactttgatgttcccttctactaatgaggaaagggggaacaggggaagttaaaacccttggtgaaggtcaaatggcaagtaagcaaaagaaatgggtcaggaaacccagtctccttgctcttggtgctcatggcactacatattacactgctgttaccttgatatttggataaaggaatgcaacatactgctcctcccaaaaggttttactactttacacaggttagctggtcattttatttttgcttctttaactcaacccctttcacctgggcctagttctcatcaaagggtggtattcaatgtatccaatgaacccaattagcatttctaaaacgcctgggcaacacaaccaataagaagatgctattgaacctcttacttccccactaatccccctgcagttggcagaacttagctgccatgctcagtctacagactacaaagttgctttgagtttcaaaagtggggatctggaaaaggatcttggcacagcccaaaaaaataagaatactttcacaacgatccctcatccagagttagacttgctgactttagagggtgggagtgtaaactaaggagaatcatatacaaaccacctatgggaatctaagaggtgataggctggtaggctctttggaggtggctgggacagagaaaaaagaagagggacaggacctctgtgaatcaaagtcagatgtgcctgccttagacaatcattgtttaatgttgtctaatattttaactccttcaaaatgtcaactgttcctacagaatacacacatgtcaaatttccaagacagcatcatctacctgtaccatgctccaaatcccatcctcccagctgcccctacttgaaccagactgacctgcaaaaatagagcagaaaactcacaggcagtaatgttccccttaaataccctacaatatgtcattaacaagaatcacgatgaaacactattgtagaaattgccagcattaaaccaaaagaatgttggtcagttcatgtttcttttacagtgtgactttgtttgagagggataaaggacaggaagaggagtgtacatcttgctttagctgttcctcacttggctaaggaacttttgctgtaggaagtgaagaccctgcacctagttacaaggcttttgatgcttgtttgtcaagttcaactgttaaaggggagataggctcttccctagtagggagagggaggaaggaaagggggatggggcggggggagggaacaggtaatatctgccatataaatattagtatgtagctgacacgttataaactgagctgttagggtgaatttcaattttgttggaatcgaccttttttccctcttaagttcaattgacttacagtagatcccagaaagaactcaatacgttatttattctagaaagctttcttccctgagcaaaggaggcagagctaacgaggagaagggaggagcttaggtgaacagaactgaagtcacagctggttagcatgactagaatgcatggaaaagccagcccaaattagatgagtgggtagatagagagctttgaaatccttggaattaatggtggagtccatcgtaattgaaaggtcgggccttagtgggctgggatagggagagaagctgtcggggacctggggcagtgagcctgtaccccgtggcttctcacacactattttgaaggcgttcccatgcgcaatctcgcctgtcagttcaggctgtaggtttctcctttctaactcctgagcagaacaacactgaacggtggtagtcttgccttgccacccaatgagtgctagaaaacagtcacttcaaccaattggttcagtccggagaacgtgagcacattctactttactttctgttcaatgattttggaaaacaaccttttagattctggtcagaaggggcttggatccgtgactttgaaacactcgccactaccacaaacgactttggaagttaatcagaaataaacagtatctgggatctcatccgtcctaaacccaggggtcagagcgtggggggcttccactaacttcaggttaagaggatgaaacagatccgcggagaagggtcccacgatccctggagactaaaagcaagccacgaacagccgggacgcgcgggccggggagatgcgccgggggctggagggcggagagcaccccccgcaggtcccggccagagcccggggccgggtcacctgactcgcggaatttggggccgcgaggggtggaatgggaggggaatggttagcgcctcccttcccgctcccactggatccaggtcggcgggggccggcgcccggcggccacgtggtggtgctgccgctgcccccgccccgccggcctagcccgggagctcggcgcccactgacccccgcagcgggggaggaggagggactgcggcgcaggaagccgagcaggaagcgagcccggcggccgcgttttcctggggaagcggcgggcggggtggagcagccagctgggtccggggagcgccgccgccgcctcgatggggtgagtgcgcggcacggagttgggaggctcccggcgcggggtcccgggctcgtgtccccgcctttgtgtctggagctcgggcgcgggaggcgctggggacggcgcccgggcggagcggctgagcgggctgcagccggggtcccgccacctctccctggtccaccgccggcagcccactgtctgcggagagcagatctggggacaagaggaaggagaggaaggtggagatgagggtagagcgggaagacccggccaagttaggagaagggttcttcccgggtcctccgcgactcgcaggccggctggggcggggcgcggggcaggggccgcggcggagggagcgcgggtgggaatgaatgagcagacccggagatgcaccctggagtctgcgccgggtcccacctgtttcgccccgcgcggcgcctcgctgcccccgcgtcggtgctgctgagcccaatccgcctcccggctgaacttggaggaggtggggagggaggtgcgagcgggagactccgggtggctcccaggacgcggggtccgctattgttcctcctctgactccagggagcccctcggccggcccaagggcgggggcgagacccctctgggcctgcccctgccccctaccttgttttccccgccgcagctcggggagaacggatgctggagttggggcagactcggggccgccgggacttcgggagtaaggaggacgtggagccaccagaaaggcgcccgccatctcccgcgacccctgcctggtggggggtggggggtggggtgtcgtcctcaaccaccttcgctgccttcttgggcaggttggtgtcggtttagtttctgcggtttgcagggttgacatcctaactcctttgagtttcgcatcccccttttgtggagggggctcagagcctggagaagcaacagacggggaattaaggcagatgcagcccagcacagcgtggaggggtccgaagtggcctcacgggggcctgagcatggctgtctttccaggctcctctttatttgccaggagcccagctaagcccaactttactcccagaaatgttgaggggaatctgcggactcgaggcccctcgcctcgggaccagcggcttctcttcgccgcagctcacgcatgatcggggtgggattccgtcttccttccgggagaggagaatgcccagctgcctgggatggggaaacgttgccggatctctggggaatgtggtctcaaggctgcaggggcctggcagagaggaactgtccatcactaggacatagccgaagctcgccttagcgaagagagtctcacctcctcgggctttgcacagagttggagaagaggtcgggaatcacagggaggctggattttggctgctctgtccccagcctgcaggtccctgttcgccctgtggctcggaattttattactgatgtatataatctgataatcttttcttaatgatgcctaacaagtgtgatttttttcccccttgggtttgtaagacagttgattttatgtgaggagattgatccagttcttatattttagccagtgcttgtctaacagagattgggagagctatcccgtgctgggctgttgcacagttttcatctccattcactgagatgcttcagtaatgaatttattgttttatggctttttggagatggtggtggtggtggtgtgattataaccctgctggaaaatcttattactgttatctgaattgaagagacagaaaggatgctgagccccctagggattccgtaggggaatgatgtagtgtcccgcccaccagtagtgaacctgacagtgaaattctctctccagtctgctagttttcaaagcatgttctaggcaggtacacgtactatcacctaggctttaaaagtgaagaagcagatttggaggttaagaacaactgggccttggaattaatagaatgcagtggacaacttttgcctctccttcctccaccccctccctcccttccttctttccttttttttcatcctttaaaaataaaaataagggccaggcatggtgcttatgcctgtaatcccagcactttgggaggccgaggcaggcggatcatgaggtcaggagatcgagaccatcctggccaacacagtgaaaccccgtctctactaaaaatacaaaaaataaaaattagctgggcgtggtggcacgcacttgtaatcccagctacttgagaggctgaggcaggagaatcgcttgaacccgggaggtggaggttgcagtgagctgggattgcgccactgcactccaacctggcgacagagcaagactctgtctcaaataaataaataaataaataagtatgaaatatttctaacatacataaaaacagagtatagtaagccattttgtcttctacttcctaggtttaatagttgctaatattttcatatttgatccatacctctccccccccggaaaaataaactataacttaaatatttgatctattcctactcctttgcctccatcctcaggtaacctctaatgtgaagttagcgcacacagttctcaagcatgtttggaactacactgtatccacaaaaaaatacatgtgagtttgtgtttaacattttacataaatggcataattctacctatgtatagcttgcatttttaacttactatgtttttgagatacatgtgttaatagatctttattcactttagctgttacagagaatcccagtgtatgaaaaaagtatagtatatttactcccttgccaagagtaagttagggtttctggtttttcactgttttttgtttgagctgcggtctcgctctgtcacccaggctggagtgcagtatcgtgatcactgctcactacagcctcaatctcctgggctcaagcagtcctcctgcctcatcctccaaagtggctgggaccacaggcacatgccaccatgcctggctaatttttttcatttttgtagagacagggtcttactatgttgctcaggctggccttgaactctcagcctcaagtgagccttctacctcagccttccacagtgcatgagccactgtgcctggcctagtttttcactgttacactttttctgctgagtgacactctatttccattttcatttttatttttatttctttttactataacagtttgtacaataaacatcctgagatgttttcttgtgcacacatttttctgttacacacttatttagttagttgctgggtaatgaagtttaggtaatattgcatttattattcattcttcaacaaatatttagggtgcttgtatggtcttggctatctgttgactaaaaaagtgaaactgattaaattctaagaagattacatagttggctggattatttttttcttttttctttctttgttttaattaagaaaagtgggactggtgtagtgttgcatgcctgtaatcccagcactttgggaggccaaggcaggaggattgcttgaactcaggagttcaaaactagcctgggaaacatggtaaaacctcatctctacaaaaaatacaaaaattagctgggtgtggtggtgtgcctgtggtcctagctactcaggaggctgaggtgggaggattgcttgagtcctggatgtcaaggctgcagtgagcctagattacaccactgcattgcagcctgggcgacagagtgagaccctgtctcagctcccagcactttgggaggccgaggcaggtggatcacctgaggtcaggagttcgagaccagcctgaccaacatggagaaaccccgtctctactaaaaatacaaaattacccaggcgtggtggcgcatgcctgtaatcccagctactcgggaggctaaggcagatgaatcgcttgaacctgggaggtggaggttgcagtgagccgagatcccaccggccattgtactccagcctgggcaacaagagtgaaactccaactcaaagagagaaagaaaaagaaaaagtggctcttcattgtaaaattgaagcatgagacaaatccatggtgctgtttgggattcttgtgcagaaaccttttctcagctactcactggccgtgtgaccttggattactcacccaacctcctcttcctcatttctttggtaagattaaggggtaggagtaagcatttacaaaggcacattcctgttctaagagtctgtgaaaatgttgctgtgttagtgacgcatttttaccctaatggtaaccactcaggctgaaaggagtttaaggcatttaaacacattggcgtcctcattccttcaaattgctgggcacattcttttttttttttttccctaagttcatgtcagacacatgttacacatgcaatcatcatgctcgtgaattctgcaaaaggatcaccaggcgtcttgcctcagagcctttgcatgtgctcttcccactacctggaaagcacttctcttagacgtctacatggctgtgtcatcccttcaggtgttatgttgagacacctccttccagtccagcctgcaacctcatccctgctttatttacctccaaggcacttaccaccttctagcttgccgtgtataggttgagtattctttattccagaatgcttgggaccagaagtgtttcagattttggatatttttaaaatttttggagtatttgtattacatggttgaacattcctgatccaaaaatttgaagtgctccggtgggtctttcctttggtgtcgtgtaggtgctcaaagagttttggactttggagcatttcagattcagattcagattcctggtttagggatactcaatctataatttatatcagtattctgtactagattatgagctctacaaaggcatggggtttgccactcttgtttactgttgtattcatggtgtctagaacaatgttgacccctagcaggtaaacagatgtttgatgaacaaatggatatgctttttgttgttattttttctctgtggaatttcgcctttaacacttactggatatcctaaatggtgctggtatgtgcaccatatctcatatttacagattccttcagggtaagaaaacttatgtcttctagggaaaccactccttttaaatctatgtgatttatcctataagccacttaatgtcttcagactttttttctcccaacattttgcctaatcctgaatttagaggaaaacataagtaacacggtgcttggaagcacacccatctttccttttgtgataacctggtttccaatgcgatgaatgtggaagatgcataaccagtagatgctgactgtattccacacgacatctgcagtaacaggccagcagccatcccaagcaacatgaagcacactgcatttctttcttttttcttgagatgggatcttgctctgttctggaactcctgggctcaagtgatcctcccacctcagcttctcaaatagttgtgtctacaggcgcgtgccaacacacctgcctagtttttcttttactttttacaaagacaaggtctccttatgttttccaggctggtcttgaactcctgggctcagaaggtcctcctgcttcagcctcttgaagtgctgggattacaggcatgagccactgcccccggtccacactgcgtttctaagaacaaacagtgtattttgttggattgttgcagagtgtacatcatcattgccctgactttgtgcttttatctatgaggatttttttggagggggaggagggatgtatttttcatgatggaaggaaaatgagaaccttaatctgaagatgttggagcaactaatatgtagaaaggtccctagatatactctaagaattgccacatcgtacagtccttaattcatggcacaaaaaacattcactattatagcactaatgcattgtttcagtagaagccaactgaattttttctaccttgcatgatgagtataggagttgacaaaacaaagctaaatatatcagaggcctcttggatgcattttatatggtgatagggaaaaggagtctagattttttttcccagtgaactatattaggtatacgatactgatgatatcctttaaaacattactagaatactgaagtacaccatttacatttcttattgtatcctctgtaataaaatgatattgaaagaaatcagtatattatggatccagatagggttaaactttaagctgaaaatcataaacatagaattatatgattattagtaaaatgttgcacaatttaaacagattttttttttttttttttttttttagacacagagtctcactctgttgcccacgcgggagtgcaatagggtgatctcggctcactgcaacctccgcctctcaagttcaatcaattctcctgcctcagcctcctgagtagctgggactgcaggtacatgccaccatgcccggctgatttttgtatttttagtagagatggggtttcatgttggccatggctggccaggctggtctcgaactcctgacctcaagtgatccacctgccttggcctcccaaagtgctgggattacaggtgtgagccaccatgcccagtttaaagatatttcttccctttgtagttagtcatgagctgaaaagtacaggtggttcaacaaaagataaaaattgttcatcaaatgtcaattttctagctccagccatctacaatgaacaaaaaaattagcctcgtctttgacatcaggcccactgagagatatcagcaaatctaatcagtattttaaaaagtaacttttggccaggcatggtggttcacacctgtaattctagcactttgagaagctgaggcaggaagatcacttaagcccaggagttaagagaccagcttgggaaacatggcgaaactttgtctctaaaaaaatacaaaaattagttgggcatggtggtgcattcctgtagtcccagctactcaggaggctgaggtgggaggatcacctcaacccatgagatcgagggttgcagtgagccaaaatcttaccactacactccagcatgggcaacagagtgagaccctgtctaaaaaaataaataaatacaaataaaaagtaactttactgacttaaccatgtgtttaaaaacaaagcagtaccttcttctgtttaactgaaggaagcatgccttgttcttcaattttatattctatgtgtccagtagagtatctgccacacagtaggagattaacatctctcaactactcctgcctcagaggtcattaagcccctcatggcggtcatcagatatagagttgtcctagtctagaggagaattaaacaataatcaaaaggcagaaatcagcaacaaagtgcgaagtcgaagttcagaagatgtgaaagaaacacttttcctccttatccactctttgcggaagtttgtgcattgtgtcttgattgattcaccagctgggtttttgtgatcagtgtcacctcatctaaccttacttgcgatctaggccagtcccttctgtagtgaatggcattcactggaaattagtcttgccgtataattccatgaccatatgtcacaccggggcaaggggacacctttgggaagttcttcatgatttgctaatccctgcttctaaataagcagaatctagttgtgagaaaaggtggttgtagtccaagaagcttactgtacagtggaaggaaatacatgggctctttttttttctttccttatttatttatttattttcttaaattgacatttaggccaggcacagtggctgctgcctgtaatccaagccctttgagaggctgaggagggcagaccacttgagctcaggagttcaagaccagtctgggcaacatggcacaaaaccccatatctactttaaaaaaaaaaagtatatttatattgcagtgagccaagatcacaccactgcactccagcctgggtgacagcgagacactgtctcaaaaaaaaaaaaaaaaggaaagaaaaaaattgacatttagtgaacaccaaagcttattatcaaggaaccagtttcccttacacttatttattatattaccttttaaagctcaacttaatttttcatatccattttaggtattgttatcgataagatattctgttttcttatgatctagataagttcaatttgcttaattaatttatttattaaattttttatttccatgggttattggggaactgggtgtttggttacatgagtaagttctttagtggtgatttgtgagattttggtgtacccatcacctgagcagtatacgctgcatcctatttgtagtcttttatccctcactcccttcccaccctttcctcctgagtccccaaagtccattttgtcattcttatgcctttgcatcctcatagcttagctcctacttatgggtaggaatgtacgatgtttggctttccattcctgagttacttcacttagaataataatctccaatctcatccaggtcactgtgaatgctattagttcactcctttttatggctaagtagtatccatcatatatatatatatatgtgtatatatatatatatgtgtatatatatatgtatatatatgtgtatatatatgtgtatatatatgtgtatatatatgtgtatatatatgtgtatatatatgtgtatatatatgtgtatatatgtatgtgtatatatatacacatatatatgtgtgtgtatatatatatatacacacatatatatatgtatatatatacacacaccacagtttctttatccactcattgattgatgggtatttgggttggttccacgtttttgcaatcagtttgcttaatttagctgttcttttcaaagagataataactctaaaactaacaagcagcatctacctcttttcactttcactaagtctgtccagttccttttgctggctgaagtgatagacactcagaaaacaggcagtgttaactgatggagaataaaaggccagagaagcctccttttgcactagggcagcacagagtaaagtgttttccatttttttttctttttttttttttttctctaagaggaatccatttgcaaaccagagaaaaccatccagcagtgattcttaaatattcgtgaggcatagatggacacttgcaaatctgatgggggttttggaccattcttccttggagaaactgatgtatgtacaatgatgctataaattcataatttttatcagtctcatgagtttcatggaactccttgccctaaggccatttataaacctccttggaatacccaggttaagaacccacaatgaccacctctcaaagtttgagaatacaattacaagggctctatttttctatcatgtgccgctattccccaccccactgccacccacagttcgaaaacctatcatacatgagtgaaaagtaataattgtgggttttatactctcaatttgaaaactagtcatcggttgctatgtcaaccagtcaacatactattgaccatttttaggatctatttctattggatgtaataaaatgcaatttatatgcaatgaaaaggtggttttgtaatatgactatttcacagagacctgatgaattctaaggatgagtcttaagtttctcaccccaaggagttgggtctgttctgtcttcagcttttggtggcagcagtttcccagttttgctgttaacaggaaggaatggagatgtcccaggccccacctgacaattcttgtagtctcacaggagatgtcctgcgccccacttgacaatactcctaggctcacagtaggtgtcccaggcaacccctgacagtactcctaggctcacagatgtcccggccccccgacagtactcctagtctcacagtaggtgtcccaggcacctcctgacagtacttctaggctcacaggtaggcctttggctgctcagcccagtgggggaaatatccccaactggctcttcactttgcctttttcttcttggccccccagcctgatgtggctgtcttgatggggacctgaagaagacagggccacacttttagttgaggaactgaccctcagctggaagcctgctcttctggaggaaaacatgcttctgtgggaagtattgtgcatgggggaagggactgccacgtcagctgtactcagaactgctaatatcagcattcaccttgggtgacgtcctcaagccatttcagtcaaaaaccaagcaaaaagggctgtggatctgcctgtaacaggctgcctgcctgacctgacagaagctcttcagatgggtcattgtaattgacttgagcaccttctctgccataggcactttgctgctggactgtcctcgaataaggtcagggctggccgtagtcattgtcaggtttcccattaccagtatgtgttgatgggataattgggtattagaagatctctggatgaatgacaagccctgccctcggggacttaagagttttagccaggttagatatggtcgcaatctgccacagtacaaggcgactgttagtggtgggaatggggtggcggtggtgggagggaattcttttcacagatgaggctgaggcctagagaaatggccccttggaaagggacagttaatgagaggcagagatggatgagaccctggtactggctgctcagcactgcacttctacacattatacttttctgtttctctcacaggtcaacagtgaccttgagactcctgtatgtagctaattataattgttatttggaattgatatcatttttctattttgagaaaatgttcacgtttctctttttttctgagacaggatctcgctctgtcccttaggctggagtgcagtggtgcaatcttagctcaccgcagccttgacctcctgggctcaagcagtcctcccaccttagcctccctggagctggcactacaggtgtgtaccaccactcctggtgaatttttgtatttttgtagagacagggtttcatcatgttacccgggctggtctcaaactcctgagctcaagcaatccgcctgctgtggcctcccaaaagtgctgggattacaggtatgagccaccatgccctgcctgagccttttttattattattattttttttgcattggaaaaaaactatttaaaacataggcatagaaattatagccaataacggtatatttaccatccagaatttccttgggctacttttgatttttgaggaaagactcctaagtcttaagtgcagaagacttgtatagacttggacaattcacctcgaagaagagggtaaaaattgggagttccaggggaggccaatggcattgagcagcagcacgaaggtcagaaaaggtgcaggacccaggcccttggctgtgagaaccgtgtaacaaatgtttgtcaggctttgttggtgagctcacagattccatgctgaggctcttaatctgacaagaatgctcaagtaatttgaacatctcctcccatgaaagctgacatattggtgattgatcctttttcaaaaatgaaaggaattacttctgttgccgagacaggagaggcatacacagtggcctcttctcagccacccagaggatgtgggaacttgtgagacaggaggctcatggacaaccggctgcattttctttcttctctaggaaagacagccaagacaggggtggactcacgcgtataatcccagcactttgggaggctgaggcaggtggatcacttgaggtcaggagttcaagacgagcctggccaacatggtgaaaccccatctccactaaaaatacaaaaattagctgggcatgatggcgcacgcctgtgatcccagattctcgagaggctgaggcatgagaattgcttgaactcgggaagcggaggttgcactgagccgagagtacaccattgcactccagcctaggcaacagagcgagactctgtctcaaaaaaaaaaaaaaaaggtgggccccacgaagggttcagtgtcctttatttaacatgttaggaggccatagcaccaggcaaggtgctgagtatttcatctttctgtctccaagcacaggcccacttcagacccagtttctatttatcatgggtgcaagttgattcaaatgctctcacaaccttcttgggtctttgtttaaagaaataaaaaaatttcttagattttctttggagttgatatcatttttctcttttgagaaaaacatttcacattttttatgagcttttttaaattgggaaaaaaaaactatttaaaatatcggcatggaaactgtcatcaatatccatatacttaccatccaagattttcttggagtgtgttttttgaggaaaaactcatgtctgccgctaacttcatgatgtatacagccactcagcaatcttgataaattcctaggtaattaggttcttttttttttcttgagatagagtctcgctctgtccccaggccagagtgcaatggcatcatctcggctcactgcaacctctgcctctcaggtttaagcgattctcctgcttcagcctcctgagtagctgggactacaggcgtgtgccaccacgtccagctaatttttgtattttcagtagagacggggtttcactatgttggccaggatggtcttgatctcctgaactcgtgatcctcccgccttggcctcccaaagtgctgggattacaggcgtgagccaccacacccagccagtaattaggttctttctgtgctatacaacttttcacagtgttgggtgtgctatttgtttccttttgcaactgcttttcttctacagtctctaaaagcctaatgagacaggcacacgatgcactgatttcctccaggtgatacctatctcaagcctgtctcccggccaatctgttgatggctttgttactgtttgtgccttgtttggcaacaggctttctttctgtctcttgtttaaaccaacccctgattatttttaagtgcatagtccctacaacaaagggtatttgattctatgcctctttgaccaaataaattgaaagtaggtgtttatatccactgtggcaaaagaaacaaggagcagctcaccctgtcctggtgataagtgctacaggctcgggtggcaggccgctggctgtgggcgcttttgtgtgtggcttcccgaacagtagcactgtgcacctctgccccattcttgtctcactgggtgatgtttttcaggattccatttgtataatatcagtgtttagattgtcctgaagaattgcagtattttcttttttatagggtagagagagttgtgcaggatggaataatttcttaaggaacagaaatgtcctaatgttagagaagtacataagtatctaaacgttctgcttttccaaattgttgccaagacatggaaacctccatctcagtctgctgtcagcccaggcgaacgtaaaaatagccacttcacttgtctataattctctttatattttctctgttattgactttgtatctttagcaaagctatatggaagaggatttgttgactccgtgaatttaataaagttattccttaagcatatgctctacatgtgagaacaaagaaataaagatgctactccattccagtgaggcaggggtgcgtgaggacacacagccagaaggaatggaatgccttttgcaaattggtccattcgtatttcctagagggacctctatgtgccagcagtaattctgaggactcgttccgtctttgaaggcaactgaattttttctattaagtactaaaaagattggtcagttggccagacttttaaaaattactggtgttgtctcacgtgcagcccagtgtcacgtgttgggcttggaacttgaaccttagtttaatctagcctcctctatttataagctatgcccctttggctaaataaactttctctgctgcaatttcctagtctggaagctgagaataataacagtagaatttaattctgaagtgcttgtgggcattaaatgagatgacattcatttataataaaataatttaaaaaataaaattttgcaaagtaatctttaaggatagctattgtggctgttattatcattgctaatgtcatcatgctctttatcaccctgcctttaaggaactgctgatatattggccaacatgattattcctgccattataatctatagcaataaagagaggttgccccatatgttattgttaacacatctgccttgcatcttctgttcaatttgcaactgtttctctgtattagcattctccctatttacctttctattattatgtcattgtgtaatgtgaacgatgtaaagatgtagttcttttattagtccccagtcttatcttattccagattgcattaacaaggtcctcagtctcaccagagaacttgtgttgcttcaaccgtaatctagacacagagtagtaacgtcttggttaaactgaaaatggtagctcttagcatgaagcaatggtatagttaattccctattgatgtttttggaaaattttcagacatgttttctgaatagtatataacagggtaataattttttgtttttgtttttttggttttcagcctccactacagaaaacttggggctaggataagctaacacagtcttactttgttagatgctgtacagcaagtaaaagctatagcttcttaagaacaataaggaggataaacgtagccccatgggtgcaccttgtcagccctaattgaggatggtcttttggcaccaggtaaagggggtgagaatacaggagagtccctgagtggtaaactagccctttcatagcagacatcgtcttctcggcagcaggataatagttgagtttgcacacactaggagtccatcagcctttgagtgaaataaaattgtgggttaattatcccttctacgtgtggcagagtgaatcttttaaattactactttcattgtttaattattaacctccagtatttgttagacttgttttgtgatcttatgatagtaagtgaatgttaaagctgggagcgtatacattttctgcttaattttacatctgctttgttagtattaataataagatgctatgtgcttgaagggaaaaatcttaatcattactgtctaataaaaatgcaagcaaaccactaatacaggccacataaatcatagtaaattatctagtggccacaataaaaagttttttaaaaatgaaattaattttaataattttatctagtgtatccaaaatattatttccaatatgtaatccatataaaacttactaatgatggagttgacattcttttttactagtgtttgaaatccattgtataaatcccatttacagtgcatctcaatttgcactagtcatatttcaaatgcacagatgccacatgtggctatagtattggacagtactggtctaaataatatgtcttcttataaagacatattattcttataaagaagacatattataggtcctgtaaccccgctccacctgacatctagaatgtcctcaataaatgcatatttgattaagctccttcttacccagttaactaggattttgcccttagctttaagcatttctgtagataattacaatagcttcatcacaaactaattacacatgggataatggacatttgagttttgggtttacaaatccatatctctacttttgtgcaagtgcattaacccatgtggactttttatttaaaaaaaaactgaatgattttgtaggctggggtcctatggtccatatttctgtatcacctgtatacttggcttctagttaagattcagtgcatatgacatgagtaagaaattagaggcttcttttctcataaattgtaagttcttgagtagccttaatgctattaccgtgtaaaactcttgcattagatgcaaggtatgtaggtttgtggatatgtgtggggtgtggggggggagcatattcagtctttactggttaatggaagcattccccatccttcatgttagtgctgtttgctttttatgcctgcacacagaaagtggttgaaaattgaaagtctagggtttcaaatttagttaacaggagtttgtctttatcaggcaggaggatctagctgcctccatagcccaggcatagaacagcctgcagtgttctgtgacagaaaaatatctgaagggcttttctatttgtagtgtggcaaatccaggctggcatggcccctggggagtgatgccttggttaggtggtatctcttccaggtgtcttgtttagaataaattagggtgacagtgtgttttcatatcataccttcaccactattcaaggattaactgctattcatcattaggcattgaggtctactggtccagctgagccccagcaccccttctcaccccataccccagggaaacttccccaccgtctgtccttctcacattgtttctgcctatcctgaaggttttgtttttcctattcctccttagcctgtactcaagggaaacaagcttccttgtttccctcctttgtactccctcagttctgtggagtcaagtcccaggagagcagagaagatagggtccaatgctatttccagaccccaagcaccatttcctcttagacccagctgttacagtggctttttatttcttgagggtttaaaaatcatttaatgctattcacttatagttaattgtgattgttttcattgttggcctggtttctataggagacccaaagagcagtacttactttcagaatggaaatagcccagaagactcacacttgaattgccagcaaggtctccttcagtgactgcactgatgttagaggagggtaatgaatggaggacttatgaggtgaggctgtgtgagggcaatggggcaggacagatccacaagcagtgaatagccaaacaagtgaatgataaacatgccctccttaacctgcagattcaaaggggacattgtaggtcatcctattatatatttcacttctgtagcttcgtgaagtaaatttagctgctgacttcaggaatgggctgagcagaccgaaatgcaacctgcaattgtgctgttgaagatctaggcacctcttttactgtggcatctgagttgggtctctgtcacttgcaacctaagagtactgacaaatactttggtgcccgagggcaagtgtcagagacccaacttgaaatagcttaggctagaaggggcgtgccttgccttatgtgaccccacatcctgtgccaaaagagtgtggctatagcagggcctcagggatccctggaatcagcacccctcaaccccattcccacccctgcctctgtcccctctctcaaaccagctagaactgggtcttgggcagctaccaggctcctggtttcccaattctcacccagagaggaaggtctacctcccctcccccaactctaaaaaccccagagtctctgaatagccctgatgaggagacatttccacctctaggggagtagctattaccagaatgacctggttggagtgggtggggagggtaggagggaaggctgtgccctgttgatcagaccacttatggatccactactggagtaccaggccacagcgttctgctcaaggaaatgggaggcctaccttcatgtgagccagcaccccctctctgttggactgcagacaaaaaaaaaatcctttttttgaatacacagtgtttgagtaatgtccaaatatgatagttgggacagcagaaataatttctggactttccttccactcccttctagggcatcagagttcacagaatctatgtcattaacatatttatatattccttattctgaaaagtattaagacactggatgcctgggtaaggaaagagattcacaagccaagtgacaccactgcgatcattgtaaatgacgtctccaacattccagaatgtgagagtccaagtttccttatttcaaaactgagtcaaagaaccaatgaatatgtagtaagccaacttctggcaattcattctttctaggttaacaacagggattaaatatagccatgaatagaacctgttctcttactcactctaaagatatttttcataaccaattcctttgtatatgggtctcccttttgctttttgaatcggatcttttgttttttttttttttttgaggcagaatctccttccgttgcccaggctggagtacagtggtgcgatctcacctgactgcgacctccgcctcccagattcaagcgattctcctgcttcagcctcccgagtagtagctaggattacaggcatccgctaccatgcctggctaatttttgtattttttagtggagacggggtttcgccatgttgaccaggctggtcttgaactcctgacttcaggtgatccgcccatctcgggcttccaaagtgctgggattacaggcatgagccaccatgctcagacttcattggattttttttttttttttttgagactgagtctcgctttgtcaccaggcctgagtccagtggtgtgatctcagctcactgcaacctccacctcctgggttcaagtgattctcctgcctcagcttcccaagtagctgggactacaggcatgtaccaccacacccagctaatttttgtatttttagtagagatggggtttcaccatgttggccaggatggtctccatctcttgaccttgtgatccacccacccctgcctcccaaagtgctgggattataggcgtgagcctcccgtgcccaggccactggatctttttaagaacaacttcactgagttagaacttactttctgtaaaattcactaattttagtatacaattcaacaacttttagtaaattaacagaattttactgtcatcaccaccatctagttttagaacatttccctcaccccagaaagatcctttatggcatttgcaattacttcctgttagcgttcccagccctggacaaccaccaatctactttttgtctttataaatttaccttttctggatgtgtcttagaaatagaatcctggccaggcgtggtggctcatgcctgtaatcccagcactttgggaggcacaggccggaggaacgtttgaggccagcagtgcaagaccagcctgggcaacacagagactctgtttctacaagaaatacaaaaattagttgggtgtggtgatgcacacctgtagtcccagctactcaggaggctgaggtgggaggatcacttgagcccaggagtttgaggctgcagagagctatgatggtgccactacactccagcctgggcaacagagaaagactctgtctcttaaaaaaaagaaaaaaaaaaaggaatggaatcatataatgtgtggtcttttctgtctgactttcacttaacaaaatgtgtttgagcttcatccatgcttcaccatggatcagcttgctattcctttttattgctgggtagtattccattatatggaattgccacagattatttacctagttgacaaacatttctgttttactttttccacaattacaaatgctacttctataaatattcggtctttgtgtggacatatgttttcatttctctcgtaggtgggaatagcattgctgagtcatgtggtaaatgtacatttaactttgtaagaaattgtcacactgcatttcacaatgactataccattttacattttcaccaataatgtttgaggattggatctctatgtttaaacttgatgggcccttttgggtttcaagataggtgaaacttaaggaatggactttggaggaagatgtgaaggggcttacccatacacggtcacttggggtcagttgctgggcactctgtgaggtggtttttctcttcagaggtgaacacggtggtgtgtttagacggtggtattgtaatgaacatcaaaagataagtaacacagaacaggacaagcattttagagatcatcttaaaaataacctcgatttaagggataattgcatggagtttcttagtcctagagtgatttttatattccagaggtagcttgttttgattaagccatgctttttaaattgaatggagttagggcaggaggtaaccttgggacttttctttggtaggcttattggagcatgtgagtcgtggatttgacagaccagaaagtagtgctgccagaaccacagccaattttgtgtcagtcagtgccgctggctctggctgattcatagactaagatcaatcctggttgatggcaggttttattctcaaaggagaatgatatatttggtttccaagagaaatgtcgtctcctggataaaggcaagttgtgaatataggagatgaatggtctcaaaagagttttactacgtgatcattatgatacagtatctaaatgacatttatggtttaaaaagaatgtgctcatttattttcttggaaaaaaatctgagattttaaagtattttagaaaggattcattgccaagatgacattattgttatgtctttccccccctaactttatctgggcagtcttttaacaaacctgtacctttgttaattcataaaagaaagtttacttgtttattcattcataacgtatctggtttgctgaataaataagatttataagatagtaatcataaagcagctttgttttgtatccccctgtctgaaagttataattgtgaggttagtatattccttgtctctggatgaaatctatgacatttctatttttttttttttttttttttgagacacagtttcactctgtcacgcaggatggagtgcagtggcacgatctcagctcacagcaacctttgtctcctggcttcaagtgattctttgcctcagcctccccagtagctgggattatgggtgcgcaccaccacacccggctcatttttgtatttttagaggagacgaggttttgccatgttggccaggctggtcttgaacttctgcacccgccttgcccttccaaagttctgggattacaggcgtgagccaccacacctggccgtttctttttttttaaaatggggtctcactctgtctcccaggctggagtgtagtgacaatcatagctccctgtagcctcaaactcctgggctcaagtgatcctcttgcctcagcctcccaagtacctgggcctacaggtgctcgccaccatacccagctaatttacttttatttttgtagagatggggatctcactatgttgcccaggctggtctcaggctcaagtgatcttcccatcttggcctcccaaagtgctgggattataggcatgagtcactgcacccagcctctgacttttctgattattcttagatttttaaaaaaagttctgcagtcagtttcaactgctaaatactcttaattcagaatttagagtcctcaatgttggtgaaaaagtaatcgtggtttttgttattttaatggcaaaaactgcaattacttttgcaccaatctaataacaataaaaagttgtaatttgatttaaagttaaatagctgtcccttttctctttgtccctacttcaccctgctacccggcctcctgcatcttcctatcacagtttgaaatccctctagggatcgctgtatggtaaaactgggggtagggcagaggaagataagaagttagagggataaaaaattttgttttgttttgtttttttttttgagacacagtctcactctgtcaccctgcctggagtgcagtggcacgatcttggctcaccgcaacctccacttcccaggtttaagcaatcctcatgcctcagcctcccgagtagctggaattacaggtgcctgccaccacatccagctgaaaattcttatttgactggtactacagcatgatagtgccatgttctgagtttgacagatgtttgttttacttttaattgtgggttatttctgggaatgttacggactgaattgtgcccctccaccccatttctaagtcctaacccccagtttctcagaatgtacctgtatttggagataggacctttgtaggggtaattaaggtaaaataaggtcatatgggtggactctaatccagtatgactggtgtcctcataagatgaagcaattaggatgcagacacacacagaagaccatatgaaaacacagggcgaaggcgtccatctacaggccacgaagaaaggcctcagaaggaaaccaaccctgttgacaccttgatcttgggctttattttgtgttgtttaaactacccagtctgtggtactttgctgtggcagccctggcacaccagcagaggggccccttggagatctccctcttctcactccattcctggaccatcactgcagacccctcttctgcagttcccttgttgaatgtcatgtgattgcctccagtttgttgcttctccaccagggaatccgcttccctctgccctctttgtccttccaatctaccctattacacagaatctaacaccacttatttccctctattgtgagttgcctactcatgctccataggaaacacatattaatgcacaaataaactccagcactcaggctgataacaacacaacagcaagctctccttcatttccatccttgaagcataggccagtttctctccattttagatttttcaggtgtggatcagacacccgtccaacctcttcagccctgtaagcctctcatgaggttgagtaggtgtggtaggaatcattgcatagctctctctaaaggaagaccctcccacaatccacacacattctgacccttttagacctggatgtgagtaagagccctgttaccagttttcagctgaatcctttgaaaatttgcaccatgggctaaaatgactgtggtatgtctgtgtttccagcgtaaccgtagtgctcattcattcattcatcattgattcattcaggcagtgcaaagtttcactaagtgttgactatgaagagagccttgctgaggccagaggtgaaaccctgaccctgctaggatggtcgttttctgtcttgaggagctccctgactagaaggggagtaaggtctcacatgaaataacacagcagccctgttgatttgtggggggaatccctggcttgcccatagttctagaatcaggctgagaaaatctctgtcctaagaatttgcctccagggtactagctgatgatccttgctctcctctgaccctaacgttgcattattgaaaatggtcagcatcttcaggtaggcttagcacgtgactggggggatgctgcacaaggacagcagtaatgagaaggaagggggcaggtgggaaggaaaaaggaggggcatcctggtaagatttcacaggccaaatgagctgggtttttaaaaaccttagtgcttttctcttgtacatggtgaaacccaattactatgttgcgtttgtacaaatatcccaatgacgctaacccgtgtcagagagctcaccctcctcagtacacctgggatccacgagagccttgctgaggtcagagatgaggtctaaagtctatccaagcactttatcctatatctttgttctgcgtgttcacctgtaaaacatttattgattatatgccaatggccagggctcaagttcaggcaaaatgaaaatactctattccaaagtaagtaggtagtctgagatgtaaattttcaaatcggcttaaaactgataacacggttcttgaatctctcactcacacccagggtccaaaggagtcagactgggggagggtctttctttgcagagaactatgaagtgattcctaccacccctactgtcttagtccattttctgttgctataacagagtaccagagactgggtaatttacagagaaaagaagcttattgggttcatagttctggagtttgggaagcccaaggacatggtgctggtccctagcaagggacatctggtggcataatgtggatgcgaaagagaccacaagagcaagcctagctcacttttataataacgggctctggcaagaactaattcactcccgtaataaagcatgaatccattcagaagggtagaaccctcatgacccaatcattcttaaagtcttcatcccttaatactattacattggcaattaagtttccagcacatgaacttctggaggacacattcacaccatagcttacgggaccacttggggagattgaacaggtgtcagacccttacctggaaagtctaagaaaggagtcccctatcttgtgagagagatggacaaaatgccctttcctccttcacctgtccaaatcccgtgtttcctttaagttcagttagaaccctgctcccatttaggaagacttctctgatctttttctagcacttcaagattctcactctttgaatttctacagtatttaacacctacttataagatgattttttaattattctttattcatatcctcagttagtttggagtcctctgggcctactcatataagctgagtgtttgtatgtatttaaaattctgtctttctagaacagtacaaatctgctgtaaagtaaattgggcaagagggaacagtacccgttgggccctgcttcccatttttatgttcttccagaagcagcaacataactcacagcatagcccttgtctgagaggcagagattgaagcagcttccacccactgggaggagtttggatggcgtgaggtactgtgttgttaaggtaccttcattaggaaggttggtctggagagacctttgacagaatgtatttgttttgctggattgagagaattgaatgtttatatagctttggttaaaattccatttttgttgcagagagattattgtctgaagaaatactcaagcacttgagtgagaagaggtagatgctgacaaggagagaaggagtgtattttagtttcttatgcttgttcagaacttggtctgtggtatggattttaagtctgatgtcctttttaacttggaagaaaatgtcctgaagtctatttaggggcacatgttagttagtgttctggtttggctgagaattctgtagatgtattcctatattccgtgatggaatattattattatttttttcgagatagagtctcactctttcatccaggctgaagtgcagtagcatgatcatggctcactgtagccttgaactcccaggctcaagtgacccttccacctcaacctcctgagtagctaggactacgggcatgtgccaccacccccggctaattaaaaaaatttttttttgtagagactgggtctcgctctggtgcccaggctggtcttgaatgcttggtctcaagcagtctttccacctcagcctcccaaaatgttgggattacagatgtgagttgctgtgcccgccctgctgcatttcttttttcatcagtctagaggtttctaacctggaattttctttctttcttttttttttttttttgagatggagtttcgctcttgttgcccaggctggagtgcagtggcacgatcttggctcaccgcaacctctgcctcctgggcccaagcgattctcctgcctcagcctcggcagtatctgggattacaggcatgcgccaccacgcccggctaattttgtatttttggtagagacagggtttcaccatgttggtcaggctggtcttgaacttccgacctcaaatgatccacccgcctcggcctcccaaagtgctgggattatgggcatgagccaccgtacctggctaacctggaattttcttaatcctaaagagtggagaatgtaatagagattattaagcttttaaaaaaaaaacagctttgttgagatatcattcatataccattcacttcacctcctgaaagtgtacaaatgaatggtttttagtatgttcacaggttgtgcagccattacagcagtaaatcttagaacattttcattacacccaaaagaaaaccccatatccattgtaagggtttttttttttaaatactcaaagaagtttaacttttttgtttgtgataaagctgtacaggctaatatcaaggttttaaaattcaggctaggattgggagttaaattatttttttaaagggaaaatgaactgataataaacaatgttacatccagtctttcaaatgagatggaaacaagcatgtacatctctgctttgctccatcctcatttatcaacgtaacatccattctgtgatgagtggtggccagtgatgattggtggccagtgatggatgccatatttcagggacttattttgaattaaatgggtaataaactgactaatatttctgctcagtgggtaggtgtgctttattctgtttgaaatgggagaacttagttcagagaactttttccatagatgcatgatcctttttggtacatactcgaattaggctgttgtgcagctaattcagctttgctgtatttcttttgaagtaagcatcctgatttaatggcttttccaaggactgcctttagtgtggccttgctaacctgatagatgtcactttactcaacataggttgtagctcagcctgggctttagaagtttgggattgaaaatgagactgtaagatcccagttggcccaaggaaggcgagtccgtttactcatgattcatcttgaggaagaagagatgctgagacagctggcacctggcgttattccaggggccacattactttccgccagccatggcttccaggtgttagatcctttcatgaataccaggaaagcagtgatctattaataactttaccccagctacagttcatgcttctagagttaccattgtgtggatttccagaacttcttttcctttgacacttatctttatcattgtggaattatgcccatgggccacccagctctcacacacccaaagccacggactctaggaagacactcagtttggcggttaatcccttcccttgggaacttttggaattatcactttatttatctaatcctcttcaaataagagtttgtatacttttcactgcatgcttaaaaaaaaaaaagaaaagccaaagacaaatacacagaaaaactaacacaacacccacgaaacccccatgacctcaaacaaaaatcttacccactgttgcctaagactttgtgctctctgaatatgtgaacgaaggaatgctttgagtggctctgctgtggggaactgcacagttttgggttatccaatatatggccttcttttctccctttcctgctggactgatttgtcctgtttccttagttattagtacttccacaagaagggggaaggaattaaatttgaagggcgattcccacctttttttttttttgagatggagtctcactctgtcgcccagggtggagtgcagtggcgcgatatcggctcactgcaagctccgcctcccgggttcacgccattctcctgccttagcctcccgagtggctgggactacaggcgcccgccatcacgcccggctaattttttgtatttttagcagagacggggtttcaccgtgttagccaggatgatctcgatttcctgaccttgtgttccgccggcctcggcctcccaaagtgctgggattacaggcgtgagccaccgtgcccggccggcgatttccactttctagcaacagttggcgtagaaaccctggcccagccagcgacagttagccagcgacagttggggaatatctgtttatcgttatttctactttgattcctcaaaaggtgattctgttttgacgtgaaaaaaacaacccaactttggtttatgaaccagcccaactctgacaagtgtgttcctgttccgcctacatcagttctaggttctctaacttcagtgtgcagaagattcaaccaaggaagttcctgggctctaccccttgagattcagttttaataggacaggggctaaaagattgcatttagtccccaggtccttctgatgtggattaactaggggctgactttgagaaacactgccctggaatgtgcacttgctattcaggtaccagcccagccttttctgtgactaaatgcttggcagttaacaatgtataattatggtgtgtgtcgtttccaaggcaacatgcatctgtcactcccgctgaggctgggaagattgaaaggggccatggagaggctgcagtcacaatgaggcctccagattcatgtcatcaaagtgcttcatgatgactggattttcacaccatttatccaagggccctagtcaatggcagcagcaagaatgaaagtagacacattggaagctagagagtcactgggtgacttttggaggtagcaacaagctcatgaagaaggcattcagtggcttgcactccccacccatcctctcaagtcagttttgtttagaataattaggatgtgggggaatgtgagaggacctggcaaggcttctgaaaacagtggttaactgtggtaaacgtgtgcctgctattcctcagttctcctctgggatggtgctgttaaaggtcacctgttctcacttgcagtgggcttgacgtgacatttatttagcacttactatgtgatggaaactttcacatagattatcttgcctttttgacctaagtgtattttcatttttttttagctacatgcgaagttttcacatcttgtacatttccaaatttaatgaaaaaggtagagtctgtacatgtttgctgggcacagtggctcatgcctgtaatcccagcttttagggagggagaggccagaggatagcttgagcccaggaattcgtgacctgcctgggcaatatagtgagaccccattcgccacaaaaaaggaaaaaaaaaaaagataaagtctatacatgttttagcacaggatttggctttttggttttagttgtaaaactgtatagggcattgctggatggaactggaggccgttattccaagtgaagtaactcaggaatggaaaaccaaataccgtatgttctcacttgtaagtgggagctaagttataaggatgcaaaaacatacagagtgatacaatggactgtcaggactaggttgggagagaggtgagggataaaagacaacatattggttgcattaaaatctcagaattcattgctaagaaattcatgtatcaaaaaactacctataccccccaaactattgaaattaaaaaaaaaaaaactatatagggcagtgaaaacattcagccactagtcaggccttagggtctggttctgaatctcatcatgaataggctttgtgactcaggcaagtttctaaacttgtctgaggctctgttgctacttctgtgaaatgaggcacttagactagatgagcaatcttgacttttgaagggtggcaactaccttgtagaatccagtgaaaactcagaaccttcctccctgaaaaatgtaaatgtatacttgctaaaagataattacattccatttccaggggaccacagacccatgttaaatgaagtgattgcttaagattcagctcaactcagaattgctgagtcccacaagaccctgagagtcttgcattgtttagagaggccccctgaggaatgagctatttgatgagggaggttttgttgttcctggcatttttcactaactgccctgtgcattctggggaggggagacgggaacaaacactgagaaaaataaatagggaatgagtggcatctggaatatgaactgttttcctcatcacttttcacaaggaggtggatggcatgattgcagcacagaagatatgttgaggaatgacttgaacatagagatacagcattttgtacagtgacagttaagcagtaacttagacttgctctacttttaatgtttgagaactcactgatatagaaatctaagaaggtccagttcagagaagcagagaacagaatggaagttaccaggagcaggggtggggatgtgggagtggggggttgggggaggtggatggggagatgttggtcaaaggatgcagcgtttcagttaagaggaatagatgaagagatctattgtacaacatggtaattatagttagtgtattgtatacttgaaaaattcctgagagtagatttagagtgttctcatcacagtgaaataataagtatgtgaggcaatgcatatgttaattagctcaatttagccattctacaatatatgcatatttcaaaagtcatgttttacaccataaaagtatatacaatttttatttgtcaattaaaataaatattaataagaaggaaaaaattaaggttttggttaatttgaaaatgtcagaagcttctaggaagtatatcgtaagtggaaatatgttatttaccactcctcagctgttaactgaccaccttcccaacgcaaccctgctctgtctccttcccatgacccaagttgtaatccaatcaggagagaataccttatttggaaacctacatatgtcctttttttctctgcttaggtgttgaaaagtctcctctagagctttggaaggctgaatgcactaaacatgaagagcttgaaagcgaagttcaggaagagtgacgtgagtatgcggtgactcacagtctggctgttccttcttctccatggagctgcagaaacgctcctccccaccttgataaggcgctgttgggttaataaactacagacactcaagtgctcttggccccagctcagggtagcttctgtagatggcatgctctaggttccttgctgtttgtgtgcatagctttcaaaaacaatgtttttttatttttatttttaattttggggatctgtgccttgtagagaaaggaaccgtcacattaaacatcttcaaaggaagaatcagtaaaaacctcaacatttctaaagttgccagaaatcctgattcagaatgtcgtttttagaagaagctagtctctctcatgcgggtggtttaggaatgacatattagcatggttcatctttggctttaggaaacgtgttcaactctctgttaagggttttgtggtaaaatggtatctactgctgcccgtacctttcctccccccgaattccagggactcgtactcatttgttatctaaccaatccataaaagactctggattggaggaagcagttatgatgtcagagttatgaaataaagtctcccccaggagaagagggagaaaaacatagcagaggggttgtacacgataatatttttttaaaaggtcaccccataaacccttctatgatcccagtcttgtattagctgcattccagatactttgagcagagttgtggagtgggagaaattaatggaagggaattagatggaagccaaggtatgtcactctcaaaatgggcttgttcagctatcatttcaggcgaggtaattaaagatgaacctggattttattgctttgccgtgaattatattttgacagcttggcacagctgcatttttgcaataaatggaggctgtgtcttttatggctgatatgtaacttgcatacctacttctggctgaagcttatctcctgaggctgcatcatgacatgtaacttactgccctgataaaacccaggctagatgagatgcttatgggatgatggtaaaataccgacccacttaaagaaagaactgggaagcgttatgaaaaaagttgatcttaccttcttatcctttaggtaaattaaataaaactcatagagtgcaaagagacttcgacaaagacagaaaactagctgttggccagagtgaaagtcctggtcatccgacttccgagaaacctccttcaacctcatcgtctgctggctgtatgttatgcagcctacatatctcccgtggctttcagctaaggagaaaaaggcaattaaatggaaaatgttgcccaattcagcagataggggtttctaaattttgtgaccaggttaacaaatgtctttttctattccaagggaatctaggtagctttcatttacataggttaagattatttttagcaaaatttcatcagtctagacttccatatatatatgaacaggggcccagaggaatgataggcacataaacttttggtttaaaaatcaaaaactggtggcagtagggagggtgttgctggaatctagttagaaaaactgaaatatttccatgatttaaaaaaatccactgtaataacactagtaaaagctctgggatttggcagcagaaaaggctatgattttggcagttagtgctaagagaagaaatgttgagaagcagacctgggggaggagagcctggggaggaggaaattggtataatggagcccaacaatttcaaatggctctccacatccaaattgtttccccaagcacagaaccgtacagctaaatggagggaataaaaaatgacaacaacaacaaaaacatttcaaagcctagtttgttaatcaaccatatgataataatgctaataataattaaccattaggaagtattaaccaaatgtccagaggtatactaagcttttcatgtgaaattcatttaatcttgccacaaatcttatgtggtgggtattactattaagctcattttacagacgaagaaactaaggccttagggacatgcagtcatttgtctgggttcttagaactttacgttctagaaccagtttttgcactaaggcagtctgattcaagagcccatgtttcctgaaagaggaattttgggtggaaagtctattttaagaaactaggcaatctgctggcacggtggctcactcctgtaatcccagcacattgggaggctgaggcaggaggattccttgagtccaggagttcaagagcagcctgggcaaacatggtaaaaccccatctccacaaaacaattaaaaaattagccgcctatggtggggcacacctatggttccagctactcgggaggctgaggtgggaggaaggcttgagcccaagaggtcaaggctacagtgaattgtgttcacgccactgcactccagtctgggtaacagagcaaggccctgtctcaaaaaacaaaaacaaactgaacaatctagggagtagctttaaaagcgacttaaactcggacctaggtttgtggctctggacaagtctcttactcttctgaacctcagattcctcactagaaaagtggaggaaatgatattagccccgtaagactggggtgacagttaaatgcattaaatgaatgttggccgggtgtggtgactcacacctgtaatcccagctacttgggaggctgaggcagaaggatcacctgaggttgagagtttgagaccaccctggccaacatggagaaaccccgtctgtactaaaaatacaaaattagccgggtgtggtggtgcatgcctgtaatcccagctacttgggaggctgaggcaggagaatagcttgaacccagaaggcggaggttgtggtgagcaagagatcacgccattgcactccagcctgggcaacaagagtgaaactccatctcaaaacaaaacaaaacaaaaaaacaaacaaaaaaagaatgtcaaaaatcttatggcctggtgctcaggagatgcttagtaaatatttgtttcttcctcctaattagcaacccgtaataaaaagtaggattcaaaaagtttacacggtctggagggtagaatactctggtaacagttgctgctgccgaacagggaaactgagagctggggaagagaggcttgtttttcaatgtatgcctttgattttgaagtttttgatacacgtacatgtgtatcatgcatatatatgtattgttaaggaaaagcaagcttacaaacatttacattcagttgaatgaagcaaattataatttttttttaacctgaaatgtgtggtctgtctcaaaatattttaaaccattgggcatcatattcctgcttgtctttgtgtgagggaaaaggaagaagaaaggattctttgtatttctggggggtaggaagaagataatagcagatcaggttctcgcgcttgcataaagaagacaggtgacccactggtgtgatcgcatttcagccagcctgtgtctgggaggtctgtggccaaattggtttgtggccactgtgagcaacacccaggagtaaacataggatgaaagtggcccaagggggcctcctatggatggccttcaggtcactctgtgacccgagaaccatcacttgggtaaagattgaatgggagtgtcgtttccggaagacttgacaactggcactgtgtcaaaggcagatgtgagtttggtagggaatgagcctgactctgcgggctgtggttagacagtgacattgtccggtggttttgattcttaaatctatttgggaccctgcagataacccacagagaataaacagcattatggaatttctatggtggataaccttttttacttcgcatttataactttattttgggagttcttaaacttgagttgttagatagtagataggatacaggagaaatgcaaatatggttgttgtctttaaaaggttgataaacctcggtgggaggagaaaaaaacatataggaaataactagagcaaaatacaagcagtatagaatatagatactcaaggtatctttaagatgatatagctaactagttgttaagttataaggcctggtgataaatgctgcagattttgagatggctgaatcactgggaatgggagaatttggggagctttatggaggtggagcttcatgcaggccttgagggataggtaggagttggaaggatggttgggaagagggggaaaggtcagaaggtcaatcaggggagacagcttgcagcacagcgggttaactcagtctcaaaaatggcccttgacatagaaaatagtaatattaatagttcaggagcccaggagagtacctgtggcatggccctgagtatttaaagaagaatactatataaagttttcatcctagttttaaaaatggatagattgacttttatgcttattaagcgagcgcagagttctcagtcatcattatttgtatcttttatgaccatagcttgaaaaagtggcttctttacctctttaaatatttgcagcagctagtatgtggttccacatggaaaaatgagctgtcgtcatgaaaaatgaggccaaaaaggctgggatttccctttgctaataaaatgctcaggcttctggaatttctttgtagatgccaatttttagtgacttgagtgaaatgggtggaggttgagggatgggaaatggggttgaaagatctttgtaacacatcttgagaaatgccactcaaacgtgatcgagggcttcacggtttactttgagggtgtgtgcttaattttacgaaagatttattcccaattatatatttcattgtaatagggaagtagcggacattccattaaaaaaatcaaaacagccagtttaaagtgacagtctccatgagagattaaattgatggtatacctttacatagcatctactaactactgtagctttcagccaaggaaatgcacacaccccatgaatcttaaagaaccaggcatatcctgctcagacagaggtttgagtttcttgcctattaagataacagttggcggtggggtgtggtggctcacacctgtaatcctagcactttgggaggccaaggtgggtggatcacctgatgtcaggagttcgagaccagcctggccaacatggcaaaaccccatctctactaaaaatacaaaaattagccaggcatggtggtgcatgctcgtaatcccagctactcgggaggctgaggcaggagaatcgcttgaacccagggggtggaggttgcagtgagctgagatcacaccacttcacttcagcctgggcgacagagcgaaactccgtctgttaaaaaaaaaataataataaaagataacagctctcatgaggatcaacaaccaactctaccaacgtatttttttcaaggagtttttagtcatttataataagtttttacaattgctcactcctcctttcgtcaccacacatacatgcacatacacacaatgggagtatttaaaatccaagtctctggcgtgaacctgggaagcggagcttgcagtgagccgagatcacgccactgcactccagcctgggcgatagagcgagactccatctcaaaaaatataaaataaaataaaatccaagtctctctgtagacataggaactatggccaaatctattttaagctaagccttttttttttttaatagacataattttaaaaaaatcagcaatgaccccactgggtggaggtaggagactttactaaagttctagagagaaatttggtcaaatttgtgccgtgctacgtgttttctaggtcttttcagcctgatttaaatggagaatctgctcactgcctgattttgcctggtattagtttgctaggactgccataacaaagggtaccacaaaccaggtggctgaaactaaagaaatgtattgtctcagagtttgggaggctagaagcccaagatccaggtactggcacggttggttccttgtgagggctgcgagggcgaatctgttccatgctctgacctagattctggtggttggctggcagtgtttttggcttgcagaagccttgccccgatctctgctttcatcttcaggtggcattctccctctgtgcatgtgtctgtgcccagattcctcctttacataaagacgccactcatactggattagggctcgctataatgacctcattttagcttgattacctctgtgaaaaccctatctccaaataaggtcaccttctgaggttagggggagaattaggactccaacgtatgaatttttgggaggacacaagtcaacccttaacacaactccatgcccttccatcctagaacagttacactgaagccctggcatccccccactgagctggcactgtcatagaccttagctccactgttcatccttgggactgttttcagcatctaagagagtgaggctggagcatcacagtttttcagtgggtgccactgcataatattaatagcaagagtgaacacgtatggatggctgaccttctattacaggaataaggagttctcatgtactgaatgctcactaggtgccaggcactgtgccaagcccctttgcatgctctttgtcatttaatgcttacaaaactctatccagtaaagaccattgctacaatgcatttgatagaggaagaaatgaatgttgaggacaggtaagtaacttggccaaagtcgcacatttggtaaataacagagagatggtaactctcctggtttttctggatgggagagtgtcgcatgctgtcaaccgcagcacacgcttgctaacaggttgctggttcctaaattgtgaagcttcaaactgcataaaatagatgttacactgttgctctaagcttaaataagacctccacagtgattttacatcaccacaagtccatccatagtggcaaagctcaccaatgtcagcattattcctcctgtgacagggcaagattctttgtttcctgagagccaaatgcatttcatttctgaagggaggaagaacagatgctgcttctgctcttccagtggtgccagtaaaacatctctgtctacgtggagctccactgtgggctaaatgggtcatagctttattctatttaccccagaccataattctcagttaaacacaatacttttccagctagaaaccaatatgaaaccgagggcctggcccttaaacttggggaaatctcctagtctacacaagcaatgagtcatttagaccattatctcttacatctttattctgcattaattacctgatcattttaaatgaaggctgttgttgtcctacatgtttttagtttgacaaattcttctatgaacttctccttgggactgaaacagaaattgcttctgaatcagcctgtggatattttcagttgagtttctacttaaagatctttgctgtgtggaggtggttattttcaactatatggcaatacaggggccagcgttggccaaaggctcagtatgtccataaagatgaggttagtgactagacttggctttctttttgtttgagtccctccctccttttaaaaaaggaaagtcagtgtgtcctggtcaacttgattattcaactattagagtagtttttattgtattcatgaaaatgctttcactttttgggaagcactgcctgaaaggatttcatttttattttcttaggaggctgaatgatctgatggtctctagctggctcctgcctcctgggctgcccagtaggctggttagctggaaagtgtagaggtttataacgtaagaatagaacaagaaaaagtttaaggaatcacatattctccttggatatgtttgttctaagatgtatttcccaatgctgagaatgtttctgtagcaacttttcagatttaggctatggttttggaaggggttttgatgagattcaatgtgaactcatgagtcttttcattttgtctgggtgtgtgtatgtgtgtgtgacagagtctcgctctgtcacccaggctggagtgcaatggtgtgatctcagctcactgcagcctctgcctctggagttcaagtgattctcttgcctcagccttctgagtagctgtgatcacaggcgtgtgccaccatacccggctgattttttgtatttttagtagagagagggtttcgccatgttgcccaggctggtcctgaactcctgacctcaggtgatttgcctgccttggcctcccaaattgctggaattataggtgtgagccaccgtgcctggcctgttcattctttgaagggttgcttcataactgagaagctgcagggtccttctgtgaggtcccaatgggtgtactaattaggtatatgataagctgtaataacaaaataccctatacagtagttctaacaaggtagaagttgttttcttctgaagtaaatgtttaaaatagtctaagagccagtggggcagctctgctccatagattaacccaggaaccccagcctttctctggcgtcctctgttaccctctagagctgctctgtgcagtgtgctagccactgcccacatgtggctcttgagcatttgaaatgtgctagtccaaactgaggtgtatactgtaggtgtaaaatacacactaaatttcaaagacattgtaccaaagaaagactgtgaaatatcataataattttttataattacacactgacatgctactattcaggacataattggattaaatgaatagaataaaatttatttcacctgtttctatttacttttttaatgtggctactagaaactttaaaatcacataagtctttggacagtgctgctctaagaaccagaaagaaggaaagtgaaagtaaagcagaagcactttccttttttttttttttttttctgtgacagtgtctttcttagtgtcttcctttgtggtccagtctggagtacagtggtgttatcatagctcactacagcctcaaactcttgggctcaagcaatcctcttgccctggcctcccaaatagctaggactacaggcacataacaccatgcctggttaattttcatattttttgtatagagacagtgtctcactatgtttcccaggctggttttgaactcctgacctcaagcaatactcctgccttggcatcccaaagttctaggattacgggagtgagccaccacacccatctagcattttatttattttttattattttttatttttttgagacggagtcttgctctgtcacccaggctggagtgcagtggcacaatcttggctcactgcaacctccgcctcccgggtttctgccgttctcctgcctcagcctctgagtagctgggactacaggtgcctgccaccacgcctggctcatttttttatttttagtagagacagggtttcactgtgttagccaggatggtctcgatctcctgacctcatgatccacccgcctcagcctcccaaagtgctgggattacaggcgtgagccaccacgcccggccgcattttactttttaaaggatgtgaaactgaaggtgcacaaatcattgccctcacagggaactggttagagcttgccccaacctagctgcaaggaaggcaggaaaacatattctcttgctggcagcctcgaaaccagttaagcctcaagggaaaggggagaatggatactggggatgattgactcagccacaggcagtttccacagaaggtcttgtttgagacttggatgataaaggtgtgcacaaatgttcttaaaccttagtgacttttacagttttgactctttttacgccagaagttaactattgatggctgctttcccaggacccattgtcctattggtagaagtctgttgcagcatgctgctgtaggtgaagttaaatgcttttcagtgttagaaatggaaactgctggctgggtgctgtggctcacgcctgcaatcccagcactttgggaggccaaggtaggtggatcacatgaggtcaggagttagagatcagcttggccaacatggtgaaaccctatctctactaaaaatacaaaaattagccaggcatggtggcatgcacctgtagtcccagctactcaggaggctgaggcaggagaatcacttgaacctgtgaggcagaggttgcagtgagctgagattgtgccactgcactctagcctggccgacagagtaagactccatctcaaaaaataataataataataaaaaggccaagtgcggtggctcacgcctgtaatcccagcactttgggaggccgaggtgggtggatcacctgaggtcgggagttcgagaccagcctgaccaacatggagaaaccctgtctctactaaaaatacaaaattagctgggtgtggtggtacataactgtaatcccagctactcagggggctgaggcaggagaattgcttgaacccgggaggcagaggttgtggtgacccaagatcgtgccattgcactccagcctgggcaacaagagtaaaactctgtctcaaaaaaaaaaaagaaaaaaaaaaaaagaaatggaaactgctcttgaatgttaacagctggtgacattaggtaaccagtcaggcttttccttttatgtcctgtaatatattggtgacctgatctgataaggtgtgggatgaacaagggtttgtttttaagtacaccattttaccgtcataatcttgaggttgcttacacagatagggactatcatgacctgatctcacagcttcattgaaaagtttgggaatggtgtcagcctgtaagtttatgttataagcttagctttaagttactctttaaagcagtgtattcagtcaatatgtaatttataaaattgtgcaatatgaggattcttcattatattgattagtttaatctgaacctacatgacatctgactctcaaattttaggcctagaattctgagcaaaactttagaacaaatctaaaagaatattaaaaatggtagaatgtccacttcctagacatgtaactttattaatataacctgtgatcttattcacatttttggttgccatattgtccttttggttcatattgggtttattgctgattcttttctcccagtgttgcttgtaaagcctcccttccccacccctcccctttctccctccctttcctcctcccctcctccccttccctccctttctcccccctcccctccccctcccctcccccctcccctctctgcctcccttcctccctcccctcctcccttcccctcctcccttcccctccctctctcccttcccctccatctcctcccctccctttagttttctcacctgtaaactgaggctgaggccagcacttccctttaaagcatcatcatgaggattaggataaaatctggcacaaagaaacttctcaataaatggcagctgctgatattggttacccctggtgcctagcacagtgcctggcatttgtagtacctaaaattgtgtgtgtgatggatgaatggtctcaaaacgtcccatctagttaaggtcttatgactgacacacatgaaacaattaaggcagtgccaggtttgtgccattcacagtgactctggtgtgtggccattcaacatcgcaggagtttagagaagacttcatagaaggtgagttaggggctgagccatcacgattgggtaggttgggattaacagaggaaaccagtactaatgagtagaggtggggtgaagagactctaatggagaaggatatatacatgggcaaataacagaaaatcaagtgtgatgggaggtatgggcctctctatacgtcattgaaagcctggaatgggtggggtgggtgaaatagaagaatgaggtttcaagttgattacattttcactgtaggatgatttggggttttgagagaccgtaaccagaaaagggggccaggactagggccagggctaggctggtggctgctgtggggcaagaacgacgggatttgagtgtgcgtggggatgaagagcaagcagggagggagcctagattccctgctgatacaccaaggaaagtctctcccttgcactgccacaccctgtcctgccgtgccagccaagtgtgagtgcccctcatctcctgagaaatctggcgtggccttagcatttcattaggcaacttggtgggaagacacactagaaaacatgaaaggtgagatctctttgattaaacaagaatgtttgggtacaactatttaccactaaaatacacttagctactaggcatcattctaagcaacttaacaaactgtgatttatttatacctctcattagagaagtgctgtatgtattcccagtttacagatgagaaaactgcaacatggtatcttgctatgttggtttccaaaagtggctgtaacaaagtaccctaaagggagtggcttaaaccagaggtcagcagcctcagctccttctggggctgtgaggaagaatcagccgtgtctctccccagcttctggtggtttgctggcaatctttggtgtttcttggcttataggagcatcatcctgatctctgcctcatctttgtatagcgttttccctgtttgcatgtttgttaccaaatttcccctttaataaggacctcagttgtatgggagtaggggcccaccttattcttaactaattacagctgcagtccccctatttctaaacaaggttacattctgagacattgggggttagggcttcaacatatggattttgggggaaacacgattcagccataactcttgtccaaatcacaaagctaaagtagggtgcagaacttgcacctgggaactctgggtgcggagccagtgtcctgccactgctggtgcacacgggtgtttgctgtcaggagaacaaaatatgatgattccagccggccaagtaaaggcctggacttgaatttcaaattcctcattccaatttccagtggaaactgacagatagtaatcatgggtaatctttgaccaaaacatgcttcagtgacagggacgcctaggagccaggtactggattagctttctgaaagcttctggtgctagagataaggagggtggggagaggggcggagaatatggaaatcaaagcggtcagacttgttttgagctgggtggggcctggagaagaggcccaaagcgcaaattgggaactgagacttcaggtaggtatgttttaaaataacaaaaagtacattttttgttttaaaataacaaagggtatgatttagcctaggttggctgtgcttgtgaaggtttggtgcacagttttcccctgggtggtggtttctgatgctgggttcaggtctttgggagttgtaggtgcctggtgaataactggagggcggactgttttgtaagctctggtcagtgttcagtgagttaagtccagcagtcattggagtctattgctgtagactcttgcctttttaggtgcatttggaaaatccacctaagccctttccccatggtgaacaagtggctttaggtggcaagtggcagtcttggacacagtaggacatgtgggatacttgtccttgctctccctgcagttccagcccagttcctacactagtcattgtgttgaatgaatgagtgactaaatgtaaaatggaaatactgacagtttatcgtcaacaccctgtggcccctctctgttcagcatttaccactttatccatgtaatggacagaaataaaaggtcagtagggttttctggatgtgtttcctttaggatgctctgcatgccctcttggccatgtctgtgctgtgtgaaattaacaagtatcattggaggccttggcttgttacctacaatctacctgtgtgcttattttgtacccagactgtgaaattattttgtatctatagctcattagctcaagtggttgaagaaccacactaaagagccacagttatgaatttagaccttgtgtaggctaattaactagcctgtgttccttgggcagaaaattacctaaatttagacccaatttaactgactggcatctgtgtctgtggtcaaaaaagagactgacttcttaagagcattgcaactccttaccagaaacataagaaaagacagtccttcggtcctggttttgatggggcagctatgtcaacctcatgtaaaggacactattgaggacgaaactctgatttttttatcttgcacaaattcctatgtagggggtctggggagtcatgccctacaaaccatgaattcccatcagatgggttttatttaaccctatatatcatgacttattttccaacctgactctggcataacattacgagacaaggaagaaaattaaaatattttaccctaaaatatgtttatttgccatattttgaaatggccctgcaaagctccttctttgtggggggaaaatgtgcatctgtaaagaatctctgttaacatagttacatctttttcttccagaccctcccaaattctaaagagattaagatctgaataggaaacatgtgtcatctgttccctctaaggacagccactgtaagacttcaaaagaactttggtctccacaatctttatcttaacctgaatgttccctttctaccaatcccaagtctttagacaaactcaaccaattgtcaaccagaaaatgtttaaattcacctacagcctggaaggctgctcccccgcccgccttacagttgtcaaactgatgtatttcttaaatgtatttgattgatgtctcatgcctctctaaaatgtataaaaccaagctgtgccctgaccaccctgggcatatgttctcaggacctcctgagggctgtgcacaggtcatggtcactcatatttggctcagaataaatctcttcaaacattttacagaatttgactctcccttttttttttttttgagacagagttttgctcttgttgcccagcatggagtgcaatggcatgatcttggctcactgcagtctccacctgccgagttcaactgatttatcctgcctcagcctcccaagtagctgggattacaggtgcctgctaccacgcccggctaattttttgtatttttagtagagacagggtttcaccatgttgcccaggctggtcttgatctcctggcctcaagtgattcaccggccttggcctcccaaactgctgggattacaggcctgaaccaccacgcccgcccaagagttcaactcttttcgtcaacactatgatttcattattcagttcttacacatttgtgagtcatttatccatagtttgtcagaaagactctagacaacctcctcctagctagggaagaaattctccagaatggtcaaccaactctcaagacagaaacaagtctcaattccagcttggccaacacagtgaaaccccgtctctactaaaaatatgaaaaattaggctggtgtggtatgcgcttgtattcccatctattcaggaggttgaagcaagagaatcgcttgaacctgggaggtggaggttgcagtgaacctagaacgagcccctcacgccagcctgggcgatcaagcaagaccctgtctcaggcggggggcaagtgagcgggggaagaaacaggtctcaaatatttaatcaggttaaaagcagtgaatgttcagtatcccaggctctgttaccttaatcaagcccattatggaccccgttcacattagcatctcacttctctactacaaacctgtgctttataaacaatgctcgggttggccactgttataattttggacacacttaaggaaagctatggcaagtaaatagtctttttgtttttttgagatggagttttactcttgttgccaggctggagtgcaatggcataatcttggctcaccataaccttcacctcccgggttcaagcaattctcctgcctcagcctcccaagtagctgggattacaggcatgcgccaccatgcctggctaattctatattttcagtagagacggggtttctccatattggtcaggcttgtctcgaactcctgacctcaggtggtccgcctgcctcggcctcccaaagtggtgggattataggcgtgagccaccatgcccagccataaataatctttaaaaaggaatttattgtagtattatttatattaatgagaaacaaagtgtaacccagatgttgggagtaaacaaattgttatatccacagagaggaaagttttagagtcattaaaaatgttaagcttaaaactatgcagcaactgggaaaatgcgtataataaaataagtggagagaaattcaagttacaaaattgtacattacattataattacaacatataaaaaatgcatatggtatacatcaacacctcttcttagaaatactagggaaataaggatgggcataaatatttagctttaaggatattcagcataaaaaagacctaaaaattagaaaccacttaagtaaaaatttgttgagtatattttgggtatgtattccacaaccatttaaaatgttgcagaaattcattaaagaaagctgttttatgtattattactaagagacaaaagcaagttctagacatgcttgtgatgcttaaaatgctttcaatgtgtttctatttcttaaaaaacaacttggaagatataaacaagggtgagaagtctccaaagacagatccaagttttgtggagcctgaggtttatataaaaatctatgggaatccttctttaaaaacatcttacttttgcaaattttacaacaacaacaacagaaagaatatactatgtgagcatattggtaggccttgcaaggggccctgaggtttaagctttagttgctttatgggaaattttctcctgggctgtaggtctgcatttcgggggcatccagcacactgcttcagattctagcagttaccttgtaggcactcagctgataaagatacaagcctcgtaaattgccctaaagaacaagctcctttaatgtgatggttcttttatttacctcaattgagtacatccatctttgttgtagttcagtgttctccgagtgtgatgcctggaccatcagtatcagcatacttgaggaattgttagaaatgaacattgtggggctccaccccagagctacctaatctgaaattctggaagtgcggcccagtgatctgtgtttcaaaagcaccttcccaccttaggggattctgatgcaaattgaagtttgaggtctaatccggctcagtcgttgccagccctcattacaataccaggaaagcttcttaaactactggttactagcttctgcatccagaggctctgtgtccaatgagagagaatgttaactcaccatggcaagcaaataatttacagattatggcactttgaatagaaagaggtttaaatggatggctgtagagatgaacacttccgtccgggtactttgtcctgtttgtctttcctaaactcctccagatagtcagtatccttaattacttgactgaatagctggacagtgttttctgcacaggtccacaattattatcactaagagttagtttggttgattagttaacctcaaattctgtataccctacttaactatctttaaacccgctgacgttctgtttccttatcagcaaaatataaattttagaagagtacatccctcttagggatattgtgaggattaaataagatagaaatgcaaaagatattattcacttccccttttccagatactctctaattctgttcccagttatatactcctatctatcaaatctttttaaaaaatcattatttcttccatttctccattcgataagcagaatctcatgaaggtttaaatgatgaagaaattgttacctttatttccttataggatgacttcagttttcttgccacacttacattccgtaggaagttggaaaaagaaatactctttctgtgaggatgggacaaagatgttagctttgtgctatccactcttctagtcactagctacatgtgtctgtctagcatgtaaaatatggctagagctactaaggaactgaatttttctttatttctttcttttagagacagggtctccctttgttgcccaggctggactcgaactcctgggcccaagcaatgctcccacctcacctcctgagtagcttcggactatggacacatgccaccatgcctggctaattttatttattttcataaatttaaatttaaaaacagatactcaatgcaaatattggaaaatgcttaagtttggaacaacttgggtatgtgaatttgttttttcaactctaaatctcctgaaatctaaatagatgtcaagtatttgcaataaaaatgtagcatgggaattgagatgtacagtaagtttacaggatttttaaaacctagtatgaaaaaaagtaaaatatcccaataagagttttcatggtgatttcatgctgaaatcatcatattttgcctatattgttattttaaaaatatattattaaaattaatttcaccagcttatttgtactttataaaatgaggctatcaggaaatataacatgtggcattatattatatatctcttggatagcactatgttagatcctaaaagaaaactgaagtggaatgatactggttacatactgctctcttaattaacataaacagatgtgagcctttatacccaggagtcaccagcccccctgcatttgcctttgtggacagatgtgtaaccagtttccttttttctttttattttttttgtgacagagtttcactcttgttgcccaggctggagtgcaatggtgcgatctcagctcactgcaacctccgcctcctgggttcaaatgattctcctgcctcagcctcctgagtagctgggattacagacatgcaccaccacatccgactaattttgtatttttagtagagatggggtttctccatgttggtcaggctggtctcgaactcctgacctcagatgatctgcccaccttggcctcccaaagtgctgggattacaggcatgcgccaccacgcccagcccactttctgtttttctttaggtttatgcaaacatcccctgtatttgctctctgtcctctgaagctgctgatttaacatcactgattttccgtatggagcatctcaatgaaatgcatttttaaatgctgtgattttggactttctgtgttttttttctgtgaaggttttcctggcataggaatgtaattgttctgccctagtgttattctctgtccatagaagggagttaccattcttggaactcagatttataaccactttcttattttcgtaatgcctcctaatatactttttaaaagggacttaaccttcatataattcagttttccttaaaatgtttaatcacccactttagcagccttggctttgtgtgactcatggaatatgtgtatcattttatttttaaaacttactcattaaactgaggacaatgaagatttcttaaaaggtaaatataaatagaatgtcacttaaggattattttctgcttttatatggtttttcccatattttgagggttcttgctcaaaatatctcaggctgactaatgaattttaggctgatacttagacattcatgttaacatttgaaaatgatactcgaacccggagtttgggacttaatggaagaaatgttttatttcggaactttattacattgatgttgggcctattgtgtgattatactgtatcacaggagattgcaggctttttattcctgatctgtatagtttattctttgttgctgcctcctattactgcaggaggggttttctctgcttgaaacaccaagttatctggaccattttaagggcacagaaataatacttgtgccctttttgtatatgcctcatgtgactccttgaccttgaactttgtatgatggatggcatttcatgaaaaatagcccttttctaccccagaaaagtttttcatcttccttaacaagaggcaataactgagtcaagaccatcaaaacttgcagctcttgccctaccccgcatcaaattgcagcatattgagagatgataaatatgtaaaacatgaagccagagaggcaaagacgtcagctcaacattttactgttactttcagatagcatcaaaacttggcacatgatgttgtggacagaaccgcaggctatatttactgatcttggttctgccaattacttgtgtgtgactcctgcaagtcagttagcctccctgggtttccacatgggtgaaataagatgctcttggctgggcacggtggctcacgcctgtaatcccagcactttgggataccaaggcaggcagatcacctgaggtcaggagttcgagactagcctggccaacatggtaaaaccacatctctactaaaaatacagaaattagcccgacgtggtgtcaggtgcctgtagtcccagctatttgggaggctgaggcaggagaatctcttgaacctgggaggcgggaggttgcagtgagccaagatcacgctactgcactccagcctggcgacagagcgagactccgtctcaaaaaaaatgctctcaaaagtctcattaagctttaaaattctgtatttcctgttcaggtctctttccaagtccctctgctcctcatccatctttgtgtccactgataattgcttctgtaagagagtacaaaagcagttcatttatttttactggagttgtgcaaagtcccccaggcatctgggggaaaaaaaccacacatcttaattgaagtgtattcaagtctccccagtacctcgtcaaaatttatcatcttctactcttctatgacatttcttgtaatctctactaattgagaacaaacaacagggaatctggtcctactgtaagttatgattataataacctttccttgaaatagacagttattttttcacatttccttaagcacatggcagagctgtagacaggaaatcctcaagcctctgaccctctctccaaggggaaaatcaaagctttgaaaaaatggcagaagaagaaagagagggaatgttgatacaggggcgggaaaagagaaagaaaggaaggaagtgaaagtctatgtctttatgtgtctactgtatttatgagtttgctttgtttctaaagtggagtaaggaaaggttatcatgtcaagaaactagatcgtatgaaagctaagctgctcctgagtgttatctaaatataaagatataatttaatatactctttagaaccacatttgaaataataaaacctaagtataagggaactttgggtttttgttttttttttttgagaccgagtttcactcttgttgcccaggctggggtgcaatggcgcgatctcggctcactgcaacctctgcctcccgcgttcaagcgattctcctgccgtagcctcccgagtagctgggattacaggcatgcgccacctcgcccggctaattttctatttttagtagagacagggtttctccacgttggtcaggctggtctcaaactcccgatctcaggtgatccgcccgccccagcctcccaaagtgctgggattacaggcgtgagccaccgcacctggccaaaggaacatatttttaagaagtctgcagagttctgacagtataatcatgtcagcagttaaaaaattgtcaactaattagcctgcgtcttttgtgaaaacaacaaaaaaaaatttttagcttaaatttatttaaaacatattccataggttgtgggtatctttgcatttatatatttggatgttttgccaagttataacagtgaaaataaaatgtcagtagttaaaaaaccgtgataaaatttaaaaccatgggggtaattgattataaaagaccattatgccacagataaaataagttgcctgagagcctgcctggagccattagttaaaacattgccaatctaataatgatagaactgggcagccatggtggctgatgcctgtaatcccatatctttgggaggctaaagtgggaggatcgtttgaggccaggagtttgaaaccagtctgggcaacatagcaagaccctatctctataaaaactttagaagataactgggcatggtggtacatgcctattgtgctagctaggcgggaggaatgcttgagcccaggaatttgaggttacagtaagctatgatcatgcttctgctctccagcctaggcaacaaagtgagaccctatctcaaaaaaaaaaaaaaaaaaaaaattcattcagaaattcagtttctaatgccaggcttgcctgtaatcccagcaatttgggaggccaaggtgggcagatcacctgaggccaggagtttgagaccagtctggccaacttggcgaaaccccgtctctactaaaaataaaaaaattagctgggcatggtggcatgtgcctatagtcccagctacttgggaggctgaggcaggagaatcgcttgaacctggacgacggaggttgcagtgagctgagatcatgccactgcactccagcctgggccacagagcaagactggtctccaattaaaaaaaagaaaatcagtttttaaagtaaactttcaaaagtctgtagctactttgtgtcaattctgcacaagatgggttttcctagtattggaattttggagggtctgcccctctctgttgacatttggaaaaaaacaaatcttcattcatataatctcagacagttcttaaccccactgcacattaacattacctggggagcttaaaaacaaaagttattcctgttcttcacccaactcccatacaactgaatacaattttctggagaggagctgggttgggtattacttaggctctttggaagattttcctgagcagaaaatgtttagaagcactgatctaggataataagcaatcatctaggagggaagccgtgtagatattttgttttgatctcagaggcataagaatgaattaaccactcctcattcccccagagataatgtgtggaaaaacttgttttcaaaccatcccgaagaaaagcaaatgtgatttaaggccagattgtttccaagtggccttttgcagttcctttgttctgcattcagactgagttgtgcgtggaaatagtttaggtattagtccatgaacatggaatttgaccttggtaaggaaatacatcctccgctttcctcactaaccaattgtattcatttgttagggctgctggaataaagtgccacagatgggcggcttagaacaactgaagtataccttcttgggtctggaggcgagaagtctgtgtagcagggccatcctgcctctgaagtctctgtaaggaagagtccttccttgcttattcctagcttctggttttgctggcagttgttggaattccttggcttgtaggtgcattattctagtcctctgtccttacatggtcatcttctccctctgtatgtatccgtcttggtgtctaaatgttcccctttataagaacagtaatttcttgtagtgagactggcttgttcccttcccatggcataggctctctgtcagatattacctcagtatgtgaaagaacttgcatgcctcttgcttctcaaggctggattggactgactctagggcccttagcctcaggcatttgctgaggggccactaagtgggtggaagattagattttagtgtttccaaactttgttgatgatgagaatcacataagttgcttgttaagaacagggattcccaggtcctctccttgaagattctggttcagtaggtctgggtagaaccagggagctgcatttcagtgaggatctccctgcaccatccctccaccacccagctcttgcaggtgattcttatcaatgagtgagcttcagaaacattggactaagtgacttctgctcagcatgccaagactgtaaagtttctgacatgtgttcttccagcagaagagatttctagtagactattcaatatctttcctctcctttcttagtaaaagaaccttatcttttatttgggatgcagtgaattcagttaaaagagtttcctagccttctttgaactacgtttgactgactaggtttgacctggtcaaagagaagtgatggggggtgctatggactgaatgtttgtgtcccctcaaaattactctgttgaaatcctaatgcccaaggtgactggtatttagagatgaggcctttgggaagtgattaggtcataggtttcatgcgcgtccgtgtgaagagacaaccaaacaggctttatgtgagcaacatggctatttatttcacctgggtgcaggcgggttgagtccgaaaagagactcagcaaagggtggtggattttcattagttcttataggttttgggataggcagtgaagttaagagcaatgttttgccggcagggggtggatctcacaaagtacattctcaagggtggggagaattacagagaaccttcttaagggtgggggaaattataaagaacattcttaagggtggcagagattacaaagtacattgatcagtgagggtggggcagaaacaaatcacaatggtggaatgtcatcagttaaggttatttttacttcttttgtggatcttcagttacttcaggccatctggatgtatatgtgcaagtcacaggggatgcgatggcttggcctgggctcagaggcctgacaacagggatggaaccctcatgaatgagattattgcccttattaaaaaggccccagagagctacttcatcccttctgccatatgaggacacagcaagaagacagctgtctatgaaccaggaatcaggctttcaccagacaccgactctgacgtgatcttggacttcccagcctccagaagtgtcagaaataaatgtctattgtttaagccacccagtctgcagtattctgttacagcagcctgaactgaggtaaaacaggtggaaggccctgtcaaagcatccttgtatgctgctgaaagttacaccgcctcttttccttattctattttttttccttttattctattttttttattctatctgagatgaggaattgatggttagcatgcttgctgccgtcttgaaccttggggtgatcttgttaagtcagtggaacctatagattgagggagccccaatttcaaatttccttagggctatcatgccagctctgggctgactcctctaagcctctctttatttgtgtagacttatctctagttaaaaccactttatatggggtttccttttatatacagtagaacctaatctttattgatatatccccaaatttggaactttatgagtttcgtttaagttataaacatcactaatcaaatcacctaaattctgtcttcaaggtacatttcctgagcctaaaacttgcctttctttccttaagaggaaaaggaacaatttggagtttatatttaaaaactctctgagttccaagatgattggaacaagtctcaatgggaggaacaggtcaagtcacattgtacctttagtgtctcctggtgacaatgaaagggagctttcagttgacacgtgcatgaaggaaggaaggagtgctgggtgagaagcagcataggactagaggaaagcaagagagtgattgcttttcgttatactttcctacttttcaagtctgtttattgagggaattcagttgtaatgatgtgttgaaagtgctttttaaatgataaaatgccttatgtatgttatttactgagcactgagttatatataaggatgttcagatacactacgacagtttttccaagtgacaactgctagatattaacaggtgtcataagcaagaaaagtttgtgacaaacgggtttgggaaatgtcatgtcaggtctctttattacaggacttctcagtgcctttaacgtattaatgtacattgtgagtatcaaagaaaaaggaaggttgtggggaaggggatatgccatgcggtattattttttaatattaaaaatatgggtgtcttgaagaatagaacaaccttggagaaaggcagctttaggaagaattatgtaaagatgtaagaatacatatttagtacctactagatgcaaggttccagagcatacataaaatgagacacattgtccttgaattctgaaaacaaacactttttatgggttggtggggcgcaaaacatttacatgtggaagaataatatttaggatagaatctaagtgccacttgtacccaacattgtacccaataggtaacttttcaaccttcattcagtccctgtcttctgagagcttatgatgtagggctggtgaggatggtggataaggatgaggccaaggataacatggagtgggattagagaacacaggcagtggtgaagaggttcaaagaagacaattgtcacacccaagagagggattacggaggggaaggagagactcactaaagggaggatctcacaagataggcagaatttcaagagagatgggattgaggtcattttgtgggctgaagctatcctcctacttcagcctcctgagtagccggtcttgaacttctggactcaacagtactttctaatactggagttattagaaaaaaaaacaaacccaaaacttaaaaaggaagacccttatccttcactgaggatctgtttcttttttaaaaaaattttaaacattgttttataaagataatgtctcactgtgttactcaagctggtcttgaactcttggtctcaattgaccttccttcctcttgactcccaaagtattgggattacaggcgtgagccgccgtacttggctgaggagctttttaatgggaaattcttagatggcttcattgtctatgggtgtaatttcctgagacagtcctactatcctggtctttattgctgtatttgaatttcttttcttttccttttttttgagatggagtctcgctctgtcacccaggctggagtgcaatggcacaatcttggctcattgcaacctctgcctcccggtttcaaacgattctcctgcctcagcctctgagtagctgggattacaggcatgtgccaccacgcctggctaattttgtatttttagtagagacagggtttcaccatattggccaggctggtctcgaactcctgacctcatgatctgcccgcctcggcctcccaaagtgatgggatttcaggcgtgagccacctcgcccggcctttgaatttattttcttttgagtaataggtacagttctactgttctacatgaagaatgagtttacattcttcacataaatttctaagtgtcaacttataaaagctctattaccatatttctaatttttttctgttcattaatgtcattttagacttctgtttgatggtttctgttcctcaactcattgttctcagaatagcctttgaaagtcacattaaacacagatgagatgtgcaaaataacttcaaatttttagagaagaaaccacataaaggtggcgttgggttatctgggacagggatacggagggaagcaaaactaagtatatgtgccttctagtgggcattccagcaaagaagccagattgattttctatttgatttcttctgagtggtttcactccttgctggagtcaatgtcatatgatcttgatcatttgccaatataagtaagaaatctaagtgtaattattggacaggaagggaagcaagaactcttcagctttaaaatccaatggcatataataataattaaccctgttttgtggaataaaatatcagcaggaatatttaacatgaagcatactgtttcccaataccttcgttgcattgtcaaaaagttttagccccaggattctgttttttatttactgtttctgtccacctctctgctaaggaacttgttggtctgctgattctattaagattagcattgcagtagcccaaccttgaaaacagctatgctggaaggatcaatgactctagccatcaaagtggacaagggaagggaacctcacttgcagttcctcggtctacctgcccacctcagcttcagggccttttgatatggtgggctagaggaggtccaaatgctggtgggatctcaacctcacctggtgtccaggtgcttgacaccatcccaagaaggaattcatgagtcagaaaattgtagaagtatggagatttattgcaaagggaaaagtacaccctcaaggggcaaggggagcgtgggcatactcaggagagttgtgcgtgtgagggggtttggggctgctacctttatgggcttcattcaccaaggtggggaatattcatgaaaattcctggaaggtggtggagatttcttggaactgtggtgtcaccgtttttataccaaatgtgggtgttcctgaaactatcatggcactcgtgggggagttgattaagtatgctaatgagtgcataatgaggttctaagaggaacctaggtcagatccagcatcattttgggtccagttggtcttagccagcttggtccacgccccagtatttcagggtcttatcagtccctagcttctgcaggtaatttcaacagtttctttttactagtcatgtgaaactcctgcctggaattttctgttctcctgaaccactctgtattattcctgtctcgctttgacttggtgttccctgccccaaaaggctctttgcctggtctctgcacagttgctacctaaaaagtcttttcctgacacctcccacccctcgagtaaaatcacacattcttctggcttcctattctttcattttaactttttaaatacttctcacccttcatgtgttacctgtttgttcatgatgtatttgtttgtgaactgtcttctccctagagcagtaccctatcaggacttaggctctggggatttcactgctcattctccagcctggcacataagaggtggtcagtaaaactgtcgaatgaatgagtgaatgagtgaatcacagttaacctcagttataaagatgtaatcatcagtcttcccaaaattcttacaatactggacactttaaaggaaatgaggcttttttaaaaaaagaaaaagcatttcctggcaggaatttatgtatttgtatgcaatatgtgggtagttacagtacagtgcaagaaaaacaaccatatttcctgtcctctaggaatttgaaatctgtaaagaactctaacattggaaatgcctgataacatacatctgcagttatttgtggcaaaagacaaggcaaataggcaaatattcggtattataaaaaatgcacagatttcaaaggacaagtataggtggatttacatgcctacatcttttgaggtgagtggaaatttgtacatgataatctaggtgaggctgaggctccctggctgtgacagttccctttgggctattcccctgtacctcctgggtcagctgatctgcctccatccagaaaagatgctgaggaaagtcaggagtggtcagtagcttttgtcatgtgggtagctaattacaagttttgggttaattttttttttttttaattgagacagagtctcgcttttgttgcccaggctggagtgcagtggtgcaatctcggctcactgaaacctccacctcctgggttcaagtgattctcctgccacggcctcccaagtagctgagcctacaggtgcgtgccaccatgcctggttaatttttgtatttttagtagagacagggtttcgccatgttggtcaggttggtcttgaacttatgacctcaagcgattcacccacctcagcctcccaaagtgttgggattacaggtgtgagccactgcgcccggtcaagttttgggttaatttctcaaaatgtcttctctcgcacgtttcttatcttttcactcttttctcctgctttctaggtctttcttctttgagaggaaagggagagaccctggttaggccagaaatccatggagaagagttttcttcctcttctgccttccactgtggttggtagattttcaagattttagtggagattgatggaggatcctgcaggctgcagcctcatccccctcacaatgtattttttgtaataggtgaaatgctgcttctttattatggtcaggagaaatgttctctcactgctggtggccagtatataaatcttaacttgtatgtttatatattcagcattatgtatgtgtatgtgcgcatgtgtgtgtgtttgtgtgtaatggattttagttgtgcatttagtaggataaaacacatgcatttctttcatttatgacttatactgtgactaattgtggttcattttaagactatttattttaaagagttaccgcaaaaaagtctttgaattgttggcatgctaaagttaatgataataagaatcaagattttgaaaagcacacttcttaatttcttctttcctcatttaaccagagctgaacagcttacaagtagaaatcatgggttttggtatatagaaatataggcttaaaaatatggatgcaattttaatacaatgcagttttatgaggcggaatatcttagttgtttgaccctaaccgacttcattaggatgttgtaattcccctcctttaacttgcccattttgggcgggggggaatccttgtggaatgcagtgattcaagagcttaaggacagcaagagagcaggggtagggatggttacaaggtaagacgtgtagtccctgagcaaggcctccttaaggatgtgaattctgattactgcaactgaagaagacagatgtgggaagagagtgcaaatcccagtcaccccacccatgcccgtcttttgctggctgaggggtggctctgtgtcttttgctccacatcccctgtgaatgtgagggcaaagaactctgctgaagttgttggtcttttgtcagaagaaggctttaagtactggcattctttcctcatgagcacagatccggctcctgtttctcagggagggcagtgaacttgctctacattcctcatgggtaatgaagttgttcccaagcctgtcaccaccacatccttccaaccctgctcttaagcttctttttcagagggaagcagaatgtttactcagtaggacatcctaaaggacagaggcaaggcaaggagaggatggagaaaagctcattctcttttgaccacaatcactgtcactggctgcagggtgtggaaaatgggaaggcacagtatatcatcatttcctcaggacggaatgctggccagtgcccgatgggaacaacagctagcaaattagtgaattgtggctgcccattatttaagagagaacacgtggtaaccaccttcagtaaataaatgcagatgaatttggtgatttacaactcttgtgttttcttgtggtaacacagttgtccaactgatcaggcatgaatgttaatttacacaccataaggtacgtggttagtggttctcaacatttttaaacatgagaaacctgttctaacatacacagagttcacagatctttaagaacttttagctgttctgttatctgttggttgagaagacacataatggtgagatcaaaatgtattaagtggatttgaattacaattatcatggaacttactatatttgaaaactgtgtgtatgtagcatattacacacaatggtgctcagggattcaggatcttttctcgtccccaccaaactgaggaccctcctctgccctcccccgttctcagttcagggccaaagcccccaggttgggatctactgggagaatcaaaagattgtgaattttgggtcaggcagagaggggatcaaatttcaactctaccacatcctgtatgatcttgggtaagttactaaaccttgctgtgccccagcttcctcgtctttaaaatggagatcagttcctatgaagacttaacctcctaggggttttggaggaattgaagttttgttgtaccatgaatagtgcctgcgcaggaaaggtggcacttaaaattttttccccacttcttgcctactctccccacctccaggacagattcaagaccagtaatgcacaagatgaaaatcaataagttaattctttctgcctctgagcattcatttagccggtactgtatgttctagttagtagagctatttgacaaatgactactacttttagtggcgtaaaacaaatctttattacactcaccaattctctggacagggtacaacagggacagctcgtctctgatccgtgttgtggaacttcagctgggcagactgaaaggatgggggctaattacctggtggctcattccctcagcatctgacggataatgctggctgtcacctaagaccttaactgaggcttttggccagaacgctggtgccccattggccctggctttctcacagcatggtggctgggttccaaaaggaaacatcctgagagagctaaacggaaacctcatccatcccctgtcatggtctagccttggaaatcatacagcatcgcttctgccaccttccatccattgagattgtcacaacatcccgctcatattcaaagggaggagaaatagattatgcctcttgatgcaaggtggttctggagagtatatgggaacagaaatcttaccgcaccctttgtggaaaatctctgccacggtatgtgagcagtttgtaaatttatagaaagggactccttgaatgtccttgcactgctcttccctgagttaccgtggttgcacgctggactaaaagctaagaccttaacacaaagacctgaaatatagtatctgaactctgtcccagggcacgtgtcaccttctagctttgaactggagcctgggttttcatctaaaagctggcttttagatgtctggtcaatggcatgtcagtaactgaactctgcgctatatgctaggtggtaatatcaaggtgtaagacgcaccagcgaagccaagggctgactttctttccaattcaaagatattttttgtggtaactctttaaaataaagtcttaaaatcagccctaacctgattttatttctggacaagagccatattacctgtaccccactttgtctccattactaaaagttcaccaattacattgtcttcctaagatttaaaaaaaaatttaaataattatagaaaaagttgtagtgtttggaaagctaccttagaaggagaagaattggcctctagttaggaatgagaattcttccttatgatattatgacagttactttccccagtaaatatttatttcttctcagagcttatttgcaagtgagatatacttaaagctaaacaaacgattagctcacaaagtgttaaaccaaaaagaagtttcgcagaaaaagaatggacacataattttaaaaatgtatatgtatcatatagtttgattatgtgtaaaccaaaaatttaagggaggatgatgggttgtttatcatttatatggagtcaagttagtctataaaatgttcaatcgcttccagactctgaaagtcattctatgaccctgtctcagatttttttttttttttttttttttttttgagatggagtctcgctctgtcgcccaggctggagtgcagtggcgcaatctcggctcactggaagctccacctcccgggttcatgccattctcctgcctcagcctcccgagtagctgggactataggcgcccgccaccacgcccagctaattttttgtatttttagtagagatggggtttcaccgtgttagccagggtggtctcgatctcctgactttgtgatctgcccacctcggcctcccaaagtgctgggattacaggcgtgagccaccgcgcccggcagatttttttttctacttgactaataaaagtaatagcgctttcatgaggtctcactgggctgtttggagtatgtgagggataacagaggtgaaaagtttttggaaatctgcatgtgctattcacatgtaaagttctggcttttattttttactttttttacttattagagctagttctcactatgttgcccaggctggccacaaactcctgggctcaagtaatcctccgcgctcagcctccggagtagctggaattacaggagtgcactgtaatttttgttgttgttgctattattagtcagaggtgggactccatgacagcccacagagaggggaggaacaaagacctgccttcccacatgggttctcttcccctatttcttatatttccccttcttccttctcctctcttaagtctctttcttcccattgcctttttttccttccctgtcttctgtaaggtcttcggcctcccgttgttgtccatagatattgcttctggtatctggactctgaatgccttgtgatcaaaactatgttgtttatatagatatgtgtgtgtatgtatgtagatgtagatgtgtatatatatatatatatatatatatatatatatagatgtgtatgtatgtatattgtatacatacatataaaatatgtacatatatttatgtacataaatatgtagatatgtaaaatatgtacatatgttaaaaataatacaaggatctcacatcatgcctagtccagagctcaagagggatgtagcaactaaatgtattatgaccatctagattgcagggaaaatcattagccaggctcaaaaaagtaaacctctgctgctttctagattgagcaatacacaagatattgttcatgtggcaaatcaatgccagcaattccgtgtctgcctttatggcttggacttagggcttttattttaaatgatttcttattttctctgccaactggtctctaaatataagttcgtgtttttcttgaacggacacttttttttttgaggtggagccttgccctgtcacccaggctggaatgcagtgatggaatctatgctcactgcagcctctgcttcctgggttcaagcggttctcctgactcagcctcccaagtagctgggcttacaggtgcgtgccaccacgcccagctgttttgtagttttagtagagccagggtttcaccatgttggccaggctggtcttgaactcctgacctcaggtaatccacccacctcggcctcccagagtgctgggattattacaggcgtgagccactgtgcctggccttggctggacacttttaactgctctagaagagagctgttcttttggtgtctcgccctgaaagtgagttttatgtatgccatgtagtctatatgtagatcttttcagatagaccctttgttatgagctgagttgtggccccgcccacccccaaagtgatatgttgaaatccaaacccccagttcctcagactgtcactgtatttggacataaagttaacatgaggcctttagggtgggccctaatctagtatgactagtatccttatacaaggagaaaatttggactcatgaagagacacacacaagggatgtacatgcacagagaaaagtccatgtggtgacacagtgagcagctgtctgcaagccaaggcaagaggtcccaggagacatcagcctgctgggtgacactttgatcttggatttccagcctccagtctgtgggattttgtaatggcagctctagaagactaacatcccctccggttttagtgaaaatttgtaaagcattgttgtgtgatgtggtgacaagcagagaaatacaaacttaatctctgccaggcgtgatggctcatgcctgtaatcccagcactttgggaggctgaggcgggcagatcattggaggtcaggagttcggtaccagcctggccagcatggtgaaaccccgtctctactaaaaattcaaaaattagctgggtgtggtgttgtgctcttgtaattccagctacttggggggctgaggcaggagaatcacttgaaccagggaggtggaggttgcagtgagccaagattgcgccactttgggaatcccagcactttgggaggctgaggtgggcagatcactggaggtcaggaatttgagaccagcctgaccaacatggtgaaaccccgtttctactaaaaatacaaaaatgtataaataaattaaaaaaaatacaaaaattagccaggcatggtggtatgcacttataattgcagctactcaggaggctgaggcaggagaatcgcttgaaactgggaggcagaggttgcagtgagccaagattgcaccactgcactccagcctgggcgacagagtgagaccctgtctcaaaaaaaaaaaaaaaaaaacccacttcatcttattttatggatccactgtggagtgatggtgagggtatatattagagttctccagagaaacacaaccaataggatgtttatctatatacctatatatagatgtgtatataggatgtttatttatctatagagagaaaaaaaaaggagattgattgattctaaggaattggctcatgtgattgtgggctggcagaatcggaatctgtagggcagcctgacaggctggagacttcaaagaagagttggtatttcaagtcaaaatgcagtttggagacagaataccttttttgtgtgagatctaagtcttttggtcttcaactattcggatgaagcccacgtacattatggaaggtgctcctctttactcaaagtttaccgatttaagtgttaatcatatctaaaaagtacattcacagcaatatctagactggtgtttgaccaaataactgcaccgtagtttagccaccttgacacataacattaaccgtcgcatagtggagatgaggaagtggtagtctgggcctacgttatataagaatagtgaaatttcacctgatttaaggaaagctaaatgttaaatgttaacaatgtgtttttacatgtataacatcacttaattatttgaatcaaccttttgttttaatacatgagtgagttgaccatatatttagttttaatatactcatcacccataaatttctgttgatgatataagcattacgtgtgatataggctgtggactggtatttacatatgcttcaaaatttcaatactcatgctaggaaattgcttggtctatgcttttttgccttggtgtgactttttgccttaagtattattattatctttattatggcataaagcagtattttatacactaactccttttatttatttatttttgagacggagttttcactctgttgcccaggctggagtgcggtggcgcaatctcggctcactgcaaactctgcctcctggattcaagagattctcctgcctcagcctcctgagtagctgggattacaggcatgcactaccacatccagctaatttttgtattttagtagagtcgggctttcaccatgttggccaagctggtcttgaactcctgacctcaagtgatccacctgcctcagcctcccaaagtgctgggattacaggtgtgagccaccacacccggcctagttgttcctttctagaggacagatccatatcctttaaatctgcttgataagatacccatttctatccagataatgaaatgttttggttattaaagtatgcccggtatttgggcaaaactagaatctaataaattgtaacccacaaatcatatgtgggctatcagtgaacactttcccctaactccccatggcgtgacaggaagccatggagaataagagtaaagtgataaaactggcaagtggaccgagaaatccaagccatgagaattctgagaacagagagcaagaaacagctctctgtcagcattcaaggacagaactgaagttcaaataggaaaaaaggatgctgcttcaaggatcaggagttgattctcagagactctgatgcattgccttggtgtcttaacctgtagcttagttttccttgggactttgcaccacaatcctactcagctaccgtgggaattcttgcttgaaagtaaatctaggactatagttgtggtaatatttgagctttacttttcttctgttactcttgtccatttgattgaggctaagaaaactggccctctgttaaattgaagttgcttttctaaggcaataggctctgggagaatggagaggtggggtctcctaggttaccaagcttgtgcactcccatgaaaaagcctgggtctctgtaaaatatgttggtaacagttaaagcagaagccattggagagagagagagggaaaaaaaaaaccaacttcattatgatttaaattaatctctactttttattcttagatagaactaattaaagttctaattattttgagtgctttaaaactaggtgacagggtttccctttctctaaaagggattggaatttttctttaggaacaaaattgatgggtagtctgcaaaaggattcaaattgtttagaaatatatgaccattatgaagcattattttctgtcagtgtctatgatttaggggtcgtagaagacctgaatgtaattagtgatgtggtgactttgtgaagctagaaaaaaaagaattgaattttcattctatctttgaaggaagaaagacattgtgagcttagaagcaatagaagaagtcacaaagtacacttaaattagaaagcttaagtttattgtgtagtggatagtcaagagggaagactctcccacccccttccctcttggtaggcaaataccagacagaaaatatttgtagccaaaatggctaccagtctttattgtaagcgcatcaactcaaagataaaacaagcagaggacatcagaagacaactcacagctactaactgaacatgaagaatacgtcaccgataaccaagtgctgcaattaaaataagatgctggccaggcatggtggctcatgcctgtaatcccagcactttgggaggctgaggtgggtggatcacttgaggtcaggagtttgagaccagcctgaccaacatggtgaaaccctgtttctactaaatacaaaatttagccagcagtggtggcgtatgcgtgtaatcagctacttgggaggctgaggcaggagaatcgcttgaatctggaaggcagaggctgcagtgagctgagattgtgccattgcactctagcctgggcaacaggagcgaaactgcttctcaaaaaaaaaaaaaaaagccacaaatacattacaattttaaaatgtgaatacttttgttatttgataatattaaggaattattcttaaaatatttagacgttatactagtattttgtaaaagatttcagagaggccagacacggtggctcatgcgtataatcccagtgctttgggaggttgaggtgggaggattgcttgaggccagccaggagtttgagaccagcccaggcaacatagcaagacccttgtgtattagcttcttcccacactgctataaagaactattggaactcagtaatttataaagaaaagaggtttaattgactcatagttccaaaagctgtactggaggcatgcctggggaggcctcatgaaacttatggtggaagggtgaaggggaagcaagcacgtcttcacatggtggcaggagaaagagtgagtgaagggagaggtgctacacactttcaaacaaccagacctcatgagaacgcactcactatcacaagaacagcaagggggaaatccgcccccatgatccaatgacctcccaccaggtccctcccctaacactgggaattacaatccaaggtgagatttggatggggacacagagccaaaccatatcaccctgtgatacttgggtgaattgtaataatccccatgtgccattggagggacctggtgggaggtaattgaatcataagggcagatttttcccgtgctgttctcaggatagtgaataagtcccatgagatctgatggttttataaaggggagttcttctgcacatgctttctttttgcctgccaccatgtaagatgtgcctttgctcttttttgtgttccgctatgattgtgaggtctccgcagtcatgcgtaactgtgaattcattaaacctctttcctttataaattacctaatctcaggtatgtctttattagcagcataagaacagactaatacagtaagttggtactgcagagaatgaggtacagctgtaaagatacccaaaaatgtggaagtgacttgggagctgggtaacaggcagaggttgagacagtttggaggactcagaagaagacaggaagatgtgggaaagtttggaacttcctagagaagccttgttgaatggctttgaccaaaatgctgatagtgatatggacaatgaagtctaggctgaagtggtgtcagatggatttgaggagcttgttgggaattggagtaaaggtcactcttgttatgttttagcaaagagactggcaggattttgcccctgccctagagatctgtggaactttgaagttgagagagatgatttagggtatctggtggaagaaatttctaagcggcaaagcattcaagagaaagtagagcataaaagtttggaaaatttgcagcttgatgatgcaatagaaaagtaaaacccattttctgggaagaaattcaagtctgttgtagaaatttgcataagtaacaagaagccgaatgttaatcaccaagtcaatggggaggatgtctccaggatgtgccagagacctttgtggcgctccctcccatcacaggtccagaggcctaggagaataaaatggtttcctgggccaggcctggggcccccttgctgtgtgcagcctagggacttggtgtcctgcataccacctgctccagccgtggctcaaaggggccaaggtacagcttgggctgtggcttcagagggtgcaagcctcaagccttggcagcttctgcatggtgttgagcctacaggtgcccagaaatcaagaattgaggtttgggaacctccgcctagatatcagaggatgtatggaaatgcctggatatccaggcagaagtttgcatgggggtggggctctcatggagaacctctgctagggcactgtggaagataaatgtggagtgcgaacccccacacagagtccccactggggcactgcctactggagctgtgagaagaaggccactgtcctacagagcccagaatggtggatccactgacagcttgcaccgtgcacctgggaaagccacagacactcaatgccagcctgtgaaagcagtgtggcctgggtgtgagacttgtagtcacaagggatcatcttaaagatttggctccccctctggattttggacttgcatggggcctgtagcccctttgttttggccaatttctcccatttggaagggctatatttactcaatgtctgtacccccactgtatctaggaagtaaccaacttacttttaattttactggctcatggatggaagggacttgtcttgtctcagatgagactttggactgtggacttttgagttaatgctaaatgagttaagactttggggggccgttgggaaggcatgattggttttgaaatgtgagaacatgagatttgggaggggccaggggcagattgctatggtttggctttgtgccctaaccaaatctcaccttgaattgtaataatcctcactccatgggagggacccagtgggaggtaactgaatcacggggcggtttttcctgtgctgttctcgtgatagtgaataagtcacacaagatctcatggttttataaaggggagctcccctgcacatgctctgtctttgcctgctaccatgtgagatgtgcctttgctcttcctttgtcttctgccatgattgtgatgtctccccagccatctggaactgtgagtccattaaacttctttcctttataaattacccagtcgtgggtatatctttattagcagcatgaaaacagactaatacaccctgtttctacaaaaaaaaaaaaatgtttaaaaattagccaggtgtggtggcacctgtactcccagctacaaggctgaggctggggaggagctcttgagttgaggagtttaaggctgcagtgagccatgatggcgtcactgcactccagcctgggcaacagactctgtctctaaacagatagacaaaagatttcagagatacacactgaaatattgagagttgaaattataaaatgtctgaattttgcttacataatctaggtttctacagggaatgagtgagggcatcgataaaataaaggtgaggcagataagtgagttatttgataaagctagtgaggcaaggtgtggtggctcatgcctagcacttagtaggtatatgtgggtggatcctttgagcccaggagttcagaaccagcctggacaacacaatgtctctacaaaaaatacaaaaattagccaggggtagtggcacacacctgtagtcccagctacttgggaggctggggcaggaggattgcttgagcccgggaagttgaggctgcagtgagctgtgattgcaccactgccctccagcctgagtgacagagcaagtgcctgtctatacacacacacacaagctgaagggtgaatacatggggcttcattatattctttccttttgtttgaacttttaatttttgtaatttttataataaaacactaaaaatattaaaaatccttgaaagaccccagtgacttcaagaaaagagagaagccaccagacattttgtgcttccagatggaagtacgcgctaccttctatgaagtatttattgttgccaaaatattcaacttgaatctggtcagcctctaaatcctattgccaattaatgcgaaatactgaagataggaaaacatgttaaatgtcatggtgagataggatcagtcagaatcaagagcatgagccactctagaatccacctggcttcttcaacaagtagattaaaagaaaagggggttggggcaggaagaagaaactcataaattaagagactcatgagacagagccaccatttgcaatgtatgaacctcatttgtaacctgatttcatcaaaccaagaaaaattcatgagacagttgggaaaatttggataccaacagaatatttgatgtattaaggcactagtataattttttctaaagatgtgttattgtgttcatttttttaaaaaaagttctcattgtttagagacacatactgaaatatttattgatgctgtgctatgtggtctgggattaattcagatgatctggcaggcaagggtctaaaatggggttacagctgaaaggcacgagactgacatgagttgataatcattgaagcaggatgatgaattatccactctatttttggatatatttaagtatttccataataaaaatactagttttcacctattgttatcgtggtaagcattttctacagtgattgatatccagtgctctcatactttgctggtgtctttatatgcacaaatgtagtactagccatgtcctgtgtatcactttcctaaaaataacctacatgttaacaaatgaatgttgagttaaataagtataaaactttatggaattttatgtatcttataaaataacaatttattggccaggcatggatggtggctcatgcctgtaatcccagcactctgggaggctgaagcaggcaggtctcttgaagcgggagttcaagactagactggtcaacatggcgaaaccccgtctctactaaaaatacaacaattagccaggcttagtggcatgcacctgtagtctctgctactcgggaggcagagacacaagaatcacttgaacccgggaggcagaggttgcaatgagccaagatcctgccactgcactccagcttgggagacaaactgagaccctgtctcgaaaaaaaataaaaaataaaaacagggccaggcatggtggcccacgcctgttatcctagcactttgggaggccgaggcaggaggatcacttgaggtcagcagttcaagaccagcctggccaacatggtgaaacctaatctctactaaaaatacaaaaattagctgggcgtggtggtgggcgcctgtaatcccagctactctggaggctgaggcaggagaatcgcttgaacctggtaggtggaggttgcagtgagctgaggccgtgccattgcactcccagcctgggcaacaagagtgaaactccatttcaaaagaaaggaagaaaaaacaaaagcaaaaacaagaaaaacagaacaatttattgccccataaggctacctttgatgtatcagagtaaaagaaagcaggacaaaaatcagttatgctagaaaagagataacttagggaagttcacttaagggaaatacaacaaaatgctctttgtttttagtagaatattaaagtatgggtgtggatttttatcccccttcttacagtgtttggttatgtggttatgttttgtttctaaggccttaaaataaatagataaaaatgtatactatagtaaattgagaaaatatactcatatacatatatttaaattacatacttatcttcacctaaaataaagatactttgtctaacaaagtaatattagggatttattttatgttttaagtgaatgataaattatcttgcaatgatatacctcagatgaactcttctattaaacatctgtgtatttgtgcatctacttatttactttagaacgggcaagagaaaatggccttgggacttttgacctgtggaagttttgcattttccagcctggatatgtggaggctgtgggcaaagccatcttacttccacattgtttttctgtttcccagttcctgggcactcagctgcctaagtgcttctcttttgcaggaacaaaaagaaaaaaaggtaataagcatctcagaactcatctggggaaaaaaaaataaagaaatgaatagttaatttgctgctactgtgataaactttctttgtaaacattgtcatctcaacttctgttttgatagaggacagttgaaaacactgtgcttgcactggctggctgaagtttacacttattcaaagcaaggcagttgagaattaacccaaaaacgaatgacctgaccttccaggagtcctgatgcggccagggggccatgtgctcagggaggctttgcagggcagtcatcccaggagctcggtggagtggagggagaggtcaggaaagggaatgcctcggcctcctgctgtctgttttcagtctcctaaagactcctcggagatgaccacaggccctggaaatgggagtggcccctggagttggggtggtcagaaaaagcagaagtgcaagtccaacatgggatcagccagcattgggcatgcctagggacaatcagttgtctagggactgcccaagaggcctgggctccctgctgccagggaaggtggtgtttctgttctgccatgggtttcagctgcagccaatggacccttgcccaggaggggttttaatcactacaaagagccagacaaatgtggcccatggactcgacagtatatatagaaagagcaatggcaatgggtgtgcagagtcactgtcactaattttaccaagatagttctaatcttaacttatacaggtactagctcttaccaataatcttgcaaaatatttaccatgcttgatttttttttttttttttttgacagagtcttgctctgtcactcaggctagagtacagtggcgtgatcttggctcactgcaccctctgcctcccgggttcaagcaatcctcctgcctcagcctcctgagtagctgagactacaggtgtatgccaccatgcctggctaatttttgtgtttttagtagagatggggttttgccacgttggccaggctggtcttgaactcctaacctcaggtgatccaccctcctggcctcccaaagtgctgggattacaggtgcctggtacctgcttgatatttaaaagtcatatatatgtatacatatatatattatatttatgatatatattttaaagtcatttatgtatatatataatatgtatatatattttttctctaataggattacttcgaggatttttccccagtacacctagaaacaatgataataaggctataattaacacaaggcaaactattcctgactttctcatagccactatcctcactctgtcctgagagcctggagagtaacttctctgtgttgagaagcctcagtgtgacttgtacttgtgtttctgagacacaaactgatctgctcagtttatttgtttgaagtgtatgttgctttgagaaaaaagattgttttattatattctatttccatgatttttaggaatggatcagaggaggaatatcagagcaagattccatgagaaatctgaggcacaaggttaaagaaattctccagaattatatatacacctggaatttaacttcccagagcacagggctttgtagttcttgttcacaggcctgtccaatgcatagaaggtgctcaatgaatactgctaaataagcgaatgaatgaacaagccaggatctgagcccaggtctgtgttagtactcgaatgctcctattgaacatatgcatttaaccatatttgagatgtaattgatttattgaactgctcaagttaatgaggtgtacatttgaaagggtctttatttctctctagttgctgatttcaaccatgccaggtagaacctccttttcctgtcccatcacaatgttcaacctccataagctttcagagtaatccagttcaaaaactgaatctcaaacttgatttaaatctctctttcacctagagcatctggacccttctctaaagcacctgaagggagagaagagatagagggcattctgtcctttttctccttctgcctctttctcatctgggatcaacctgtctcccgcaaaggttggggacagagaggaagcactggggtcacagggaaggtgaatgaacacctctctgctcagctggatacagatgctgtcctcttattgctgctcagatgttagctcagtgtcccacatctcagctccgtgactcgggctctgccttcagttggaacttttcccactcttcctgctgccctcctactactgcaggggtcctctcccccaagggcagccatcttggttggggtacaggcaagatagcacaagtcaggcttcataacgtagtgtcccaggaaactcactcatccctgccgctcccagctgggggtacataggctgcttctctggagctaccaccgtgccacgcttttctctccagttcttttcttctctgtggctcagaggaacacagagaaatcagcaacctactgccttagcagatgagcagccagtgaaagtgatgttggtcttcccctctttaggcccgcccccctggtctctgtgtgattccgttgatgaccccaccagttggtgggcagggggtggggtcagtgaactgggggggctggggtgcctgaaggaacgagcactgctcttcccttgagggattctgattgcccgctccccagtgttctgatatagtctaggaagctggtattagcagggctacctctgttatcttttagtaacttctaaaggaggtatatgacccccctctttctgaaggtggtaactttgtggttcgctatcctcagcagtaggcttttgtctctaatgctggtgcaatagaagacataccaaggcttttatctcagcccctaaagactttttagtagaaggagtagaaggaaaaggatttctattgaatgatgtcattagtgatctcaaagattaaaaaaattataaatgtatgaattggggcattaactggcaggccaggaagattccagcagtatttgtgcatatctcatttattctttcttttttttttttgacagagtcttgctctgttgcgtaggctggagtgcagtggcgcaatctcggctcactgcaagctccgcctcccaggttcaagcaattctcctgcctcagctcccgagtagctgggattacaggcacataccaccacgccaagctaatttttgtatttttagaagagacagcgtttcaccatgttggccaggctggtctcgaactcctgaccttatgatccgcctgcctcagcctcccaaaatgctgggattacaggtgtgagccaccacacccaaccatctcatttatccttgaagtcacactatactacacagacatgaaggttgaaagatgctagaggtggagctgcttataatgaaaacctggtggcaacctagatgtttaatatcgtttagctttaaagaatgttgatgcagctctttattgataggaagaaagttcagcatatgttacttggtgagaaaactgggctgttgagcaaaatatttgctatatgcatagaaaaaatatggactgatagaaaaaatgggcagggtaattcttgagtgataggactgatagtggtttcatttttatttttaaattttctgtatctttgaaacttgtttacggtgaatcttgtttatatatgcaaaagttttgtaaagaaattatactatcaaacttaatgaaaagctagaatatatacttacaccaggtctttagcattttaggtgtcctatgtccttaattactgaagatttttttacatttttcatcatctctgagtgttaaagtctctgtacgtaaaagcttttagtaagtttcacaatctggcttatatttcaacaactgaatgcactaaatattacttggcatttacaaatgcatgtggtaatttggaaaagtgcctttcttacaacataaatcttccaagtaactttgaaagttgttgtagtcatcatcttgaaaactagaaaatgtgaacactctaacttgtataaagaaattccaaatgttattcatcttatggtctattttgtaatttgttggaatcattgaagtgcttcagggaaattaattcggcagggtttatttaagtgcctagagcttgataaattagagtggagttttagcatgcagagaaatggtgccgtcataggactgcatctttttgtctgtacaattccagtatcagcctataagctctgcgagttaggaaacttggctgtggttttcctgtggtactcataggacctcacagagtgcagaatacgtgatacaagtgatcatgacaaaatagtgaacttttactcagcagttaatatgtgcaaggcacatactatggtttttatgcattatctcatttaaacttcacagcaggtctcgataggtggttttcaaccttttggtagggggcagggctggactgtgctttgcaatgtataagaaaaattcagctgggcgcggtgactcacgcctgtaatcccagcactttcggaggccaaggcgggcggatcacctgaggtcaggaattcgacaccaggctggccaacatggcgaagccccgtctctactaaaactacaaaaattagctgggcatggtggcgtgtgcctgtaatcccagctactcaggagctgaggcaggagaatagcttgaacccgggtggcggaggttgcagtgagccgagatcgctccaccaggcactccagcctgggcaatgagtgagactccatctcaaaataaaaatcaaaatggcaagtgttttttgttttttttttaattccaaactgccctaaatttccatagttatggaaatgctttgtaaagccgttcattaagtagactgatattcaggttaaattagagcattttcttaaaagtctgtgtcaattgtgggttagcttttttgtttgtttttgacagagatgaggtctcactgtgttgcccaggctggtctcaaattcctgagctcaagggatcctcctgccttagcctcccaaagtgctaggattacaggcatgagccatcatgcccagccagaatgtgggtttgaacaaattgagataacagtgagaaaaaacaccagagttctttagggttacatcgacaactttctttgtaagaatgatcttttcaatgtttgccatgttttactttgctgtctataatgtgcagaattcctgctagtgattgagtaattcaggaatccccagtccctgggccacagactggtatttgtctgtggcctgttaggagccaggctgcacagcaggaggtgagtggtaggcaagcaggcattatcacctgagctctgcctcctgtcggatgagtggcaacattaaactctcatagaagagcaagtcctactgtgaactgatcatgtgagggatctaggttgagtactccttatcagaatctaattgctgatgatctgaggtggaacagttttctcccaaaaccatctcccccggcccctggtctatggaaaaattgtcttccatgaaactggtctctggtgccaaaatggttggtacagccaggatactaaatagaacaattcagaggccaggtaagcacacagatactcctaatgtagtgcaggatgtgctgaggctgaaggtgctggcatttatgctgggcttgaaggatttttgacaagttaaggaaagtagtattagcgtaaaattttgaaggaaggtcttgagaacagattggtttttaaaaatactgtgggtaattatggagttattggaattactacctgttactcattccaaatagatcaccacctttaggagaaagttctttagatgtcttggcacggtggcttacacctgtaatcccagcactctgggaggccaagatgaggatcgcttgagcttaggagtttgagaccagcctgggcaacacagacctcatctctacaaaaaaaaaaaatttaaaaattagctgggcatggtggcttgcacctgtagtctcaactactcaggaaactgaggtgggaagacagcttgagcctaggaggttgaagctgcagtgagctatgagcccaccactgcactccagcctgggtgacagagtgagaccctctctcaaaaacaaaaaacaaaaccaaaaaaagcttcaaaattatctggattcctcaatctgctctttgctgcttccaacacattttaaatttggcatatttctgatttcagattgttttctagagcagtgtcatggacatattttttcctgaatctaattgaaagcacacattagaaaacctgtctggtttcttagagtcattctgttttgcaggaacaaatgttctctgattcctcaaagaacttctcttcttttggactgctaaagcttttcttaggaactgtgccatttctgtctgctcatatttatagagggagggctatggaattgaggaatgagatggggtctattagaagttgtaagatttgtattcaaatattttagtccaggccgaccacagtggctcatgtctgaaccccagcacttggggaggctgaggcaggtggattgcttgagctcaggagtttgagaccagcctgggcaacacggtgagatcccatctctaaaatttaaaaaaacaaaaacaaaaccccaaatatttctgtccaaaataaaaaagcggaaggaaaagctgtagttattgttctacagtttgctatttctacactttgctaattcagaattctgtcacccaaggaatatgtgcattggaggtgactgccagatgctcttttccttgccaggagcagtgtggaattcatgggagcagtgcccttttcttgctgggcaccttggcactggctgcgcacacctgtactcttggcctcccttgtttgcttggtgtgctgttggtgtggtgccttttgtggtgacaccaagtgggaatcaggtagacttgacataccctcaccatcaccctttattcctctgaattaggaactgtgaatgggattttgttgggatctcttccagacattttcctggcagacaagaaggcagcttgttgacatcactggtccaattggccttccttcaaatttgtcccctctgacttaacactctaagagatatcctgaaatttctagcttgaggataccatcttaccacagtttcctatgcagatacaagttttcccttaattgtatattctgcagtttattttgatgggacatcgatacattgctcaagatatggatgaattttcccctaagttcaaacctccttagtagcttaaaaatcagttattctctggataagtatggtggcagctgaagcttctgggcttgtatacagcctgcggtatatctcatctgtgctgtagacagtctgtaaatctgggtttggccatgaaagtatattgtgaatatgaacatcagctaattctagagaaaaagaagcgctattcaaaataacggagtggaatttcccatgggtctttgaataataaccataccagctaacacttactgaatgtttaccctgtgccagacatggttttcaatattttataaatatttgattcatttaattctcacaacaaccctctgatagaggctactcttattatctcgtgtcttgcagttgaggcacacaggggcaactaacttgcccgagataataagtggtagagcgaggctgtgcacccaggtggtctggcttctgggttcttgcttttaagcactatattatactgcatttcaaaaggcgggactgagattagagatctgtggtcttctaatgctagtataaagagtttggatttgctagaatagacagaagggagccagtttattctcagtagtagagaggtgtcaagatgaaactgtcaagataataacattcaaatagttgcaatggagacataaaaaggatattttgggggcagttggggcaaaaggaaaagttgtgaaagctggctacttcctcagtgttttagtagcaatattatctgttaagcccagtgttctgcttgagtcttttcctcaggcaagcattcattcactcagtaaacatttattcatcactagccttgtgtcagcccttgtgccagatgcctgggatacagacgtaaaagccatggtccctggccaggtgtggtggctcatgcctgtaatcccagcactttgggaggccgaggcgggcggatcacctgaggtcaggagttcaagaccagcctgaccaacatggtgaaagcccatctctactaaaaatacaaaattagccaggtgtggtggcacacacctgtaatcccagctacttgggaggcaggaggcaggagaatccaagagacagaggttgcagtgagctgaggtcgcaccactgcactccagcctgggtgacagagcaagactctgtctcaaaaaattaaaataaaagctacagtccctgttcttgagctctcaacttatgtgacactactaggtatacaccaagtgactttcagtaaaaaatgtaagtgataagaagttgtgtataggatgccctggaaataaagtttcagaatttcaaaagcattcatattattatttcattgttttaacaataaatagactcattgcttttcagtgtgtggggtcaaactgcagattgctgacaaatgtcttagattaaggcctgaatccatagcacaagaccacacgctagagttccagtattacttgagtcgaattttcctgcttttggtgatttgtgtgtgtgttcactggctacttggcatctagttaaatcacaaaactctaagccaagacggttttggagaatcccttgtgatctttaaaagggtaatgaatgaggcttcccatatgggaacctcaatgacttttccaaagttctccatatctgccagcatccttggtttggctcctctgttgcttttgttaagaaatgttcagttgcagagttcagccttcatgggcttgccttggaggcctgtgtcttctgggggctggggagaccgtgatgaagagggccatctgtgcacatgctcgtctgaagcccagaccagactgatactgaatgtcatggccccttgtctcatgcttttaaaaaatgctgacctctgcctttagacaccaggcagaagtgatttcttggaactagatttttccccctgtgggtggatattagcgtttattttgggcttgctattattggagtgtaggaaggctataacaaatatgccctttcttgagaactataagagttctgttttaaataaatcagtggtgtctcttgcctgaaatatactaaactatccagactacttaaaattaacctctgataacattagacatcgtgctcatatgtgtgtagtattttgattatttaagtcactctgtttactaaggcttccaaacccacttacattgcttatagaaacttggaatgacaataatgagtttggagcattgtggaacatcccctccaagccagaaaaaattctattttaatggaacaattcattcaaaaatatctggatagatctaccaggaagggcatggtggaagaatgtgaaagtttctgccattaagtacaatctgtttgggaattcaaatatgttaaaatgtgctggcatcccctattttacaatggagaaaacagaggcatgcgaggttaagtaacttctccagggtcacacacatggtagagccaagatttgaactcaggaacccagaatccaggctcttagccctacactgttcccctctctgtaagcagatatgaagtgggagcaccatatacttggaatgctagtgtaaagctttgttgaaatagatggcagggagcaactttatgcctagttggcagagagatggccagataaaaatgggaggaaaaagtactcgtagttacaatgtagaagaggacagaataacttggattccagaatcaagagcttggctgaggcagagcatttgtgtggcttatatggcatggcccagagggagcgctgggcaaagagggatttaaggtttgaaactggattaagaaaagccttgaatgggggcatggaagagtgtgggatctcttgttgaccatggacagccacggatggttttgaataaggaagtgagccacagcagtggacaagagtacatcactatgagggaagttggcatgggaagagggaagaggggaagtgaagcagggaagacaagttaaaagacaattgaaatgtcctaaacaatgatcagtgtcagaacctcttccatggttttatgaagaatccacacgtgtcattgtgccccaggagcttggcaaagaggaagtgtctagcacgatgcctggcaaaagtaggaaccaaaaaggtgtttgttgaaccaaattggactgaataagaggattggccatagggatggaaaagaagtcaatgccagggaaacgagagacgtggcgctgacagtctttgatgagtaattggctggggaggtggagggagaaaagatgaagcttctccagcttgggtggcctcgtcgctaaccaaggcaaggggcttatgactcggggctcagcaagcctggttcaggtccttttctctctatggggcatcttgattgcccattggcatgtattaagtctatatgtgctgagtggtgtgagtgctgagatttaacctctcgtcttggtcaacattttaataaatacaggcgtggttaatatcaagccagtgtgtcatcttcattgttggcaagcgaagagtaattttggccgacagtagaatcgtagggaatacctaaaagcattcatacttttttcagacacctaggtgattctaatgtgcagccttgagccatattctttgagaaacattgcggtaaacaattgctttttttttaatcataaaaatgtgttttctttaagaaatgtgaaaaacatagagaggtagatttaaaaacatttgacgtgtgcagcagccttgagctaagtgccatacactactgcagtttgctgttttttgttttttttgttttgttttgttttgttttttaagatggagtctcactctgtcgcccaggttggagtgcagtggtgcgatctcggctcactgcaacctctgccgtcccagttcaagtgattctcttgcctcagcctcctgagtagctgggattacaggcgcctgccaccacacctggctgattttttgtatttttagtggagaaggtgtttcaccatcttgtccaggcggtcttgaactcctgacctcgtgatccacccgccttggcctcccaaagtgctgggattacaggcatgagccactgtgcccagcctgctgtttttagtgtctatacccaaagcaccacccggtgattttgaacaaacaggaaacaaatcaacgtagcgtgtggttcctgcagaaggctgctgtcagactgcagtcagtaggggtggagtcctctggggatgtttgtgctggttgagcaaaccctctccatgtgtcaccgcatcagtttcttagggctgccatagcagattaccaccagctgtggcttaaacaatggatgcctctcgcagttcaagaggccagaagtccaaaattaagacatcagcagggttggttccttttggacattctgaaggaaaaactgttccatgtctgtctcctggttctggtggttgccagcaatccttggttccttggcttgtaggcacaccactctaatctctgcctccatctttacatcgccttcttcctcatgtctctgcatcctctgttccatttctaaggataccagctgtcagatttagggtctatcccgagtctagaataatttaatctctagaaccttagtcagttacatctgtaaagaccctatttccaattaagattgcattctgaggttccaggtagacatgaatgtttggaggacactattgaacccccacagtcacttaggacttacatgtacgtagggctagccaacaccaagtatgggaagctctcttggactcctaccctaaccttggggtccccaatttttttcttagtgttcaaacaagaaactagtcataggcaattgagataccctgggcctggggtagaccccagcttcatagaagatcccttctttcacatgttgaactaactagttccaaaagggtgtgtatggggcgggggtgcagagaaaatacagattaattagcactcacgtagaatttataacttgaaggactgtttccatggcatgtgaatttctttagctatctctttgccctttgttaattctttaacatctgtaaagggcatgatcaggacaggagattactttggtcctcgactctgactatttagacacttaaagtgcacttaagcagactttgtggatgaaatcattttgtctggatacttcatgtgaaatgtgtaatgtatcgcttgggtgaagggcaaagctcaggagttgtggctgcttatgatgctcagacacatgccaggaatacttttggagtgtccttggataatagccagacctgtctccaagtgtcttgtctgtgggcaaggaagccttgctcagaccctaaaatattcattgttacatgcgtacctccctttaagcaatgaatgaatgtttgagtagatcaaatcctatatttttttttccgcaaaagcttgctattcacagaggccttatgaacatgtttataaagcaaataatcttgttttaaatgcttttgtgtaactacaaattttatatttaatactgagttttctttaggtgtggttcctgtgtttaaaaggcacttattcagacctcagagttcccagtcttgataccagcagactgaggtctctccctcgccccagtgaccactgtgctgtgatctgctgttctcttccagttggcttggttttttggaagtcttctcaatgtgatgggcatatgcgggaggcaggaaagtgcagtgataagagcattggagtgcagggtttgaattccaggtcttccactctctgactttgtaactttaggcaagatgcttatattttctttgcctcagttttctcatcagtaacatgaggataacaatatctgcctcaggatggtctatcagtttcctgtgaccgctgtaacaaatgaccacaaactgggtggcttaaaacaacagaaatgtattctctcaacagaaatgattctcgaaaatcaaggcattggcaaggccatgctccctcccaaggttctagggaagaatccttccttgcctcttctagctcctggtggttgctggcaatctttggtgttccttggttaatggcagcataattccagtctctgcctccattatcacatagccttcattctgtgtctctatgcctttgagtctctctctccttacaaggacaccaatcattggattttggatccaacttaaacgaatatgacctcatcttaacttgatgatgtttgcaaagaccctattatccaataaggttacattctgtggtactgggaaaatgtgcattttctggggacactgttcaacccagtaaaggtggttatggtgatttaaatgaaataaattatttatggcacctggaaggtactagcacatactcaaaattcagcaaatcacaagaagccactttgtcataaggcttgactcattttctgtacaatctcattgctcctttttcatttgacatttgctgctcttgcttatactgggccaccctcatctcatgcttttcaccatattttggggacatctaagtggctccctaatatttcaccaggatttttcctttctgccatcattctgggaactctaacattcacatcaatgacccatccaacaccttgcctctgatctataggaccagtccctggaccttgtccttacctgtccccaatcccatagtcattgcaggtactctctcactgccacttctcaccctttgaccctggaatctctgcttcactctctgtcttttcagtctcccatgatagatcaagccaactgcccctttctcccatcctacccgatgcctccagtgaaaaatcatgtgaccttaccaaatggtttctctatggagttacaaatgctgctcccagctggacctttggagctgttcaaagacccttatatttattttaagcaggtttccttactcacttccccccgggagctattggagcattaccatgtgtagggcttcttggcccaccactgaccgggcttactctgtctcccatttccccaagaaaaggtaaaagccataaaacaccaacagtgacttcttctctgccactgcatctctgctcatgctcctcttcctctttactatttcagaggtagaacacgaccccaattcacaaagatcagccttctgccttggttgaatcctcaattctgccacctcccagcccctttcatcacacctcctccccttatacaccaccccctcccccccccgccttttttttttttgtttttttgagatggaatctcgctctgtcgcccaggctggagtgcagctgcgcgatcctggctcactgcaagctccgcctcccgggttcacgccattctcctgcctcagcctgccaagtagctgggactacaggtgcctgccaccatgcccggctaattttttgtatttttagtagagacggggtttcactgtgttagccaggatggtctcgatctcctgacctcatgatctgcctgcctcagcctcccaaagtgctgggattacaggtgtgagccgctgcgcctggccttttttttttttttaacggagacagactctcgctctgtagcctaggctggagtgcagtggtgtgatctcggctcactgcaacctctgtctcctgggttcaagcaattctcctgcctccgcctcccgagtagctgggattacaggtgcatgccaccacacccagctaatttttgtatttttagtagagacggggtttcaccatgttggccaggctggtcttgaactcctgacctcaagggatctgcccgcctcagcctcccaatccttatacctttcatgctatctctgtctccactgactcctttgcttgccccagtgtatgaacacatttaaacccccctaaaaagtttaaacatcctaaaaagttcctgatatgtcttggctgtgtccccacccaaatctcaacttgaattgtatctctcagaattctcacatgttgttggagggacccaggggaaggtaattgaatcatgggggctggtctttcctgtgctattctcatgatagtgagtaagtctcacgagatctaatgggtttatcagggatttctgcttttgcttcttcctcatttttctcttcccactgccatgtaagaagtgccttttgcctcctgccatgattctgaggcctccccagccatgtggaactgtaaatccaattgaacctctttttcttcccagtctcagttatgtctttatcagcagcgtgaaaaccaactaatacagttccctccttcattttcctttgaattgctttggctttctcctctggagagaaccaactatattgtaaatggagtgactgcatatgttttttaacttctttgttattttccttatctgtaaagggctaataatagtacctacctcatagggttattgtaaaggttaaattgtaatatagtacagctcctcgcactgtacattttaattttagtagtaatggtatcctctttgggctttcataggactgagtccacagcactagtctagcacggataaacaatgacataagtagctattgggtatgtttctcttctcagaagtctgaaggctcctcaaggaacaatattcctgtcaatctttctatgccaagcacttcacatagtacataagataaacacacacatactctctcactctctaaataatgaatataagtaaatgagtagttgaaaccaatagaattggatgggataatttttctccatgaaggaaaaaattggcttcacctattttaggcttatctctgcccccatgagactgtgctttgacttcttgtgacatggtgggtctttaaaattatttaataatttaaaattcttaaagaggttaattaatagtagctcccaaggtagaaatgagaaaaacaaagcctttccatgcacagctctgaactgagcccctaccatccagtgggcagtgggcaaggggcatggggcttagtggtgaacgagacagatgctagccattgcccatgccctggaagtctagtccagtggaaggtggacagacctttacagatactttggaaatactatttaattacaaccatgccaaggcctatggaagagagcatgggggaccccagcaaagagaactaacctggtcctggtggccatgaagggctggggaaaaggaaagcaatgaggaggaggagcttgctgaagtgggtagggcagagggaccagcctgtttctggatggaggtgtttatgtattatgtacacgccacagcactcggcagttatgtagaaaagacctcaggaagtgctgacactcttcatttagggagagtgatggatttcggggtgaatagcagggacagtgtaacctgcatgtgtgaataatcttaagcaaaaatgtaagtaaagggaaaagacattttagataaactcatcaggtattggtctgaagtaacgaacattatctggaacactcttttatgaaactgctggttaggtgcttgccgtgttgtattggtaattttctggttgtaaggtttcacttgtatcaacttgttgtttatgctctctactaaatacatcctgtatgtttcaatccttgtgtcttttcttctctcctttaatttaaatattacttcttgcaaggactggttcacaatccagtcaggaaactccctgcttgcccagctgagagttgtctttccttgctagtgtgtcaattcaccattttgctcactttgccacttctaatatcctattttgcattgttggcgtatttctggtattaccgtatttgatctctgcaactatatagaaaatttgggagcctcatgcctataatccagccctttggaaggctgaggtgggaggatcccttgagctcaggagttcaagatcagcctgggcaacctagggagactccgtctctacaaattaaaaaaataaaaattaaaaaaaaaaaaagaaaatttgggaaaggctatactgcatgtaaaacacacttatttgttgaataagtgaatgaatgatagggattagatctcacttatctgtgtaacagctatagaatcttctttattaccctgcacctagtagatacatatccgtaagtactggtggatatagtcaactggggaaaatattatttgagactgaagcttgcctgttccttgtaccctttcttaaaatgatgaggtgtgcgcaagattttttcctggacaatgtgaatctgaaaccttcccagtgaaaacagtttactttgtctttcgtcttagacttgctgattatattggcaaaacagtctcctcaccgaaaactggagcaagaaatgcagcttttctcaagataatctcagatagattcctccagatggctgcccgagcagaggcacagaacaagagcattctaattggtgatggttagggttttggcatcttttctcaagaaagtcaaagaaactctcttcctggcttattctgtgccactggattattttgattgagttgatatgtttgaaaactcagaacctcttgactagccagatgtctgtgaccactgagttccactggtttttcaggtcccaatgattaaaccaaaataaaagaaggtgatgccatgtctggccaagggcagacactgccggttgccaaatccccagcgttcatcacccggttgacatgatgtttgctattctagatggaggcaggcaaggcttcaaaaaggccaagcttcaagagaaaacctttaagtaagtcagtgtcatttggaaatgatttgatgaataggaaacttaccggccagccaatatcatttgtgatatattagcaggaatgtttggagcccatattgagggtaagggctctttcccacatgccgcccttcatagctgacacattacacatgtctctgcagcataacatatggcttcctgaacttgcaagtatggcttaatgttctctgttgaaatcgtgtctgtttaaacagtctcttggaaaagtgagccatattcaataaaatcattaatttcatgtctgtgaatgtttctctagagccctttaaaatatgattttgaaggagcatagtagaaaatttgcattaagctgttatcagcctctaaaagggtattggactatcagtcctaaattgtaaatattaaaatattcatagaacattagtcaagaaggaacagtgcagctcatcaaattccagaagaatcaccattttaggtacctagtatgtgcctggctgtttatgtatgctgcatctgattctcaggataatttacaagtaggggggatttcctgccatttatagataaggacagggaggcccagggacacggatgaccacctagaagtgatggaactggaatttcaactcaatagcaccgaactctgaagtctgtctcttcttttctacaccaggaattttaaacttgggcttaggagtgggctgggtgggggtagatatttaggccagaaatcatatgcaagtttttgtgtggatgtgcattattctgaggaatgtctgtaactgtaccagattctccagggggtccatgaggcctccagaagattaagaaccagattttggcgccactctgcctttttttttaagcgacgaggaaacagcaagtgagactgaaccgttcgaaggcgtttgacctggtgttgaccaaaaactgaagcacaggacttctttctaaattctgtgtgtatgtgttttgtatgcctcaagggggatggtgagggaaggagaaggaaataaaagaaataaatcacatatggagaaaagtacacaaaaccatgtacgttctaacaagtagttataaagtgagcatctgaggagctgctaatcagaccctaaaacagagcaagtcccagaatggccccgggtgtcccttcctgataggatgccacaccttcacccctaatcatgacccttacttttatactgaccttatccttactttgctttatcatttttttttttttttttttttgaggtggagttttgctcttgtcgcccaggctggagtgcaatggtgcgatctcagctcaccacaacctttgcctcccaggttcaagtgattctcctgcctcagcatcccgagtagcggggattacaggctacgccaccatgcctggctcattttggatttttagtagagacagggtttctccatgttggtcaggctggtctcgaactcccgaactcaggtgatccgcctgccttagcctcccaaagtgctggcattacaggtgtgagccaccgcgcccggccataatttttttttttttttttaatttgagatggagtctccctcttgtcgcccaggctggagtgcttactgcaacctctgcctcctgggttcaagcgattctcctgcctcagcctcccgagaagctgggattataggtgcccgccatgcctggctaatttttttgtacttttagtagagacgggggtttcaccatgttggtcaggctggtctcgaactcctgacctcaagtgatctgcccacctcggcctcccaaagtgttgggattacaggtgtgagccacctcacccaggctataattttatcatctgtatatacatccctaaacactatggttccatgtttcctgtttctatctttatgtgcatgcagtcatactattgtgggttttcttgtgtgtgtcttgcttctttcaacagtactgtttttaatacccatctgtgctgttgtacctagttgtagtttgttcattttcattgctgtgtgttattctgttgcttgacgacgtgataatttatccgtcgtttgttattggaaatttgggttatttgtaattcttgcctgttatgagcgatgctttcgttgacattctaatgcatgtcttatacacaggttggggaaagaccaatatttactcagcttttatgggaaacaaaatacctagttctacaagaaaatagtgaagaattcttctcttcacaggcctgcttccttaatgccttgtggaagaagaaaattctttcaagtgaattctcctgttagtcttaacataggttccagttgtcctcaagttagcaataaaaatcaaaggatgcactcgttgaacctaagtgattccagggctccaccccagactcctggggtcagagtctgctagatggggcttgggagtctgcagatttaacaagcacccaggtgattcttgtgactgggagacatcgcgttcaccctgattgaatttataaggctgggctccttagttgggaagagatttgaagaaagtatttgcatgattaaaatcttggaaaattggccttttaaaaaagttaagggagttggatttatttagcctataaaaaaacctgaaacacgatttaatagttgtttgcaaaagaatgaaacttttgtaaatgaaaaaacaaatatttgctaagtcgagagtgatttaggccaatcaacctcctgctaaaatcagcagcaaatactgagcaccatgggggtaagaaatgaagactgttctcagggccttcagggagctaaacacaggagaaaaaccgtaagctctcgaacaaaaaccaggatgcgatatttcatcaagtctagactgtgggcttcggttgagatgagcgagtggatggcccccagggacgcaatggagtagagaaacagagagaggccaccaggaaagggtggagagggcccgcggggcttgagctaggctttcgaaatacgcctttgcttaggcagatggggtgacagagcattctgaagcagtggctgccagtgttttttcttgtgatcctccagtaagaaatatctatatttcttacatatatgtgtgtgtgtgtgtgtgtgtgtgtgtgtgtgtgtgtgtgtgtgtgtatatatatatatatatgtatcttttctttttttttgagacaaggtcttgggttgtcgcccaggttggagtgcggtggtgcaatctcggttcactgcaacctccacctcccgggttcaaacgattctcctgcctcagaatcccaagtagctgggatcacaggcacgagccaccgtgcccagtccagaaatgtattttatatcagtcaggatacacatacatgtaataaataaaagcttcataagacatttaactttattaaaggtggtacatctgatgttttctattttatttttttaacatgtgaggttaaccgataaactatacagctttcatagagttgaaaactataagaggaccagaagcccagggtggaggcagaatcagtcctgtcctatggagggcatgctagttagaggagaggattttcatggaaagtggtgagaggtaattttgttagtttgatggtggtctccaaaagccttctttgattctagagtatgaatgaattactttgggatgttatgataaaatttcaaactttacctatttatttgaccagctctacttttggacagtagattgaccaaagtgactttttgagattttttttgatgcttgggggtgggggtaggggagaggatttgcttctggattccaaagaatgactcaaagtgcttattgaacatctgttttgtctcatgttgtgattggctatgggaattttggtatagaaaatggcactggagccaggcacggtggctcacacgcctgtaatcccagcactttgggaggccaaggtgggaggatcacttgaggtcaggagttcaagaccagcctggccaatgtggtgaaaccccatctctactgaaaatacaaaaattgggccaggtattgtgagtcacacctataatcccagcactttgggaggccacggtgggcagatcacgaggtcaagcgctcaagaccatcctggctaacatggtgaaaccccacctctactaaaaatacaaaaattagctgggcgtggtggcatgtgcctgtagtcccagctactcgggaggctgaggcaggaaaatcgcttgaacccaggaagcggaggttgcagtgagctgagattgcaccactgcactccagcctggtgacagagcgagactctatctcaaaaaaaaaaaaaaaaaaattagccaggcatggtggcagatgcctgtaatcccagctacccaggaggctggggcaggagagtcgcttgaacccaggaggcagaggttgcagtgagccaagatcgtgccactgcactccaggctgggcaacaaggtgagactccatctcaaaagaaagaaaaaaaaaagagtatggcactggatagaatagttttataggagaggatgagaggatgtaggaaatatctccgtgggcaagtttaggaaggaaaactgatggcctctttatcactgtgcttctggaaggagcatgatatggccagttgtgcatatcagagctaattgcaagtatgattagtggcctggcccaggactagacaactctgctatttgatcagaatccagattcctggatcagacgtctaattgggaccctacttggcctctagttttagcatgcttgtgagaattttaagagcaaaactcttcttaaaattttttatttttagagatggcgtctcactgtgttgcccagagtggtctcgaactcaagcaatccttctgctttggcctccccagtagctgggattacagttatgagctaccacgcccaggctcttaccttccctcctcttttcccaacctagctctgcttactgtgaaccccatctgcagcacttcttgaatggtgttgtggattatttattgaagatttgcttgtgtagccatgttctcttcatctgctccaagagaaaagtaaattctggcctgcactgaaaagaggctctagatagaagagaggcatttcagaccactaggaatgttgcattgaccttgtcttccaaagagcaggatagggaagatctctcctgccatgtcttatagaaactgaactcccttaaagatccatgtggaacgaattttagggaacccctgcaatcagatttttctctacctaagagtagagtgccttagcaacgttgaaaaggaaaatcctttcatgcggccgttcctttgcttgaatactttcagtcctgtcctctgagatttgatcatatccttttgatcttcccagtccagttttaatttgttcagtttaggttagaaaaggatttggaaaaacaatacttttctcttttaggattctataggtagggatcattggtcctaaatgttcttcccttttttctttgcttgtaaagtgcactctgggggaataagctgcactgtgtttcttggggcttgatcatttgctgtagttgtttgtacagttgttaagttacgctttctattctactaacaaatgatggtgtgaggaacgccatatttcttatgtttcccttcaacaggaagcttgattggtaactaaagacaaaaatctcatttctttgtgagtaaattgctgtagtaggagcgtggctgatgttggtccagacacattcttactttgttaaacctatgaggagagtcatcaaggagagctgcactggtctacatggtggcctctggctaacgtcacgtgaagtctcgaggttaaaaattcacttcttcagtagcactagccacatttccagtgctcagtagccacaagtggctcatgcagtattgacattttgggccagattattcttggtgggggtaggaggactgtctcatgcatttgtgcattgtaggactttcagcagcacacctggtctctacctactcaatgccagtagcactctatagacataacaaccaaaatgtttccagagattgccaaatgaccccacaggggcaaaacaaatcctggttaagaatcactggctttgtggctatagtatttgaaagcccagataaagaacatttccatgacggcagacagtcctgttctagagtaatccctagcagagtttggggaattttatataataagaattttgagctttggtggaatcacagtggacatccagtccaaagcctggggaaactgaggcacagaaagattatgggtgacttcaggtcacacaacatgtaagtgtcagtctggagttctggacttcaagttcacgcagcccagagaacaagctgctgatttttgttcaaacctgcttcattcctactgtgcacctgcactcagtgttggtgggggaggacagagtcctaaaaactgggaatggttcagtcctgagacgttcagagatgcaaattctgaacacatctcttttatccctccctggcttaaggccctacatatgggctagggttgggagggtgactgagacatctgatggacaaagacttgttgggtttcctcatttccatcagtacagagattgggaacatactcccggggccgtggaagactgtcatcctgtaaaatttcttctttttagtttttaaatctacaatatctcctctgtctgcttccttttaagggtcgatcgtaaagctgttaatacgaaatacctggaggttcatcccttcagaggctgcaaggaagcagagtctatagaaagctttgggaagggaaaaggagtctctcccagggtgtggtgtccacagccgaaggggccagaaagtgggcttagctcaggggccgggcgcaggagacgactggaaggcagcccgggcttgcaaagtgcccagagcctctgatatgctcaacatctttccttcctcccctctttccctcattaatcccacgtgcttcaacacctcccaatgactcttcagtcactggttctataattctctccctcctctgctcccaaaccttcagtggctcactgctgcctttcatgtctttcttagtcttatattcagagcccatctgctcttatatagaaatcgtctctttccctcctaagtgtagaaatcagttttgcacatacgagtgccttactgttactgtggtttgcagaattattcagttggggtttggcattgacagtgattgaggctttgctcaaagctctttgacgtttaagagcttgctcaggaagaagttttgtttctggtgagactttgttgagtcggtagcctggacaactacttaaaatcagtatccagctcaaaattcagggcctggtaaacagaccagaaagagaggcaataaaagcagatgaaaaattatgtgtctgtaaacctcgggtaaccttgagctgctggtttggttctgtaacacggtggacagagtgagctgtggatgaggtcaaaggccaacgtgctgaggagcagctgtctagttcagcgagaaattagctaatgtgtaaactggccttgaggtctttttacgttgcttcatattcctagtgttagttaaaagaagtaaattttatctcagagtttggtgactagccgtgatttcattgcactatttatgttttcttttgggaaagcggccttcttgggtgtctccatggtgaaggggaaggtattttaaaacacactcattcgggagcaggctttaatttgagtgacaggagggtgggggctgcgaggactgcagccctgctggtcagtgcggctgtggccagtgttgttcatgacctctgtttcttctctttctctacagaccaatgagtggaacaagaatgatgaccggctactgcaggccgtggagaatggagatgcggagaaggtggcctcactgctcggcaagaagggggccagtgccaccaaacacgacagtgagggcaagaccgcgtaagctgaaacactggtttgcagatatgctggttctgggtttttggggtgttctctggaatccttagtatccataggggaatttcacacgtgctccctctccactcccatgttgaaatatgtaagaagatattttaatctagtgcctttctctccaaattccaagtcacatatggagctctaccttgaatgggtatacatgttcccaagtataagcaaaggttttacctcctaagattgcaaccaattgtagatgagacatgaattctctcttcgataagaaatagcataaaagagaaaaaagtattttcctataaccctcaaaccttactgtgtatttatcttaaactacttgtttatttatttgatcttccttaacatagatcattaagtacatgagtagtatgattttgctttatggtttgctgtatgtagtactcttccttgccataattaaagctgtatatttgattaagtatttgtgtgtgtttgtgcatgagcatgtatttgtttatatccattcttacgttggcagtgttgtggagagagcactgactttggagccagatagacatctcacaggaactctatcacttacgagttgtgtaatctctgaacctcagtttccttactataaaatggagatggtattagttaactgttagagtagttatgagtataaaatgaaataataatgtaggttgggtgccctcagaagcaggctctgagacaaggatttaagtgcaagtagttttatatcttttcttttttctaacatgtcaaatgatggttattgtgtaattactgtgaaacacaaagtggtaatatatattacttagggatgtatacacacatacaatgcaagtaatttctatagccggtgatcccaggaagcgtaagaaaggaagaaacctctatttttaaggtgtgttattgacaggttccaactttgtcactttttcttgatgaggattctgggaatctgtttagacctagagcagggtttggctatgttaccgaggctagacttgaactcctgggcccaagcaatccttctgcctcagtctcccaaataactgggactacaggcatgtgccaccgtgcctggctgttgtctgattttataaataaagttttattgaaacacagccatacccattcatttaggcattgttcgtgactgctcccacactacaaaggcagagttgagtagttacagcagagactacatggctcacaaagcccagagtatttatctggccttttacaaaaagggtttccttatcccaggtttatagtatgcctcagagttattccacccaaggggtaagaaacctggggtatctgtcccttatctcctctccctcaaaggttgagtgccgactgggtacagtggctcccgcctgtaatcccagcactttgggaggccgaggcgggtggaatcacttgaggtcaggagttcaagaccagcctggccaaaatagtgaagccctgtctctactaaaaatagaaaaattagccaggtatggtggcaggcacctataatctcagctacttgggaggctgaggcaggagaattgcttgaacctaggaggcgtaggttgcagtgagctgagactgcgccactgcactccagcttgggtgacagagcaagactctgtatcaaagggaaaaaaaaaaggttgagtgctactctaggggacaccagggtcatggccagaaaaagtctaaggggtccccaactcccaggtcacagaccggactggtactgctcacagcaggagatgagcagtggttgtgcaagcaaagcttcctctgtatttacagccactccccattgctcgcattactatctgagctccgcctcctgtcagatcagtggcaacattagattctcatagtagcacaaaccctactgtgaactgcacatgcgagggatctaggttgtgagctccttatgagaatctaatgcctgatgatctgtcagtgtctcccatcacccccagttgggactgtctagttccagaaaaacaagctcagggctcccacagattctacactacagtgagttgtataattatttcattctatattacaatgtaataataatagaaataaaatacacaataaatgtaatgtgcttgaatcatcccaaaaccatcccccgtacctggtctgtggaaaaattgtctttcacaaaactagtccctggtaccaaaaaggttggggactggtggtctaaggggatttgggaatggcaccttcagctgtaggtgctctatataaagagtggcacagcacccagcccacagtgagcgcttgataaagccagtcacctaccctgctcgtcctagattagtggtttgcaatcttggcagcttctgcgttcgaatcacctggagtgcttctttgttgttgttgttgtttgagatggagtctctgtcaccaggccggagtgcagtagcgtgatctcggctcactgcaacctccgccaggctggagtacagtggcgtgatcttggctcactgcaacctctgcctcctgggttcaagctattctcgtgcctcagcctcccgagtagctgggactacaggcatgcaccaccacacccagctaatttttgtatttttagtagagacggggtttcaccatgttggccaggatggtctcgatctcctgacctcgtgatctgcctgcctcagcctccaaaagtgctgggattacaggtatggagtgctttttaaaaatattgatgccatgttgatcagaatcaaccccagatgctctgaatcacttggtctggggagaggcccaggaatctatattttttgttctgaggtgtttggtggtaaatgttggggcttttggtctcccttttgaatcactactcggccttctttgtccctgttctccctagtccaggtttgcacatgtttgtgcaagacaacctcttcatgtcatcccagagaaaggggagagaaaggtttatgataattttgtccaagatagtacttactaaagagaagacagaaaatttagatgagcagcttagctacaattgtgatcaccttaacaaatttgaaccttttgatcataagatatttattacatgtgttctctttatttattgtggtaaaatgcgtataacataaaatttaccattttaaccattttaaagtatacaatgtagaggcattaagtatattcacaatgttgcacaaccattgtcactttctagttctagaactttctaatcaacccaaagaaaaccccgaacccattagggagaaactccccaacctcccctccccttcctctggcaaccatgaatctgggttctgtctctggatttgtctgctctggatattttttataaatgcaatcatataatatgtggcctcttgtctctgttcctttcacttagcataatgttttcaaggctcacccgagttgtagcttctgtcagtacttcattctattctctcttcatggtagacatatacatagcagttaggtaagagtcaccacctcccttttgcagataataaaactaaggcccacataacacagctcttcctgaatttacctttttgtgtgcatgtgtgtgagacagggtctcactctgtcacccaggctggaatgcagtggtgcagtcaccgctcactgtagcctcaacctcacagggtcaagtgatcctcctgcctcagcctctcaattagctgggactacaggtatgcaccactgcacccagctaattttggttttgttttgttttgttttgtttttgtaatgatggggtcttgctgtcttgtcctagtgatcctcccatgtcagcttcccaaagtgttgggattacaggcatgagccaccattcccagccttctattttctagagagctttcgtggtaattttgcgctggaatctacagttgcctgtctgtctagaggcttgattttggccttcaaggtctttcctctggctctgccccacttacctacatcctgtctccccgctgtttcttctggaagtggagctgtctgctcccgccctccccacaggtcagaacgtccacctgtgcacccaggttctatgtccaatccaaaatgccaccctccctggttctcttccgcctttttgacttttcttctctttgaaatactagaaatcttgatttagaacccattatattcgattattttattctatttatttagagatgggtcttgccatattgcccagacttgatttgaacgcttggcctcaagtgatcctcctgcctcagcctcctgagtagctgggactataaggcatgcactaccacacccacctttattctattatatcaaatgaacaggaacgacaacagaaatgtctccattctaagaaaacctttgttttctgaaagacttgaatcccgtagagtacagtaaagctccctaaggacagggatggtacaatcttattgtgttggtctttcccattgttctaggcccaaaggaggccttcatttgggatttgtgtaaataacttttcagtgtgttcttgtggagaaaacattctttttttgctgataatatcttatgggtaaattgcttaggggtgaattaacttggattcagaggggaaagaattcttctggtgaacatcacaacctgacttggcccccaagcttccacggcaatttaaatagagaagtactcaacctttaccacctagagagccaggcagtctagaaagtcccaacaatgtggcaacaaaggcagccatctccacagacgttctccagaagcctccataacccaaggtcaataaccagatgggtggttgggtaatgccttagacttttgagtttctttctggagtattttctttcagggaaagatgagaatgcatgccaggaaattttcttcctctaagactgatcaaagaggggttaaaaaaaaagtaaaagcaattgaatgactggaattcatttaggaaaagaataaaggaagggtggtgtcttgggtaggaagggaacaaaatagagcagagccaagagttatagctgcagcctgtgtttatggagtcaggcctggcgtgcctctgcccagctgttctctttccatggtggatgtgaggaagtgggaggaggtcaatgtcctcaaacctcttaccgtagaagagtctaattgtttcaagatgggttccctacatttggatgtgcatttaattaaagttatgtgtgtttgtcttacgaacaaccagactaaataaaatcactgccggcactgtagtatttgaacaaataccacctgggcatgtgtgtgtagatataaggagtgtgtgcatgtgtgtgtgtgtgtgtgtgtgtgtgtgtgtgtgtgtgtgtgtgtgtatgtgtctgtatcattttatgttgcccacttttcagaaacctgatctttttggctatgaaagcaagaatttgtgagagtatttttagatgactctgtggagcttgactataaagtgggagaggcaggccttgaactttagaaatcactataataagggcttctctggctggtggtttgttgcacattctcccttcctgttttctcagtatagggatgtattagatattttacaccagcagttcagtcttggaaatcgagttataccacctgatcagctctctccagttcttctcacgtacagctgccaaattaatttacctaaaaccactacatgttatttgtgcaattgcagcctcctaccttccctgtgaaatcaccctatgtcttttctaagacctgttgatatttgtcagagtgataaactgaagaatgtaattgctatatccactctgctttgagtcatttttgaagttgagataacctcttcttatactttgcaaatatgcttaaatgttgtgtttcattaatctagttgggaggtactccctgggtccaaaatgttccagactttttcataagtaaatacaaaaggagaaaatatgctcctggcctcaagatgcataacacctagtcggaaagacaaggccaatgaaaatactggagaataatcagatgctaacctgtaaaatactgcatgtaaggggttcaggacagaagagctcatgagacactggagatgctaagaaatgcttcctgcctgaagtgtgatatgaggtcggccttgtagaatggaaccagtagtggattatactgtaaccagggtggatacaggcaaatggggttcaggtaacagcatgaacagaggccaccctaaattgattgttttggtttggttttttgagacggagtcttgctcaggctagagtacagtggagtggtttcggctcactgcaacctcctgcttcctgggttcaaactgttctcctgcctcagcctcccacatagctgggattacaggtacccaccaccacacctggctaattttttatttttagtagaggtggtgtttcaccatgttgcccaggctggtctcgagctcctgacctcaagtgatctgcccgccttggcctcccaaagtgctgggattacaggcgtgagccactgcacccggcaatcaccctaaattaaaacaggaacaatgacaccatggccatgctttctttcccttctttaagagctcatcagagcaacttgagttcagggccccactcactagatcattggttctcagcttggctcccattagaatcacctgggcagctttgacaaatgctgaattccacctgcagagattctggtttcagtggtatggcggtactcctggggatggggtttcagaaagcactttaggtgatctgaatggtttgtccaaacagaaccactgagcaggacaggatacagtgagaccctgcatttcctagcccagagcgttccaacaggtgctacatcgtgatacattataggtaggctgaggaaggcccaggaagcacaggtgaattttctctctctctctctctctctctctctctctctcacacacaaatacatccctgtatacatgcaatatatgtatataagacttgtacacaaaatagaattgcaatgaaaggtacatttttgcttaaagtaaattatattaaagtaacaattctcgagttttttttttaaaggaagcagtgttgtatgttaaagctgaacttaatttattgcaaaattgtgctttagaaggaagacttataaccaagattgtggtgcaaaattgatgagaatagatttggaaattagaactacattggttaaaatattggtgatatggtttggctttgtgtccccacccaaatctcatcttgaattgtactcccataattcccatgtgttgtgggagggacctggtgggagataagttgaatcctgggggcagtttcccccatactgttcttgcggtagtgaataagtctcacgagatctgatgattttagtaggggtttttgcttttgcttcttcctcatttttctcttgccgttgctatgtaagaagtgcctttcactttctgccatgattctgaggcctccccagccatgtggaactgtaagtccaattaaacctctttttcttcccagtctcagatatgtctttatcagcagcatgaaaatggactaacatagtaaattggtaccagtagagtggggcattgctgaaaagatacatgaaaatgtggaagtgactttggaactgggtaacaggcagaggctggaacactttggaggactcagaagaagacaggaaaatgtgggaaggtttggaacttcctagagacttgttgaatggctttgcccagaatgctgatagcgatatggacaatagggtccaggctgaggtggtctcagatggagatgagaaacttgttgggaactggagtaaaggtgactcttgttatgttttagcaaagagactggtggcattttgcccctgccctagtgatttgtggaaatttgaacttgagaaagatgatttagggtatctggcagaataaatttctaagtagcaaagcatttaagaggtaacttgggtactgttaaaggcattcagttttataagggaagcaaagcataaaagtttggaaaatttgcagcctgactattagatagaaaagaaaaattcattttctgtggagaaactcaagccagctgcagaaatttgtataagtagcaaggagccttcccaagaccatggggaaaatgtctccaggccatgccagagaccttcacggcagcctctcccaccacaggccaggaggcccaggaggaaaaagtggtttcatgggctgggcccatggtccctgtgctgtgtgcaccctaaggacttggtgccctgtgtcccagctgctccagctgtggctgaaaggggccaacatagaacttgggctgtggcttcagagggtagaagccccaagccttggcagcttccacatgatgttgagcttacaagtatacaaaagtcaagaactgggtttgggaaactacacctggatttcagaagatgtatggaaacacctggatgcccaggcagaagtttgctgcaggggtggggtgcacatggagaacctctgctagggcaatccagaaggaaatgtagggctgggatcccctcacagagtccctactggggtaccagctagtggagctgtgagaagagggccacaatcctccagcccccagaatggtagattcaccaacagcttgcaccattcacctggaaaagctgcagacactcaacaccagcccgtgagagcagctgggagggagcctgtacactgcaaagccacaggggcggagctgcacaagaccatgggagcccacctcttgcatcagtgtgacctggatgtgagacctggaatcaaaggagatcatttcggagctttaaaatttgattgccccgctggatttcagacttgtgtgggccctgtaaccactttgttttggccaatttctcccatttggaatgggtgtaattgcccaatacctgtacccccattgtatctaggaagtaatgagcttgcttttgattttacaggctcctaggtggaagggacttgccttgtctcagatgcgactttggactgtggacttttgggttaatgctgaaatgagttaagactttgggggaactgttgggaaggcatgactgattttgaaatttgaggattgaaatctctccacatgagatttggagggaccaggggcagaatgatatgatttggctctgtgtccctacccaaatctcatctaaaattgtactcccataattcctacatattgtgggggtacccagtgggagataatttgaatcatgggtgtggcttctcccatactgttcttgcagtagtgagtaagtctcacgagatctgatggttttagtaggggtttccacttttgcatcttcgtcatttttctcttgccaccaccaagtaagaagtgcctttcacctcctgccatgattctgaggcctccccagccatgtggaactgtaagtccaattaaacctctttttcttcccagttttgggtatgtctttatcagcagcataaaaacagactaatacaattgctaagatcacagcatttttcattttagagctattttcaaagttggattaagtatattgagaacaaaggattttagacacttaaatgggtaattgttgcccagggtcaaagctctttggctttgcttttcctctctctgttccctccactggctggacctgccccaaatgcagaggtcaggagagcctgggaaacgtagttggctgtgatagacagcagagtaagggagggtggagatggatctcagaacccacagcagcgagcgacctgcactcagccgctatcacactggggctgctggagcgggagattctcatgctgagcagcaaccagcctgctcagaggctggggtacatgagatcattagcgtgtgccagttctttagaagcacttctgctttccctgctcagttcctgccttccaagatgctgtcgctgccaccgccaccgcccccaccacccccaccacccccaccaccccccaccccattccaccaagtctggcgtatcattcaaggcccaatttaccatctctttcctgaagccatttctaaaatttcctgagtgagtgctgtcttgccactgcctctctgaaatcacctaggatttggtgggttttggtttcctacgtacttgtctgatttctgttatcaaattatcaaggcgagagcccaatctttcctactaagaaaggaattgtttcttattaattatgttaatactgaatgtcccaacaccgggctaggttctcatggagagcctctgctagggcagtgcagaagggaaatgtagggctgggaccccctcatagagtccctactggggcaccacctaatggagctgtgagaagagggccaccatcctccagaccccagaatggtagattcaccgacagtttgcaccgttcacctggaaaagctgtagacactcaacactagcccgtgagagcagctgggtgggaggctgtacactgcaaagccacaggggcggagctgcacaagaccatgggagcctacctcttgcatcagtgtgacttggatgtgagggactctgtgagggggtcccaaccctacatttcccttctgcactgccctagcagaggttctccatgagcacctagcccagtgttggggcattcagtattaacataattaataagaaacaattcctttcttattaggaaagattgggctctcgccctgataattcgataacagaaatcagataaatacctaggtaacaaaaaccgtgtcattcattcagccaacagtttattcattcaacttagagatctcgtcaatttccatcaggtgtttcccatctgatgctctcaatcaccctgaagtaaatttacgaagagggaagtggggatcagagaagttctgaaattagtacaaatcgcctgttctacatactggagtctgggggtgtgtcagtgaatacaacatagaaatcatttgccctaatggagatttcataatgcccaagtaccatttccagactatccttatgaagccaaacaatcctgaagaaaaagagcaaatgctctggttaaatgtcgtgggccccgggtgcggtgattcacacctgtaatcccagcactttgggaggccgagacgggcagatcgcttgaggtcagaagttcaagaccagcctggccaacatggtgaaatgccgtctgtactaaaaatacaaaaattagctggatgtgtagatgcacgcttgtaatcccagctactcgagaggctgaggcacatgaatcgcttgaacctgggaggtggaggttgcagcgagccgagatggtgccactgcactccagcttggatgacagagtgagacccagtctcaaaaaaaaaaaaaggatgaggggtggttcctcagtccttgagtatgtgatcttccatctcagtgtcctctccctcctgttcctcagaagtagtactgctgattctattaattagcacatcacaggcacttaaaggatagtaatcctgtttttttttatagcattcattttttacatgccagtcatttattataccttttgagcagggaaaggcaacaaatgtttccatctcaaactttctgctacatcagttcctaatagaagcagtgatcagctattgcagctgcttttgaaatcactgaaagccgggcagcccatcacttttctgctgaaaagatttgtctctgggccaatagagttaattctacagagtagaatttagtttttcaaggcttttataactaaagttataagatagtgctgccttccttaccctcagtataatctgaaatgggaatccagaccttttaatcctattgttaggattggcctgctgaaatattctgtgtgcgctaagcctcatttgaactcagtgacctagaatttagatattgcagcaaatgagtgccatagaacacttggtaggctggaatggaatcctagacttttagaggagaaaaggcttagtaattctgtagatcagatgagtacactgaagtaagtgaatttgagtggctttaaattgtcccatagcttggggttggcagagttgagaccaaaatcaaggactaatgacttttagtttgtatatattttttaagacagactcactcggtagcccaggctggagtgcagtggtgtgatctcagcctcactgtaacctctgcctcctggattcaagcaattctcatgcctcagcctcacgagtagctgggatttcaggcatgtgccacaatacttagctaatttttgtattttttagtagagatgtgggtttcaccatgttggccaggctggtcttaaactcctcacctcaagtgatccacctgccttggcctccccaagtgctaggattacagggatgagccactgcgctcagctccagtttatacttctttctactgtgccagtggtcctaaaaatcgaatgtgtataagagtcatctcccgggtaggggagcttgcagggcttctcccctggcgtcaggacaggatcccgacattgcgcatgtccagcccattccccggtgatgcggatgctgctggcccggaaaccatactttgagaaccactgcacgacactgttgggaagcaaaatcgagctcatgtcataaaggacacagctttctctcctaagaatgtaaattacaacctgagaaaaatatctgtttatgccagtatataggtgtgccttgacgtgagaaaactcaaaaagttcaggctaaaaaagcaaattcaaaactaaagatttacatgacctaaaaattaattctgtgtgctaggaaaataaagtctctgccttcatggtacacacagtctaatagggcagacagacaataaacagatacctctttactataatgtcaaatacattcaagaaaataaagaagacattggactgtgcgaataaacctggagaaggaagccctctcagcagattcctgaatggagtgagggattcagctgcgtacttttctgcaggaatggctctcctggtggaaggaactgcaaggcaaaggccctgaggtggaaggacgcttgatgtgctcaggaaacagcagagagcccagtgaatagggagagtcctagaaggtaggtcaaaagggagccaggacactgcgtgtagagccttgtatgctacaggaaggaatttacctaattttaaaaatatgatctaatattaaaaatattttaatcctgttttttaaaatattatttaatatcattagtttttttctctccagaaagacatcatataaaaagagtacaataaaaatataagcagtttgaggtggtcaggatacaaggctcctgttgcagaactgagatgctgaggctctcaagggattgtgggaaagttgttatgtaccatgaagtatttgagtctcttcctgatcacagtcactcctttcttggaaatgaagattttttaaaaggaaagaagggagtcgtgggtgtattagggagaaaatacccttggggcagggcagtgatctttgacacatttcctaacctctctgagcatcagtgcttccatctgtgaaatgaagatgttggaccagttattcttctgcaacgtcctaacactctggtattctggggtgtggctaatgctggtagggtcgtgtatggtcatttctttgtgtgagcgttggtggcttgcttcatttggggaagtgaatattggttgcagaggcaatggaaggaactgatcatggtaacagacgccctggtggtgaagaaggcaagaaagactggtttgagagaaattttcagtgaatgaatatgcctgagaaattgaagtcttgtaaaagtagccagtgagtttgtatttcctcccaatatctatttcagccggtaatcagaaaccagaataattgtgtttgttattattctgaaagatagaaggagctttctgggttataacttaagagtttttgaatagcaacagttcaagcctcctttggcttaagagccttgagaattatcccagccttgtcccatggtatttattttgggaaggtttgcacaacttgttgagtggtttggtaggaaatgaaacctctcttgcaggctctgtttgcttctgtgcttgggttatatccccatctatttgagagccctggcaaccctaatctgtcccactgagaacactgtttgcttttttgccaaatacttccagattttagtttaaactttgatttttaaagactagcacaaccagtaggttatattacatagggtgtcactgttttttgttttttgtttttttgggacagggtcttgctctgttgcccacgttggagtgcagtggcacgatcatagctcactgcagcctcaacctctcaacctcctaggcttaagtgatcctccctcctcaccctctcaagtaggtgggactataggtacgtggcacctcacctggctaatttatttttgtactttttgtagagatggggtttcaccatgttgcccaggcttgtcttgaactcctgagctcaggtgatccacttgcctcagcctcccaaagtgctgggattacaggcatgagccactgcccccagttgtgtgcatagtgatttaacaaatggtgccgtttctcagtaaaatgataaagaaccagctctaattgcagaatgcctgggttagaatccagaaattacttgtaatttctgggactttgggcaagttattaagttagtgcaaaagtgattgtggtttttgccatacttttaatggcagaaaccacagttacctttgcactaacctaacagcaaacttctctgcctcagttttcctcgtctgttaaatgggagtaataaagtttactccaacccctcacaggcttgttgtgaggatgaaatgagttaaaacttaagatgttcctagagtgtaatgtttccatagagtacctgctattattattgatgttgttgttattcaactgcctcagattggtttagaaatgagggaactgaagttaagcactgtagcaacaaggcagctgaccagccttgtcacctgggcctcctgaatcaccctccagcctcctggcatgctccctattgtgcctccgttggtccctccatcattcattcaggctgccacccggctgctatttgaggctgctagggacatcagtgagttgactttctcttcaggaaaaagaaaatgagagcgagagaaagagagtgcactacaaaactcttattagcactgaaaccttggaatctttccaagtgacaagagtagggacattccaaatatcaataagcagcaaagggatcaaagtcattttgtgtaaatcttcaggctgcttatttgtgccattttgctacattgctgctgaagggccccagctgagttttataagcaaatctaaacatttcctattgtaatgaaatgtaaaacagcagattcctttatttgtggaacatatccataaaattgtttttatggctaagtttgttttcaaacaaactttgaaacaatgggtgccttggcaaaaaacgatggtgtgaccctcttcaataaatagtgtgggaaaattggatatccatatgtagaagaatgaaattggaccctcctctctccctatatacaaatatcaactcacaatggattcaagacttaaatgtaagacctgaaactgtaaaactaccagaataaaacataggggaaacacttcaaaacattggtctaggcaaagatttcattgctaagacctcaaaagcgtagacagctataacaaaaatagacaaatcggattatattaaactaaaaagttttggcacagcaaaggaaagaacaaagtgaagagacaacctgtcgaatgagagaaaaatatttgcaaactattcatcaaggaactaatatccggaatacacaaggaactcaaataacttgaccatcaaaaaataaataatcccattaaaaagtgggctaaggacatgaatagatatttctcaaaaaaagacatacaaatggccacagctatatgaaaaaaaatactcaacatcactaagcatcagggaaatgcaaatcaaaaccacaatgagatgttatcctaccccagttagaatgactattattacaaaggaaaaataacagattctggaaggatgcagagaaaagaaaactcatacactgttggtgggaatgtaaattggttaaactactgtgaaaaataaaatggagcttcctcaaaaaattagaactactgtacatccagcacttccacaactgggtgtttatccaaaggaacagaaattgtgaagtcctagctaaagcaatcagacaagagaaagaaacagcatccaaattggaaaggaaaaagccaagttattcttgtttgcagatgatatgattttatattggaaaaaaaccaaagactccaccacaaaactattagaactgataaacaagcctgggcgcagtggcccacatctgtaatcccagcagtttgggaggctgaggtgggcagatcatttgaggtcaggagtttgagaccagcctggccaacatggtgaaatcctgtgtctacttaaaaaaaaaaaaaatagccagacattgtggcacctcccatagcaggcactgtgcctgtcatcccagctacttgggaggctgaggaaggagaatctcttgaacccgagaggcagaggttgcagtgagccgagattgcaccattgccctctagccttggtgacagagtgagactctgcacaaaaataaacaaacaaacaaaaaaactgataagcaagttcagcaaagttgcaggatacaaaatcaacataaaaaatcagtagcatttctatatgccaacagcaaaccatctgaaaaaaagtgaatcaagtaattctatttacactagccacaaataaaataaaatacctagaaataaagttaaccaaagaaataaaagatctctacaatgaaaactataaaacattgattaaagaaattgaagaggacacacacaaaaatggaaacattctttaacaatattgattcttccaaccatgaacatggaagaatgtccatactatccaagcagtctacagattcaatgcaatccctatcaaaataccaatgacatttttcacagaaatagaaaaaaaaaaaacctaaagttcatatgaacccacaaaagacccagaacagcaaagctatcctgagcaaaaagagcaaaactggaaaaatcccattacctgacttcaaattatactacagagctatagtaactaaaacagcatggtactggcatgaaaacagatacacagaccaatagagcggaacagagaacccagaaacaaatccatacatctacagtaaactcatttttgacaaaggtgccaagaacatacattgggaaaaggacacactcttcagtaaatggtggtgggaaaactggatctccatatatagaagaatgaaactagacccctatctcttgccatatacaaaaaccaaaatggattaaagatttaaatctaagacctcaaactatgaaactactataagaaaacatcgaggaaactctgtagggcgttgggttgggcaaagatttcttgagtaatacctgacaagcacaaacaaccaaaacaaaaatggacaaatggggatcatatcaagataaaaagcttctgcacagcaaaagaaatgatcagcaaagagataacccacagaatgggagaaaatatttgcaagctacccatctgacaagggattaacaaccagtatataaggagctcaaacaattctatagggaaaaaaatccaataatctgatttaaaaatgggcaaaaggtacagttgcagtggctcatgcctgtaatcccagcactttgggaggtcaaggtgagaggattgctttagcctacgagttcaagaccagcctgggcaacatgggagccctcatctctatttaaaatgaatgaatgaatgggcaaaaagatctgaaccgacacttcccaaaagacatacaaatggcaaacaggtgtacgaaaacatgctgaacatcattgatcattagagaaatccagatcaaaactacaatgagctaactactatgagctattgttgcaccccagttaaaatggctgacatccaaaagacaggcaataacaaatgttggcaaggatatggggaaaagggaaccctcatacactgttggggagaatgtaaattagtgtaaccattatggagaacggtttggaggttcctcaaaaaactaaaaatagaattaccatatgatacagcaatcccactgctaggtatatacccaaaagaatggaaattgctatattgaaaagatatctgcactctcatgtttattgtagcattattctcagtagccattatttggaagcaacctaagtgtccatcatcagatgaatggataaagaaaatgtaggacatatacacaatggagtactgttcagccataaaaaaagaatgagatcctgtcatttgcaacaacgtggttggaactggaggtcattatgttaactgaactaagccaggcacagaaaaacaaactgcctattctcacttatttgtgggagctagaaattaaactcatggagataagagcagaatgatggttaccacaggatgggaagggtagtgggttgggggaaagtggggaggttaatgggtataaaaatatagttagatattaatagaataaataagatctcgtatttgatagcaccacagaatgagtatagtcaacaataattattatacattttaaaatagctgaaagagtataattgagttgttggtaacacaaagaaaggataaatgcttgaagtggaggatacccccatttaccctgatgtgattattcacattgtatacctatattaaaatatcttggctgggcacagtgactcacacctgtaatcccagcactttggaaggctgaggcagatggttcactggagcccaggagttcaaggccagcctgggcaacatggcaaaaacctgtctctacaaagaaatagaaaaattagatgggcatggtagtgtgtatctgtagttgcaactattcgggagactgagatgggagaatcgcttgagccagggagattgaggctgtggtgagccaagattgcaccactgcactccagcctgggtgacagagtgagaccctttattaaaaaaacccaccaaaactcatgtgccccataaatatatatacctactatcttcccataaaaattaaaaacaaggaaaagagctgggtgcagtggctcatgcctgtaatcccagcactttgggaagccgaggtgggaggatcacttgaggtcagaagttcgagaccagcctggccaacatggtgaaaccccatctctactaaaaaaatacaaaaattagccaggcatagtggcatgcacccgtaataccagcaggaggctgaggcaggagaatcgcttgaacccaggaggcagaagttgccatgagccaagattgcaccattgcactccagcctgggcaacagaatgatacactatctcaagagacaacaacaacaacaagaaggaattcagtatatcaaaaggatatctgcacttgcattatttacaattcacaatagcaaagatatgcagtcaacccaagtgtcaatcaatggaccaataaatagataaagaaaatgtggtaccatatacacaatggaatactatttggccataaaaagaatgaaaccctgtcatttgcagcaacatagatggaactgtgggttattatgttaagtgaaataagacaggaacagaaagacagatgccacatgttctcactaacatgtgggaaccaaaaaaacaaacaaaaacaacaaaaacctgatctcagctgagcgtggtggctcacacctgtaatcccaacactttgggagactgaggcaggtggatcttctgaggtcaggagtttgagaccagcctgaccaacatggtgaaactctgtctctactaaaaatacaaaattagctgggcttggtggttcatacctgtaatcccagctactcaggaggctgaggcaggagaatcgcttgaacccgggaggcagagatggcagtgagccgagatcgtgctattgcactccagcctgggcaacagagcgagactccgtctcaaaaaaacaaaacaaaacaaaaaaacctgatctcatgaagacagagaatagaatgatagatattagagcatgggacaggtgtgtggtgtgtgtggggggggtgtggataaagagagtagaaacatagttagagctacaaatgaataaaccccactattagatagactagggtgactatagttagcaacaatgtcttgtctattgtaaagtatgtagaagagaggactttaaatgttacccatacatggaaatgataaatattcaaggtgatggatatcccaaatgctctgacctgaattataatctatgcatgtaacaaatattcacatgtactccataataagtaaaatattttgtgtccaaaaaaattttaaacatatttttaaaaggaaaaaatgacagtgtgaagtttttaacttattctatgtttagtgtagtgctactcaaacttggatgtgtacatggaaccagctcgggatcttgtaaatgcagcttttgattcagtagatttggagtggtgcctgagagtctgcatttctaacatgctcctgttccccaggccactctttaagttagccaagacttaggctgtcaaagtgttatttcagctacatcagaatctggatagtaccctggccgggcatggtggctcacgcctgtaatcccaacactttgggaggctgagatgggaggattgctagagtccaggagttggagaatctggttagtacctgctatcccaggtagtgaccagcatccctgtcactgggcttgagttaggaagtagataaaatgtttttatactcttcgcatctccacagctccactgcattcttgacctatctaaatgaagatgtaggcgggtttggtggctcacacctgtaaccccagtttgggagaatcgcttgaggccaggaatttgagaccaggctgggcaacacagtgagaccccgtttctgtgatttttttttttttaaagaaaggaaaaaaaaaaactatcttaatggtataaatatattggcatatagacttttgaatgacatttcgtgtctttgaaaggaaagcccacacttcttaatccgtaactcattttatgaggccagcatcatcctgataccaaagcctggcagagacacaacaaaaaaagagaattttagaccaatatccctgatgaacatcgatgcaaaaatcctcagtaaaatactggcaaaccgaatacagcaacacatcaaaaagcttatccaccaagatcaagtgggcttcatccctgggatgcaaggctggttcaacatacacaaatcaataaatgtaatccatcatataaacagaaccaaggacaaaaaccacatgattatctcaatagatgcagaaaaggcctttgaaaaaatcaacagcccttcatgctaaaaactctcaataaattaggtattgatgggatgtatctcaaaataataagagctatttatgacaaacccacagccaatatcatactgaatgggcaaaaactggaagcattccctttgaaaactggcacaagacagggatgccctctctcaccactcctattcaacatagtgttggaagttctggccagggcaatcaggcaggagaaagaaataaaaggtattcagttaagaaaagaggaagtcaaattgtccctgtttgcagatgacatgattgtatatctagaaaaccccatcgtctcagcccaaaatctccttaagctgataagcaacttcagcaaagtctcaggatacaaaatcaatgtgcaaaaatcacaagcattcttatataccaataacagacagagagccaaaccatgagtgaactcccattcacaattgcttcaaagagaataaaatacctaggaatccaacttacaagggatgtgaaggacctcttcaaggagaattacaaaccactactcaacgaaataaaagaggacacaaacaaatggaagaacgttccatgctggtggataggaagaatcaatatcgtgaaaatggccatactgcccaaggtaatttatagagtcattgccatccccatcaagctaccaatgactttcttcacagaattggaaaaaaactactttaaagttcataaggaaccaaaaaagagcctgcattgccaagtcaatcctaagccaaaaaaacaaagctggaggcatcacactacctgacttcaaactatactacaagactaccataaccaaaacagcacagtactggtaccaaaacaagaggtataataccaatggaacagaacagagccctcagaaataatactacacatctacaaccatctgatctttgacaaacctgacaaaaacaagaaatggggaaaggattccctatttaataaatggtgctgggaaaactggctagccatatgtagaaagctgaaactggatcccatccttacaccctatacaaaaattaattcaagatggattaaagacttaaatgttagacctaaaaccataaaaaccctagaagaaaacctaggcaataccattcaggacataggcatgggcaaggacttcatgactaaaacaccaaaagcaatggcaacaaaagccaaaattgacaaatgggattaattaaactaaagagcttctgcacagcaaaagaaactaccatcagagtgaacaggtaacctacagaatgggaaaaaatttttgcaatgtactcatctgacaaagggctaatatccagaatctacaaagaactcaaacaaatttacaagaaaaaaacaaacagccccatcaaaaagtgggcaaaggacatgaacagacacttctcaaaagaagacatttatgcggccaacagacacatgaaaaaatgctcatcatcactggccatcagagaaatgcaaatcaaaaccataatgagataccatctcacaccagttagaatggcaatcattaaaaagtcaggaaacaggtgctggagaggatgtggagaaacaggaacacttttacactgttggtgggactgtaaactagttcaaccattgtggaagacagtgtggtgattcctcaaggatctagaactagaaataccatttgacccagccatcgcattactgggtatatacccaaaggaatataaattatgctgctataaagtcacatgcacacgtatgtttattgcggcactattcacaatagcaaagacttggaaccaacccaaatgtccataaatgatagactggattaagaaaatgtggcacatatacaccatggaatactatgcagtcataaaaaaggatgagttcatgtcctttgtagggacatggatgaagctggaaaccatcattctcagcaaactatcacaaggacaaaaaaaaccaagcaccgcatgttctcacttataggtgggaatcgaacaatgagaacacttggacacaggaaggggaacatcacacaccggggtctgtcgtggggtggggggaggggggagggatagcattaggcgatatacctaatgtaaatgacgagttaatgggtgcagcacaccaacgtggcacatgtatacatatgtaacaaaccttgtgcacatgtaccctagaacttaaagtataatttaaaaaaataataaaaaaagtaaaagcttatgtagagacaaagctgaaggatgtttctaatttgttttgcattcactctgttatattcctttaagtgcagatttcagctgataattaaccaaaagaactacctcagagggctcactgagaaagatctaaacgttttacatctggacatttaggttgtaattcaaattctcatctcttaaattttgcagaagataataaggcttggctaggatgtggagaaattggagctctcatgaattgctgatagagatgttaaatggtgcagcagctttagaaaacaggttagcagttcatcagaaagttcaacgtagttgccatatgactgagcaattccactcctcggtatgtacccattagtactgaaaaatgtgtctacacttgctgagaccagcttgatcatggagaccctaacccagcagcactagaggaattaaagacacacacacagaaatacagagtgtggagtgggaaatcaggggtctcacagccttcagagctgagagcctcaaacagagatttacccacatatttattgacagcaagccagtcatgagatttactaaaagtattccttatgggaaatatagggatgggcggaaataaagggatgggtctgggtagttatgtgcagcaggaatatgtccttaagccacagatcactcatgctattgtttgtggttcaggaatgcctttaagcggttttccaccctgggtgggccaggtgttccttgcccttatttcggtaaacccacaaccttcagcgtgggtgtcatggccatcacgaacatgtcacagtgctgcagagattttgtttatggctagttttggggccagtttatggccagatttgggggcctgttcccaacatgtcccccttgtctttttttcttttttttcaaagtgataaaagcaaaggcagcattatcacggtgagctacttctcccaggagtcaggttccgcatctgcagactatacagagacaacacagattaaaagcacagtcatcattgaaatcacagagcttttaagtgtttttatgcattttaatgggttactagctcctaatgtgtctgcagctccttcaagcactccagttcctggcattaagttcaggtgtgcctgggatgctttaaatatttgttcttttagttttgcaatatccaaagacaaatttgtagagtgtccttctagatgcttttttattctttcccaaaatttgatcttattaacagctattaatagtgtctacaaatccttatgtttagctcctacagtgggccatatcatttgaggttgaggtgccactatacctccatgtttccagataataggaacttttgccatattccttatcatttctaccatctgaccattttgttcagaccagctgaacatagtgtggccatgacacacagactgagaggtgcaattcaagctaaacatctccataggggaataatcaatgatgattccacaggaatcgttgcacagcatgtctgcctgttctgcaatgcaatcttcccaaacaggtacgttcattatttctggccaggtccaattctgtttacaaataggtttttgagggtagtatgcctcaattataggagcagatttataatggtaaatactgagatcagaaagcatgtgtaactgtgtcagatcgattatatccaggcattattgccagccaagattgataaatatgcccaataagtataattgttctctgtgtcagcccttgctaaaggaatactcaaggcagtggtgatcactgctatcgcagctaccattaaattactcattgtgactggttgtcccgctttcctctggttttcttctgccatttgtgacagcttcttgttctgtcctcaagtaggtggctgtgttcaatgggtgttgctcatgacagttggggtcctcctcagcgtcagtcttgacatggctgcaaccggggggtcctcgggatcctcctggtatctcttcctcggcatctggctcatgataaggtttcaggtatcttgatggtatccaaattggctgctggttctggcctggagaaacacaagcataacctctaccccaagttattattttacctatttcccaagtttttgttattggatttctcccaccaaaccagttgttctgcttctgtctttgcagctggtttctgtagatgctgttcagctgctgacagcatctggcctttaggcaggctcaaaaaattttaagtcaataatacgagattcaattgcatatgtggtgttctgtactccctgttttccccccttagctcttgcaactgctgtttcagggagagattcattctttccactatggcttgtccttgagaattatatgggatgccagtaatgtgtttaatattccatatagagaaaaatgtagctagagcttggctagtatagcctggggcattatctgttttaatagaagctggaatgcccatcaccgcaaaacactgcaaaaggtgacgtttaacacaggcagaagactctcctgattggcatgtagcccagacaaagtgagaaaaggtgtccacacatacatgtacataagctagtctcccaaatgagggaacatgtgtgacatccatttgccaaagagaattaggttccaatcctcgaggattaactcctcctggaaaagatgcggaatgcaccatttggcaagttgggcgtcgctggataatagctttagcttctttcatcattttcaattaattgtgtgtaatgaaccacatatgaagaatcagaaatcacattaatgggcatattaaaagcagtcaatacctcaattacagctacaagctctgctttttgagctgaagtatagggtgtctggaaaactttatcttttgagccagaataaaaagctttaccattactagacccatctgtaaagacattttcagcaccttcaattggtttaaatttagttatactagggaggatccaattagttaatttcaaaaattgaaacaattttgtttaggaaaatgattattgagaatacccacaaagtcagctaaatgggtttgctgagtaagactatttataaaagcttgctgtatttgtgcctttgtgagagggacagtaatttttccaggatcatatccatgtaatttaacaatctgagttctcccatttcctatcatagtagtgatttgatccaaataaggagttagagtccatgaattagtatgtggaagaaaaaaccattctactaagtcctgctcatggacaataacaccagtaggtgaatgctgagttggaaaaattagcaaatctagagccttctctggatctattctatttatttgagctttatagacttgcttttcgattagctgcagctctggctcagcttcttttattaattgccaagggctagtgagactaggatctcctctaagaatagaaaatagattactcatggcataggtaggaatgcttagagcaggtcgtatccaattaatgtcccctagtaatttttgaaagtcatttaatgttttcaattgatccctacctatggctactttctgtggcacaattgtagtgtcatttactaaagtctccataggttgtataactgaattaatggctcataaatcagttaacattctccatttaccttattgtttcttaataacaaagactggagaatttcagggggaaaatgttggagctatgtgtccttttcctaattgttcattaacgaagtcctctaaagcctccagtttctctttacttagcggccactgttctatcaaaattggcttatcttttaaccattttaaaggtataggttctggaggcttaacaatggccaccatcaaaaatgatatcctaaaccttggtgggaactttgtctttctgcttgaagtggttccttcaaaccttgcaaattttttcctagtcccataccagggacataccccgtttcatgcatcatatgttgactttgagggctgtataattgttctggaatcagaacttgtactccccattgttgtaataaatctcttcccataaatttataggtacaggagttataattggttgaatagtcccaggttgtccattgggcccttcacagtgcaaaatatgactactttgatatacttcaggggttaccaactccagctatgttaaattgaatgggttgaattggtcacgtggacggccagtgctgtagagaagtgattgaaatgtccactcctgtatctaccaaacctttaaatttctttccctgaatagttatttcacaggtaggatgtttatcagtaattttattcacccaataagctgctttgccttctttatttgtgcttccaaatcctcctgttcgtttaatttcacttttccccattcccacatacagcacaatcaggagctgtactatatgctctcctggctctgctttccagggaacagaagtagataaaacaatttgagttgccccattgtaatcagaatcagtgactcctgtttgtatttgtaccccttttaaatgtaaactagaccttcctagaagtaatcctatcatccccgctggcaagggtccacagactcctgttgggaccttttgcagggttcccgaggcagaaggctcacagcttttgtgcagcatacatctgtggcactaccatctgtggcaggggacagacattgtaaggggtgagggaacggcctaagccagaaatgccccggtttggaacggggcccgggatgggcccctcatgccatttcccaaatttaaaaggaaaaggctcaaatgtagctataatattgccctgttgatctgggggggtgtatcctaacagggaactgccaagcctctaaatcaccctcttgtctagcttgctgaattcctgcctgaatagaactgagagcagtcgctcaaggtgctgctcgaacagtcactggggcaactactttttgcccagtgtcctctggaaaagaaagatctggagggtcaggccgttctttttcttcaaaataagaagggggtgcagaagagtagggatgaacttcttcctcctttgccactttagctttagctggcaaacaaaccggctctgttacttcttctgttacttcattatactctcctccttcctcatcatttgtgaaaaggttccaaggtggaacgaaccagagcccacacttgtccagttgttaccctgatgcttccgagctccccttcctactcaccactgggattgcttaaaagagtacttgggtgtcctccgcttggttccacattttccaactgttgctctggcgacccttcgacctgggtttgagcctccacgttgggcaccacttgccgagaccagctcggtcgtggagaccctaacccagcagtgctagaggacttaaagacacacacacagaaatacagaccgtggagtgggaaatcaggggtctcacagccttcagagctgagagccttgaacagagatttacccacatatttattgacagcaagctagtcataagatttactaaaagtattccttatgggaaataaagggatggcctgaaacaaagggatgggctcttgttagttatctgcatcaggaacatgtccttaagtgcagatcgctcatgctattgtttgtggttcaggaacgtctttaagcggttttccgccctgggtaggccaggtgttccttaccctcattccggtaaaaccacagccttcagcatgggtgtcatggccatcacgaacatgtcacagtgctgcagagattttatcagttttggggccagtttatggccagatttgggggcctgttcccaacagccatatgactcagcaattctgctcctcagtatgtacccattagtattaaaaaatgtgtctacacaaccactcgtacatgaatggtggggcatgatagtaatccccagtaaaaacaactgaaatgtccaacagacaatgaatagataaacaaaatgcagcatatccatacaatttattattaaggaaggaatgaagtactaatgcatactgcaacatggatgaaccttgaaaacatgctaaatgagagaagccagacacaaaggagcatgtattatacaatcccatctttaaaaggaaatgtccagaataggcaaatccatagaaactggaagtagatttgtggtttcctgggagttggggaagtagggaaatagggagtgactgctaatcgatacagggatttttttgaggaggaggtgacgaaaatattctagaattaggtaatgatgttgttgccagctttgtgaatatactaaaagcaacttaattgtgcatttttaaaatggtgatttttatggtttgtggattataactcaataaaaagattaaattctcatttattttgttttttggtctttgtttaatttgtttttatagaattatgtttttagtatatacattgcctttaatggtttattacagggtttcttaacctggatactactgattttttttttttttttttttttttttttttttttttttttgagacagggtctcaccgtcacccaggctagagtgcagtggtggtgtgatcacagctcactgtagcgtctaccttccaggctcatgctatccttccgccttagcatcccgagtagttgggactacaagcatgtgctaccacacctggctaattttttaaatttttttgtaaagacaggatttggccatattgttcaggctggtcttgaactcctgggctcaagcaatctgccttcctccgcctcccaaagtgctgggattgcaggtgtgagccaccacacctagcccactactgatattttggtttggatagataattcatagttgtggggacctgtcttgtgcattgtagagatggtcagcagcatctctggcctctgcagattagatgccaatagaatctccctcctctccttcttccctagtccatgataaaaaatgtctccagacattgccaaatgttccaaggatggggtgcaaaagtacgcccagttgaaaccattggttctctttagtcttcctgctaaaagccgagctccataaaggcaggaactttgttttattcattattgtttccttagaaccatgtctcacacatagataccctaatattatagtaaatatatgaatgagtacttctggctatagaagtagcagtacttgtaaaaaatatataactatagaaatatcaaaatgataccatacttgagttaattccaatgccttaggattaacattgttaagaataccatgtttggctgggcatggtggctcacgcctgtaatcccagcactttgggaggctgagacgggtggatcacttgaggtcaggagttcgagaccagcctagccaacatggtgaaaccccgtctctgcaaaaacacaaaaattagccaggcatggtggcacatacctgtaatcccggctacttgggaggctgaggcacgagaatcgcttgaactcaggaagtggaagttgcagtgagccgagattgagtcactatactctagcctgggcgacagagtgagactgcatctcaaaaaagaaaaaaactatgtttaaagaggacaagtaagttttatcaacttactgccctggccccctaccccatcctaatctgtaggctctttttatttagagttgccagctatccaggacacaggccatgagagggcaccagtcatgctcttaatgagtcatgtgctggccttgggcaccatctgcttcctaagcctgagatgaccccacagatgccttcctgcctgccatctagatagagcggccccagcccttgaggatgctgacatttatcagtcactgcatacataagaagggaaatctacccaccatcatctacatatcaggttctgtcactgactggtcatgtttttctacccaacagaacctaactttccacttgagtatcttattcaaagttggctatgcttctggttcacattccgaggctaaatgttaatggcttgctgctgccaaaccctgctttggggatgatcacttccgtgagaggtgccaaaacgttagctgctcaagtgtgggcgttagacaaggctggtcttggatggtttattgtggtttgctacttgtctacaactttgttcccaagtttccattcaatggaaacacacatagcttttgcccctcctttcccctctcttcgttttttaagcagtggtggttctgatttaacttctgctacttctcctttctgaacattgaaacaatcccttttatcaagcaacatgtcacagactctgtgccatgctttgtgttggtgaggatacaataattggtggcatgttttgagtgtttatttcacgcttcaccctttatgaagtgcttttacacataattcttgtattcgtcaacaacccattttactgatgtggaaactgagatagagcctaataagtaaggaagcatagattcaaacccagatagtctgagcccttaaggttaccagcactacctccttaatatcctgcttcttgttatactttaccatctgactagatgtttttgtccctcttctaagctttgataaagctataaggttggaagctttaatttttcaaaatcacagacattaggaataagaaccagagaccctgaagttaaaacattaagacttgatatccaaattagatacagaaaagaagttcatagtgtggttttcccaccctgctcttctgtacattggtgattaataactgcttctaggcatagggtgggggaatgagacaaaaggaggcagggctcctatttctaggagcttcctttctctctgaggggaataaactgagtgagcctgctctttcagttggttgtttgagtgtaagatacccagattgaatacataagtgctttcataatacacaggagatgggttgttagggaactgccaacaaagtcatttcgttgtctgatttgtgcctatttcttctgcatttgcacagctttcataaaaacaggacaaagctaaaagagtgcactgaccattttggttttcttttatgtgataactcattgagcaaactctttcaggttatagatgctatgttccaagttaagtagtaaaatgattttctgactaaaattatggcaatgattcactactttattatataaaaagtaagatattttaaagagttagagcaagcaatagagatcaaaatgactttctagatagttattctttcttattttgcattttttttctaaacctagcctgcacattttttaatagtagaatatggtacaaggtattatatatataagatgtatagtgtgtatatgggtgtgtgtgtgtgtatatatacatatatatatatatatagtatatagtatagaatatttagtaaattttattttacttctaattcattactgaagaaccctcattattacacaggatatgcctacagaacttattgagaatttccccattgtagaccacaattctagcatatacttcaatgagtaatatgtcagtgactctgataaaattaagtaattccattagagtctgcgtcaagtagaatgaatgaaacctcagcatgatgggagggttcaggagctgatacatttttgtattttctgagagtcttaattacattttacaaattacatggatggttgggttggtaagaagtatgtgaattttgatggctttttaattttgtttttgtagcagttgtttgtatccatgtgtgttggtgcccatatgtattgtttggggtttggttattctctcaaaaccaagttaccgtaaaaagtttgaattttaatatttctttattgagtagtgggaccgtctagactgtgtgctggctcttactaaagtcatttgtttttcttacccgtggagaggtgtattcttgaaccctttaaacgggtctctactttggcctaagaccatattagaaaacttttttgaagtcacttattatatgccatataattaaaaagttatatggtatattctcccattacattttagccacaatgcccgtatattaaataagcaaacaaactatatgtggcaattaaaacttaaaaaaaaaagcctgaattggctcttagaaatatttaatcaagtagtatccactagaacttaacatttcatcctgtggatcatcacacacaaaatacccaaccctgctgtcattcagggtcctagcaggaacaggtagcatcaaataggataattgatgagagcttaagaaaggaactatttacaaatatgtggccagattaggggaaaccagtaaggttgggaatgccgcccaggattctaacaagagtgagaatctatttctactcttgacctaaaggggcaaggagggaaagctgcagctgtggctgtgggagagccggcctgcaaagctgtggccttcacagaggaagacagccactgccgaggtatggctagggaaggaggggaggagatgatgccctgaaccccatcgtcattctcactgggcaagcccaaccaggagccaaagcacagggcagcccattggatgcagttcattaggggactgcctctgggtagagggcagacctggaggggcagagagaatgcacagcgctagtgactatctcctcaagagcagactcacagactgtgtttcctggctttacttccatttcccagaagcgcatacccagtgagaggaatgatgatacacagtggagctccttatctggagagtctggagaaatgaatcatacacttctagctaaaatgatcagtttttccctttcctgcttttcttttcttttttcttttttttttttttttgagacggagtctctctctgtcgcccaggctggagtgcagtggtgcaatcttggctcactgcaagctccgcctccctggttcacaccattctcctctctcagcctcccgagtagatgggactacaggtgcccgacaccacacctggctaatttttttgtatttttagtacagacggggtttcactgtgttagccaggatggtctcgatctcctgacctcgtgatccgcccacctcggcctcccaaagtgctgggattacaggcgtaagccactgtgcctggcccctttcctgcttttcaagatcattcctatgcctgtgtgttttagaaagcagagcagaagcttttgtgtgacatcagaacacaacaaacacctggatgttagaattttcttgcagaaacaccttgaaataatgtttaactgaatcacatgaactagcaatggttttactagcaaaaaatatggtattagatgcatgcagtgtaaaatcaaagccaagactatctatccttatagaatgagctgtttctagttatttatatttgtttgtactttgtctgttttatctgtaaaagcagtaagtgatgcagctttaggtaaaatacatgaagagaaaataatgaatttggaaaattctgtcattctgttttctcagcaggacacaagcattctgcagcataatagttggaaagtccccagaatagagaaaaaaagtcacttattgatctaaactctcaatgggagagggaggacaaaataaaatctctcgctatcacacgatttattaaagcgtatgcaatgaagctttaactaactggatccctgaaaatgtatttcagccatcaaatatataaatttaggttgatatcagggattttcttttacaaagctatgtctaagaaaattcttttgtgggactggaaattgagcgcagcttcctaacacctcacttctgccttgtattgatcgtgggccttccaagtgatgatcctgaaactctgcatttcccaaatcatttgtagaatatcataacacgttcatcagactgcatttaccaatgtacaggagtggcctacaataatgcttcactgtcagatggtctgcagttccagccacccataaaagactatgtaatccagaggtaatccaagaagcctcagagtagaaaaaaataaaaatatcacatggggaagggggttagtaactaaaaggggcatatggagaacttctggggtgctagcaggagggttttggggtctctgaccacattctgtttcctgattagtatgaaggcaaaatatttcagttgcaaaaatttagcaagctgtacaattatatgtgtagctttctttacatgttatatttcaatcaaaagttaaatgtagataaatataattgattgattgattgatttgggtgtgtgtatatgcacatgggcagtagacacttcctggtatggttatttttagaatgggatatggctactctcttatttagatacttttgatttagttttcctcttgtcataggagatggcatagtgaacagcttagaaacaaacacaaagacattaagaagctaaatattaatcaattttagggcttagtaatccaggggcatttcaattagtatccctaaacatgcaattcaataattgaggagactccatattcccaagagcaattaattatgttacatgcactattactaaggctgggaaacttttagaaaccttccaccaagattaataaaagacttactgcttaaaggtggacttattgtaaaatgaagctattccaacaatgttgagaagtggaggaattattgcactgccagtatagtttggttaagctatattgaatgaggaattccatttaaacaagtcactatggccaggcatggtggctcatgcctgtaatcgcagcactttgggagactgaggtgtgtggatcacatgaggtcaggagtttgagaccagcctgggtaacatggtgaaaccccgtctctactaaaaatacaaaaatcaactgggtgtggtggcacatgcctgtaatcccagctattcagtaggctgaggcaggagaatcacttgaacctgagaggcggaggttgcagtgagccaagatcatgccactgcactccagcctaggcaacagaataagactccatctcaaaaaatattcaaaaacaaaaaaaagtcactacactcccaaatcattgtatgcaaagttttattgtaatgtgaaatcacttataaaataaattttgactgtaaatagatattacacatagattgctgcacaaatacagaaatagttgcgtgagtagagccaggtaagctaaaataattaaacgttagagccaagggaaccattagaaattatttgacttgatccccagcctttacaatggaggaaatttaggcacagagaggttaaaatgacttcccaaaacacacagataattatgttatggctgatttgcaactagtactgaagtattcctatttgttgatatgtccccctcactcagccaggttattaagaggtctggaatcagaccaacttgggtttaaatatcagctatcggactttccagttgaatgttaccctggatttcaatgatagatccttcccagcgagaaaatattatctgggcattaattcagaggtacagacaccaagggacttcatgagaggtatcctgagggcacatccctaaaacaggactgactcaggagaagaactagaaggctcattaacctctctataggatggcaactgagagaagggaaacctgcccaaattttgcagccatcttggcctctgggcctgaccacccagtggaattgtgctttgcttctttctgcatgcaaaagtgcccttcatcccgggatctggagggatgattgaattggcatttggatgttatcccttcttctagtgaccagtctaaacatgctgatcatggtttgtgctcccaagtttcactgagttctggagtcttaatggtgggctttctctaatgctgtttgcaccagagtatagacacttgccatctaatggagaaagtaatagaactcaccttaaagagctgtcataggaatgaaaaacaatgcataaaagtgtgtagtcagatgcttgacccacattaggcacttaccaaatattgcatgcaactattgttactcagatacaacacaacagtgggcattgagttgtccaagaaccttggccactgtttgacttagacaagattttctttttagagcatatcactttaaaatggtgaaacagctgtggtgaaaacactagacaataggaaaacattgataaagacatattacttagaaattcaacctagttgggactttctgatttgtttcatcaagagacaaatatatggctgaatcttacttttttcaagcctggtctttggggttggaagatcaaactcctgctccatcccttaactaaagctgtcaacgaggaaattatcagaccatcctgagcttctgtttcctcctctttaaagtgagattgataataatgcctagtcagtgggtgcttgtagagctcaaggaagagaaagtgtacatgaaatggcggggggcgggggggaaactctgttggagatgaacattaaagagtagaaatctcaaggagattgtgtttacttctctttccagtttccatcttgctgctgcaaaaggacacgtggaatgcctcagggtcatgattacacatggtgtggatgtgacagcccaagatactaccggtatgtggtttttagtctcttaagtcagcaggccagcaccagattaggtatcaaaaagtaatacatattcattatggaaaatttaaggccaggtgtggtaactcatcctgtaattacagcactctgcgagggtgaggtgtgtggatcacttgaggccaggagttcaaggccagactggccaatatggttaaaacccatctctactaaaaatacaaaaaaatttagccaggcatggtggcatgcacctgtaatcccagctactcaggaggctgagacatgagaatcactggaatcctggaggcggaggttgcagtgagccgagattgtgccactgcactccagcctgggcaacagagcgagactctgtctcaaaaaaaaaaaaaaaattagagtctacagataaaatttagagtccaaaagaagaaaagagaatcacctccaatagcaagactctgacatggttttgttgtatagccatacttctgagttttcatctttcatgtggttagtcaactagagactgtatgcttcttatcctcattttttatattattttctaagattatatgtacagaccaagcaatagtccctaatttttgtttttatgaatcattgtgtgaggtgatgagtgagttactcaggagctcatttcatcaactgagataggctctgtagatggaagccttgaacttcatctggaccagctgcccacgattctcaccccttgctgtacttcagggcatccagttcacctgggaacttgaaggaagggaaaagagaagaataaacagtacacacacacacaaacacacacacacatacacacacacacaaatatatatacctacactttaccctctgagattcagattccattgtctggaagttgccagtcaactggtatttttttaaagctcgctgggtgattctaatgtgaagccagtgttgacaaaagatgaacaaggcaaatggagagaaaaggtagcgtagtcttaccttgtataaaacactgtcctataagaaggagcccctggggtctccagcctgggattctgcccctgctggccaccccaaaagaccaaagcaaccactgatggcttttcatttttcgattgtactcgagaatttttggcttctaataggtttctattagtgtttactgggatacaaaattagcctaactccattgcctttatctaggcttttcgtgaatccgtaatggatccctttcttttctcccatccccaaaattggcctcttcagactagtcatcttgagggatcagccaggtattgcaggaatgctattattactcaaaatatggttgggaacaggtttagaattgttttcattgtgtgaggacttaaaaaaaagaatctcagtggttgggaatctttatcctttgagaatagggtttttttttagggcaaacctaagagccctaaaaaaatttgatgtcaagtcaggtgaatgatgtttcaaactggtaaaaccatttttggtcaaaaatagggagtgattgaaataacagaatgatttttctgagcagttccacagaaagttccaaaaatattttgagaaatggcaacaccaatatagggggataaatggtttccttaagtgactgccttgagggaaatactaatttatgtttttccaattaaagtcatctttaaactcaagacccaattattgtgtttgtttttaaagttcattgtcattgctcttaaagttatgccataaaaccacatggtgcagtatgatttgctaaaatacccctaatgagatgtatgtcctcttaagtaggagaagtttccctctaagaaacccataatctgaaagcattagctcagagtgaataaactggtgccgtcacacggttttgtttcattgtacttgatattaagaaatagattagacaggactgtagttattttcagcataaccaaaatcttccctcacgtctttttattgtagggaaaaataagttggttttttgtgtgtgtttttttgtttgtttgtttttgagacggagtcttgctctgttgcccaggctggagtgcactggcacgatctctgctcactgcaacctccgcatcccaggttcaagtgactctcctgcctcagcctcctgagtaactcagattacaggcacccaccaccaccacgcccggctaatttttgtatttttagtagaggcggggtttcaccatcttggccaggctggtcttgaactcctgacctcaggtgatccacccgccttggcatcccaaagtgctggaattacaggcgtgagccaccaagcccggccagaataagtttttttttttttttaatacatgcttattgtagaaaagttgagaaatatagtaaactataaagaagaagataactcaagttcctactcctatcagaaagaaaaaaaatatttctattttgttgtatttccttccagattgtcccaatacatttttacatgcctgagatcacattatataataaattctatatcctgcattttaatttattaaatatcccgccagtttcatttcccccattaaaggctcttaagaagcatagttcttggtggcctcataacaccctgtgggtagagctcatatttaccaccagagccctaacccagttcctgagaggctggtgcagtgctgagcaggaagacctggatgccccaaggcagtgcccacttcctgcagactgagatggtaccactctctaagaagcaacactggagggagtgctgtggacacagcctggatatttcccaggattcgccagtgggaaccaattgaaattggtggaatccacagcactttggggccacaggacattgtccaaacattccatgggttgaagatgtctcagagctcccgtcacttccttctcacctgatatttttagccatgattccagcacttccctccttgggcttcatcgttttattttggcctgaaggaggtaccagcttcttcccatgatttcttgaaagcatgcaaagagaacacgggaacaaaagaagaacactgcatggaaaaaagtgcatctagaaaaacacttctcatttttttctgtcccaataaacaggttaaattgtaatggctttgattgcccatgcctgtgtcttacctgttggctataatacccacctattcactctccctctcaagaaagcatatctgaatacaagggaaggatgaggttacgttagtaacagtgcttagtggtcatcactagtcctaaacgtttgttgtggtggttaggggatgaattaaatggcttagcttttacaggtattgtctttccatgtggaacctaccttaagttttgccactttattactgagatgcagtcaccttcaatctgaagatccagtgagaactggtacaaagatctgttaccataaatcctgccctgtagaatttttgaaaaaaacaaaacacacacacagacacacacacacacacacacacacacacacacacacacacacacacaaaaccacctttcaaaatctattacactggctctttttattctttttatccatgattaatgtcttcaggatggtcaaattggtataatttcctactttttaaacttttgactgaatttaagttatagaagcaagaatctgttagcattttttttttttttttttttttgacacggagtctcactgtctcccaggctgaagtgcagtggcacgatctcggctcactgcaagctccgcctcccgggttcacgccattctgctgcctcagcctcctgagtagctaggactacaggcgcccgccaccacgcctggctaattttttgtatttttagtagggacggggtttcaccgtgttagccaggctggtcttgatctcctgacctcgtgatccgcctgcctcggcctcccaaagagctgggattacaggcgtgagccaccacgcccggccagcattttttaaagctatttttgcagatgaaatacttggaagtctgagaatttttatggatgctttacaagcaattttaagagcaaaaccctgtcagaagataaggccttggatgtgattatagtgcaatatcaactgtcatgtcattttagattgatactacttaattcttccctgttttttctagctatcttaagaattgaatacatggtcatagtctgaggtagttttagggaaaggtgccctgtggccagagcagttgggccattctacttagatagcctttaagtaaaagggttcttagactacttgtaatagtccaagactcttaatttataaatatcactagtcttttatttgcaggtggaattctgctggaaggcacttaggattgcccttgttatttgcccacagggaaattgcttcctgatactctagacagatccacagctatatgggagtcagagatgcattgtctcatcatagttggattctgtcactaaaatagtatttcgtccagaaaattttgcatttggagagagaatttggtgttaatagtagcaatgagagacatcttacttcagtgttatagtgttcagggaatgatgcgtcattcggattttgagactatttttagtgaaaaatacttttctgctgctcgttagaaaaacatcacagggctggggaataaaagaatttttgcttctatagaaacccggcacttccaggtatgactagaacacttactcaaagtaaaaagaaaacctgttattttatagtaagttgtttacatctcccaaccatcttgtctttggagaaccaggtctttttccagtgggtgttgcttatgcagaacagcttttgttcacagcagggacaagttaatgcattgcgtacacgacataaacggtctccatcttacaatcaggatgtgttccaaaccttcatttgtaaggcatttgtttaaaactcagaatgtgcttgtccacagaaacagtggtataagtgatggttggagggccaagctactccaccaaagcctatttaatgcatcatgtaactaaactcatacacagttatgcttcatacactctggaaggagggatctcatataatataacaggaggaggaggaagagaaaatctttgtcttcttacttccaagaatctctcttccttcatttttaaattttgttcatcctcctccttttgggaggggacagagggattcctgtctctcagtatcctatgctgatgaaacaactctcccccacacctaccctaaaaatctctccgtacagctgaattcaaaatagaaggaatcggatcatttgactttacacatttttatgccattcaccatagccctatggcccactagtttttaaatacagtgtttcctagctatatgattctctaattagtgaatttctggtcagtgttacagactgaagactgatttagaaagaaaaatggggccgggcgcagtggctcatgcctgtaatccacactttgggaggccaaggtgggtggatcacctgagatcaggagttcgagaccagcctggccaacatggtgaaaccccatctctactaaaatacaaaaattagccaggcctggtggcacgcacctgtaatcccagctacttgggaggctgaggcaggagaatcgcttgaacccgggaggcagaggttgcagtgagccgagatggtgccactgcactccggcctgaatgacagataagactttctaaaaaaaaaaaggtatttggggcctgggccaccatcatataaagaagttgttggccaggaatggtggctcacgcctgtaatccctgcactttgtgaggccgaggcaggaggattgcttgaggacaggagtttgagactagcctgggcaacatagcaagacccccagctctaccaaaatttagccaagtgtggtggcatacacctgtggtcccagctactagggagtctgaggtgggaggatcacttgacatcaggagatcttggctacagtgagccatgcttgtgctactccattccagcctgggctcagaaaaaaaaaagaaaagaaattgttcctcgaagtcagtggttctgatgaactgggcttgatattgccccccaggggacatttggcaatgtctagagacatgtttgattgtcacatttggacctctagtggatagaggccagcgatgctgcctaacgtcctgtactgcataggacaaccatccacagcaattatccagcttataaggtcaatgatgctaaggttgagaaagtgcatctacggccataccaccctgaacacgcccgatctcgtctgatctcggaagctaagcagggtcgggcctggttagtacttggatgggagaaagtgctttaaacatgtcctaaagtatgggagttatctacaggtgttatattatgtcaaatagcttgggaaatccaggattaagagtttactaggtgtggtggggtgtctggtagtggtcaggtcctctgctctgaccctctccccaggtccccccatccagacatttgaaattagcataccctctaattcagatggacagaaatgtattgagagcctactgtgcagcagcagagttgtcaatactagagatacagcagggaatcaacaggggtgtctgtcctcaccaagcttatattctcatgggggaaaaataattaactatataagtgtgtgtctgtatagagaaagaggtaaaagggagtgatagaagctgctaagtgctatgaaggataaagaaataaagcagggagtgggggtaaaagaattagggagaaattggaatttgaaacgagaaagtcaggaaaggcctcattgagaattttacaactctctcccttctgtataagaactttgaaaatcagaaaactccaggtaatttccattcagggctggagtacattgagaggagagggaaatgagatgtcaagagtaggggctgaagtgtgtggatctttgatgtattctgctggcttgtgggttgccttcactggattcctcagcctgtggtgggcatagcctggcatggctcttatagacacaggatgtttggcaaacatattgacagctgaaagcagagctgctgagctgcattatcatgaatccaccgcaagtgtctagcctggagctgcttttcaccccaagacaacagcagttggaacctgtgaatgtcatccagtaggtgggatagggcatgggggatgctcgattcttcccactcgcaagaataacagttccagcccaggcacagtagctcatgcctgtaatcccagcactttgggaggccaaggcaggaggactgcttgagctcaggagttcgagatcagcttgcgcaacgtggcgaaatctcatctctacaaaaaatacaaaaattacccaggtgtggtgtcatgctatttgggaggctatactcccagcaacttgggaggctgaggtgggaggatcactttagcctgggaggttgaggctgcagagagccatgatcgcgtcactgcattccagcctgggtgacagagtgagaccctgtctcaaaaaacaaaaaaacaaacaaacaaaaaaacacagttccgtcttttttggataacaacctatttccttatagctgtcttctcatatataagaaagagattttttttaaagtgtggcctttttaaaaaaaattattatttgaaaaaatccatttaggacacagcgccttacatctcgcagccaagaacagccaccatgaatgcatcaggaagctgcttcaggtaagctggtgacaacttagaattataaatgtgtcggttttacaatttgaaagtaatcatatttgtgaaagaacaaacacaccctccatacacactcctttaaatactgtccccaaacctgtgtttcctaagaagcttcatgattgaaatgatagccaaggagaagactgtctccatagcaactccactggcagagaagaggatctaatcaaaattggagtgtcttttttgggatctagcctttttctcccctttatttggttccttcttttctttgctgaaggacttacaccctctaaatagtgtaagtttttaaaacatcggtttctaagctgttggagatccttaccacacaggatctccagtatcctagtattgtgaaatcatcagtagaatgcagctcttctttgagaagcaaactttcaaccattatttcctcatatgtaacttgatgagcttcagttcttgggttttgtttaagtccttggttttattcttctttataattttcagccaactccctggttcaataatcttgccaggaagtttgtaatgatcccttaaagtgacaacttccataaatctttaaagatgaatatttaatgaactcccaatagccatccatacggtaacatccagttgttgccagtcaaaatgcaaactggctgttttcaggaacagcatagagcaataaaatacgtgtttgcttgtactgtctgttctgttgaactgttgtcttggccttcacaagcactatttgggacccagcatcttgctttaatttggctttgaaattctaatgcagaaatgtgatcacattcttcaacttgtcctgtgctgttgatcacacagcttcttgtcttgcgttacatgatgcaagctattgccagttccaagaatgcttaaccttaacaggtctttgaagctaaattcaagaaaaatagattaatgtctgtgatgttgtattatgaggcttccctttgaagacaactaaaatagaacttttcttacctgcctcttctgggaccagacactctggataagtgaaaatcattgctcaagctctctgcctccatatccttggccctacctcaatttttaagtaattgatttatgttttaaatctccattcccattctggcttggctatccagactttgcatctgactctgattttaaggaagaattaacctgacaagctggatgttctcgtgggcaagaaccagatattctagtctctaatgtaatcttatatctggttatgcaaatggattggtttttcttcggaatctttgaagcctttaaacagttccttgtgctgctttaaaattaggccaaagcatggtaagtcgtaacttaatctccattcttcttaccacgaaagggcagacatttcactagcgtggtagtgtgttattacctcctctcactgccaaaccattcagattgttcttcttcctggatggtggttaaaacctcagctgtgtcctcctgttgggctgttttcccaggtcctgttcctctttgcactctagccagttcttcacctcttgtctcagtagcccaggctctctgtgctgtgatccccattacctcctgctgccccccactcctatactctctgcatttatggatctccctgggctctccaggcttttgctcttattgcccgtctgctggagccattccccctctccagtggctaccaaggtaaagttcttccttctcacggcaatgagcacaaatagagccttttgagattcttcaaataagctctctcaggctgggtgcagtggctcacgcctgtaatcctagcactttgggaggctgaggcgggtggatcacctgaggccaggagttcgtgaccagcctggccaacatggtgaaaccccatctcttctaaaaaatacaaaaattagccgggcgtggtggtgcatgcctgtaatcccagctactcgagaggctgaggcaggagaatcacttgaacctgggaggtggaggttgcagagagccaagatttcgccactacacttcagcctgggtgacagggcgagactccatctcaaaaacaaacaaacaaaaacaacaaaaaacaaatgagctctctcccttcccgaaccctcagctattcctcccgccctttctcatactgtgtttcttgggcactgtgcaccgtgtcaagcagtgacaaacagcagcccctatcccagtggagctcccagtctggtaaacaatccacaaataaacattacagattgcacagcagtaaaaaggaagctaacgggttactgtaagagaggaatcagaggtggaggttcatggaaggcctcgtgaaggaggtgatatttaagctgagacctcccaaggatgcaaagagccacaaggaaagcattctaagcaaatggtacaatgtgtgcaaaggacctgaggtcacaaaggtgctggccagggagggaagaatgccaatgtgtgggcctggggcagagcaagtaaggaggaaagcagcacaggatgtagggccttttgtatgtcatgatgggcttgactgcagttcatcctaagtacagcatggaagtgtgaggggcttttaagtagacagtgagagtcacagttttaaaagagaattctgtttctttagagaattgataaaaaggggaaaaatgcagaactggggagacgtgccaggaggctaccttagctgttcaggtgagaagacgctgtcctagaaaagggtgtcgggaacaagaaagggaagagggtagagtggaggcgagttttggagaaaaaagttgacagggcatggtggtccactacatgtggggtgaggaagaggggtcggggaagggggtggaggatgaggaggaatcaaagctgaatcgctggtttctggctcaatgtctagactgatgatgatgctgttgatggagaaggcagtcagggaggagcaggtggggcacgggggaggggaagccagagattttggctgggcctttgagatgctaataagacatcagagcagagatgtgaagtaggcagtgggttatcaagcctagcgcttgaagatgacaacttttgtgtatgagtaagaatacaggccctagcccagcctgtctgagtttgaatcttggctctgccatttactgcgacttgagcaaattatcaacttttttgtgcctccgtttcttcatctgaaagtggaagtaatgatagtatccacctcgtgttgttaggggacataaagcagttctttgaacagtgcctggcacgtgagagctaatacttacatagcacttattgttgtcactgttaggacctccgcatttgggagtcactagcgttcattcttctagatgatatttcaggttgtgggtgtggaggagcttaccagggaaaagagcttagaggaagaacactgaggagccctgaggttttctgtttggctagaggaggagccgcaagaggaaaagcagaataagatgagccaagcagggctctaggagctgagaggttggagagaggaggacagaaatgtttatcgtcattggaaacatgaaggtttttggtgaccttgaccaaggccatctccttggactcgagaggggacacccaactgcagtggttttgggagtgaatggaggtgagggtgcgtggactgcatgtgggtaatccttaagagaaagctggtttcgtgaagggggacagaaagggcaggagatgggggaaaagaaaggattaagatgagagagcctagagtatgtctattagctggtggggtgctggagtgatgagggaaggagaggaacagataggtgaagcagcaaagaggggagagtttgcccatcccaaagacatgagtctccttccccataggagactgtaggcccctggaacacagcagctggggcttatttatgttaatagtcttcctaataagtcacatcataccttgcaggaaaagtctgaactgaatagaattggggcagggtattttattatatggatgtatttatttttgtcttatagtctaaatgcccagccgaaagtgtcgacagctctgggaaaacagctttacattatgcaggtaactttcattctcctatttgtcttcttctgccattagaaacaccaacttttctttttccttattcaggccattaaccttccatactattcctggtgctcttttctgtcatcatttctaaacattcccattttactctgtttgtaaaacatacacagttttaccgaggcatatgcctagaattcatcaattcctttgccacctaaccactgaaaattatcacgattaatatattttaactaatttaaggtttctttttaaactaagagatattctaagcatttgtagatttcaggtaatgtgtgatacagactttttgatttgaggattattatgaacatcagtcaattttatttactaatattttgtttagtatgattacacaacttgaagtgacaaacgttgacactgaactatgagtgattagatttacacatgtgttttattgctagttgtggaaaagctaagtcctgtgaaaacctgagccaaatatttgcctaaaggcaactggcagtcattggctttaggcctgcataactctgaaattaagcagtaattttaaacacctcactcctaaccttcctaataccatttctcttcaatgcaactagagtgaatatatgtagagtgggtagaacatgaacatttccttcctgaagtatctgatacccctggttgtgaataactgtgtgattggctgtggtatttatattttccttcccccagcggctcagggctgccttcaagctgtgcagattctctgcgaacacaagagccccataaacctcaaagatttggtaagtaccaggtggtcactagaggcagaggtagacattggtttctagagctcaatgggatacctctagagtcactgagactttagactagcagtctccaacctttttggcatcaggggctgattttgaggaagataatttttccatggatgggggtggggatggtttcaggatgaaactactgcagctcaggtcatcaggcattggagtgcacaacctagatccctcacgtgctcagttcacaatagggtttgtgctcctatgagaatccagtactgctgctgatcttataggcagtactgctcactcgcctgccacttactccccgctgtgcagccagatcctaacaggccacagactggtactgatctgcagcccctgggttgggtactcctgttttagacaactaagtattgggcaaattctattgcttttcaacctagattctcttctgcaaaatggatttatgtattactcttaacccttttcccatttgctccaagaatactcaccagtggcgtttggggatacagcatttacctcaagataactttgccacgaaatatctcatttttattattattattttcccatcactctagtgtattgactttggaaacaaaagacatcattctgtttatagcattctgtttttagtagtggtatttccatttacaaaatgtagtaattctcgaccactgaaaatgtcaaatcctagaaaacgtagcattcctatgtgtgatgttaatatcgttctcaaagagatcttggctgaagattcatttgatgaatccgatttttctgagacagatgattctggtgttagttctgtttagaaataactccaagaacagtttttatattttattttcacattgaaaatcagtcagattttcttcagcctcaaagagtgtgtttatataaaattaaatgagctctggcagagagctgcacttttttttttttttctaaactgggaagaaggttaattagcttctaaaacattagtaaaacattttgcagcatatatttcctatataggtatatttatttctacggctatacatgttttctaccatcaatgtaattacaaataaagcttaatttcttgatttttaaaaataagtctaaatagaaattttactactttctttctgcacttggataacttctacgtagaatctcccaactttgaagaccattactaggctattttaacttcaccaggctactttgagaataaatttatatacctatcacatggttctgtcatggggttatatttcatgttgcagcatgagaactgacatgcatacacttatatttgatggagatgctgtgaagtgactagatagaatctgtaaataaattcatattccttgaagttcagtacttcctaagcagaaagtagtataacttcacagagatagtgcccagaaatctatctgaaattctttatgacaatactcaatctttaagtagcacttgtatttttaaatagttggatatattgtaacatcttttccctttgcctattgaatgcttctaccttaaaactcactgtcgatggatttatagggtatattccagaaaaaaaacaaaataacaacttctctttatggtttgtgtcagacctaagattacaaaaaatacttatgtatattcttctagtatttttcatcatttgttttatattgtaatgtttaaatgcttaatccacctgacatagtttgtatatgagttggagacctagatttcctttttcccaaaggggttgcaattgtcatgacataattattctttctatccatttctttatctagtcatgtgttagtaacagacataggctcttaatttatgttatattttgatacatagcaagattactaaagggtacactttcggtaaaagtggaatggcaggatatataatgattagtgcactgggaataagctgcctacagggcagtgggatcttctggtgtcgtgcggagacacgcccttcctttctccagcaccgtccctcagtatacccggtacacttgccttgagcctttacacactttgtgttctgtcctctctcacagtcacccaaacagtgatagccaagggcataagcagccgcaagaagctggagctcctatgtaaaagctagcattcagtaaaattccataacaagagttgtgccaacatacaatcgtgactctataggggtacagaatatcaggttggaccagatactagatcagcagtcagcagtccaagtcaggagaaaaatgtgcaaaaaacaggggctgacttttgcaattctggcattttgtgcctgaggtaaaatctaaatctgaatttgtctcctaggatgggaatataccgctgcttcttgctgtacaaaatggtcacagtgagatctgtcactttctcctggatcatggagcagatgtcaattccaggaacaaaagtggaaggtactccagaattaggcagaaatcatgtgacttcagtgatacccacattctgagagtatttcaaaatatcacagctatattttggatcatttgttataagggatttttaacttcttacctttttaaagttctactgtttctgataatcaagaatctatgttgactttaaagcaattttccccagacatctgtggacatcattgctggctaagtctgtgaggagactattaaatgctaatgtgaataaacaatttcctgtgactttctatgcaaaataaaacaaacctattggttgttttggagaaatggtcttagaaatatatatgttatttaaaatgcttgaggtaaaacaaggataagattcatgccagtcatattaaatcccatcatattatgccaaatagtatagaagattgtgttgtttgacaaaatgtggtttaatgttttgatttaatctgaagtttaaaaaaaaaaaaaaccacctaatttcatcttgattgcattccacttcgaattccctgaagattaagtgtaataaaggtttaactgcacttaatcttcttttctctttttttaagacaactgatttcccaagaaagactttttacattctcttagtactaattttgtgtctcttttttcctttagaactgctctcatgctggcctgtgagattggcagctctaacgctgtggaagccttaattaaaaagggtgcagacctaaaccttgtagattctcttggatacaatgccttacattattccaaactctcagaaaatgcaggaattcaaagccttctattatcaaaaatctctcaggatgctggtatgtaaaagaaaatagccaatgttgttttaagtttatccactccattttccccaaaggataaaggaatgtgtgcaatatgatatattttattattcttttaaacatattcttgaaaaaaaaaggagtgttaaaaaatattgtatatggtgtatgtgtgtgtatccccccacccaaagtgaatatgaatcattatgcttcttatagttctttttttcactttttcctctatagatttaaagaccccaacaaaaccaaagcaggtatttatctttgggggaggcttctatgtttcatttatgcttgtgggaatttaaaaatgttcagatttaaccactctggtccactagtaaagtaataaagactatattgaaaatacttagggactgaaatatctttgaataaataagtcattgttataaggtgttaaaggttgccaggccgggccggtggctcacgcctgtaatcccagcactttgggaggccgaggctggtggatcacctgaggtcgggagttcaagaccaccctgaccaacatggagaaaccccgcctctactaatattacaatattagccgggcatggtggtgcgtgcctgtaatcccagctgctcgggaggctgaggcaggagaatcacttgaacccaggaggcagaggttgcggtgagctgagattgcacgattgcactccatcctgggcaacaagagtgaaactccgtctcaaaaaaaaaaggtggtaaagctttccttaataatttgctttatttcaaaagcatgtaactttaaacttgctacttatatgttcatctttttctgaaatgtactaactcatacttcctattggtgtgaaaatgtttgatgtggcttaaactctgtgactgaataacactgttttaaatacttgtaatatcacatgagctacagagcttcagccagaaaatgttagctatttaatgaaaataagagaatttagccttttcttttaattagggtttttctagaacgtcatgtggtgttacacaaagtagaaattgagtttgccctgttattgtgtagttttttctaaaaatatattgtcactatctgtttttttgatgaacagtatatgtttggttgtttatttatttacacatctacgttcttgaagaaatcataaacagcaaatactcaatactaaatttatgtgctaactgtattacttaccagtaaccttcaaaaatgaagttatccctttccctcatatttatagtctttaaaaaaaggaatggaagtaatgcagacgtgtgggaaataccattgcttttcattaatacagaaagctggctgtgattgtattctggattctaagttgtagtagacctcaacctctactttcccagttctccacaccaacctaatctggttttgtctcatgtgtttttattttcttgctattaaagcatgggctgctaggagaatacttgtgcatgcatattatttatttttatgttggtagcagatttcagattttgataaagtaagaaatgtatgaacttttgaggtttttctcatgtgtttgataaagctacttgcccagactttactaaccaaactaacccacctccattctttggactgtgataactttcagcatgaccaagtctctaaaataagctcagaaagaagtggaactccaaaaaaacgcaaagctccaccacctcctatcagtcctacccaggtaaaaacaaaagcaaaccaacaatcaataaacgcaccacaagaaagccataaatttgtcattttgtttaggccaaaaaggaatgttttagaactgacctttaagtgcatatttaaaattttccttagcagttttaaattacaaattgtggtaagaaggattgatgattagtatggaaataatgttgattcttatctatttttaaaaaaacagtagaatcgaatagcctctttttgaaaagtctcaaggaaatttctcaaaatcttatcacagaaactttcccttaagataagttcaatttatttttagttccttatgttaaaagatctagtaaggactgggagaatgagtagccattgaggcaattagttgaaaatgaatttcagttcgtttcttaaaacattgctgcaatacatttgcctttttaattgcttttaaggttggctaatattaaaagtagttttcatttctgagctttatagtgacggttgcatagaggaggaagctcagtaatctatgtaatggcaggtaaaaacacatcgaaatttgttatttaaaaattcataggccataaagagaataatccatatttaaatagtagagaggaatagctcatctcataagtattttttaaatgtatgttagcatacttattaatattcttaacctgcaatagaagttttatagatttttaaaaaagtgattctaatataggagcacagttatattctgtaaactttcagaaagtatttgaagtagctgaattgcactgaaaatattctacccgtgaattaattgatgccaaggatacttactgttagatttcattgcattggttaaacaggttgattcttcggcactggagaagaggagtttgaagatacattctttattaatgattttcattttgtttcttttttagttgagtgatgtctcttccccaagatcaataacttcgactccactatcgggaaaggaatcggtattttttgctgaaccacccttcaaggtatttcctttctgtattcagttttgttactgtattttaagatacatgatagacttgctttaagttatataacactgggaaaaacagaatatacttctgaatcattggttcacaaccttttcaccatgaagtaccccttgattattttttctggcatggaccccataaagcaagaatgtgtacagctagtttgtatccataataatttaaaatttttaaaaaatcattgagtgaataaattaaatttacaaaccaataattgattttcttcatttaaaaaaaaaagagacaagagggctgggtgcagtggctcacacctggaatcccagcactttgggaggccaaggtgggcagatcacctgaggtcaggagttcaagaccagcttggccaacaaggcgaaaccctatctctactaaaaatacaaaaactaggccggggttggtggctcacgcctgtaatcccagcactttgggaggctgaggcaggtggatcacgaggtcaagagatcgagaccatcctggccaacatggtgaaactccgtctctactaaaagtacaaaaattagctgggcatgatggtgcgcacctttaatcccagctacttaggcggctgaggcaggagaatcacttacacccaagaggcagagattgcagtgagccgagatcgcgccactgcactctagcttggcaacagggcgagactccgtctcaaaaaaaaaaaaagaaaagaaaaaaatacaaaaattagttgggcctggtggcaggcacctgtagtcccagctactcaggaggctgaggcaggagaattacttgaacccaggaggcagaggttgcagtgagccaagatcgggccactgcactccagcatgggcgacagagcgagtgtcttgtggtggggagcagggacaaagtttacttatatggaatctaaaaaagttgaacccatagaagcagagagtagaatgataattgggggagtggtgggaggtattggggagatgttggctagacggtacaacatttcatccagataaaaggaataagttcaagagatccatggtacaacatggtgactatagttaataacaatgcattggattctgaaaatcactcagggagcagattttaagtgttttcatcacaaaaaatgataagtgtgtgagattaattagctccatggccttttcacattatgtacgtatttgcagacatcatgatgtacatggtaaatacatacaacttttatttgtcaactaaaaaataaattaattttttcaaaaataaggtgtggaagttaccagcttctacctgttattctcctcattctttcctgaatgcagaatattgaggaaatgccaaaaattatatttcaggaacttctctatttataatgaaatattctagattggatcctgggacagaaaaaggccattattcgaaaaactggcgcaatttgaataaagttgtaatttagatagtagtaatttaccaattgacaaatgtataatggctacatctgttgtaaacattagaagaaataagtgaaggtttctatcttgcaacttttttataaatcttaaattgctccaaatacaaagtgctaaagtttttttaaaaagagacaaagataagaacttactagataagcagtcttcttacccaattaagtttatattaattccaatcaaagagacagaaacttgtgttattctctgttgtcttactgagaattgtatagttaatttttttcctgactataaaagtaatatgtatttattttacaaatgttagaaaatccattaggttttatccacctggttctgtagatttgtggttgcaaaacattttaaggaagtgggaggatatttccatttaatatctgtttaatatactgagaaattgtactcaagggggaaataaaatttataattgttaacatgaaatttcgatattttatatttacttactttcccttatttagaattattaaagatgtttttttttaacttggatacacattaatctgaaacagattctatcaacctatcatttccctcactttagactttactaataaactcttcagatgaatttctatgtaagacaaggcaactatactcttatagttagtacgataatatcttctgatatgactgtgcctcaaagaagcagtgcaatccgaagaatatcacaaattatgatttttcagaggtagagtataagactgtcatttctgaaaaaacaacaacaaaaaaaaacaagataaaaagtgacatttattcctacgttagcttagggaggagacaaaagtgatatctaggccaggctcggtggctcacagctcatgcctgtaatcccagcacttcgggaggccaaagcgggtggatcatgaggtcaggagatcgagaccgtcctggctaacacagtgaaaccccgtctctactaaaaatacaaaaaattagtcaggtgtggtggcgggcacctgtagtcccagctactgggaaggctgaggcaggagaatcgcttgaacctgggaggcagaggttgcagtgaaccaacattgtgccactgcactccagtctgggcgacagacactccatctcaaaaaaaaaaaaaaaaagaaaaagtgatatctatttaaaatggctaaagtttaaaaagactgatactaccaagtgaggattgaggatgttgcagaactagaactccatttcctgctggtgggaatctaaaatggtataactattaccagtttggaaagctggaagtttcattaaagttaaatataaacctaatatatgatccagccatccactcataggtgtttaccaaaataaatgaaattgtatgtttagacacaatcttgtatgcaaatgtttgtagcagcttcattcacaacctccccaaattggaagcaaaccaaatgtccatgaacaagtgaataaagataatgagatatacccatataatgaaatattatctgccaataaagaggaatgaactgtagtgcaagtaacaacatagttgaatctgaaaagtcatcatgctgagagaagccagccaccaaaaaattcatatgggatgacattccatttataggaattctaagaaatgtgaaaaaaagagttgtggttgcctaggaatgatgcgggcaaggactggttgtaatgaagcatgaagaagcttttaggcataatgaacagattctctatcttgactatagtgttggttccataggtatacatctgtcaaaaactcttcaaattgtaaacttggctggatgcagtttattatacgttatatagtggaaaatataaaaacaagtaaatttgttataaaagtgaaaggactgctttttgtaaagataagcacttaactaaaaataagctactttattatttagcatttgggcttttacaaaggtatctctgctgaaaaattctcttatcattgactggctcattcggatgccacattgtaatttttagcaagtcactgtaatgttttgaaatgagattgtggctttgaagttccaagaatttttatggtatattaacagatattcagggacaaagcattagagaaaatctttagggaatctattgccaatctgagaccatatgatatttattaccatttcccttagaaaagttaatagtaactttaatagcagataacttataaaatgataaagctaaaaaatctgctttaaaatatttcaatcaatgtataatgcagacatatagaacttctctttgacttcattacgaaagcactatttgctgtctcagtttttagtacataactcactaaattagcaattacataaaattattgtgatcttaaatatatttgcattgtactcactaaatgaaacttctgaaaaatatttagagaatatgccctctggaacttctaatgttttagaaattaaacttagtagataattgtcacttttactcatttatagcttaaaatatcttctttcttcgagattttctagctgcttttctagtaggatcataccagatctgctctgcgtaagctcaaggaggaaagtctgcttgattcttttgtgtaatgttacatttagaaatgttctttaagtcatttttgtgtttcaataggctgagatcagttctatacgagaaaacaaagacagactaagtgacagtactacaggtaagacaaggaagcatctgtttttttttttccttcaaccaaactatttcatgtccatttaaagagagcaaaggccaagctggggtactgtgtaaaaatgtcacaagccagcatgtccacacagagctgccagtaatgcacaagctgaagcgctctgtacttcagggtgccttcttcacctgcattttaaagagtctctgaatttgaattttgaaaaatacatctttattttcatttgtcccaaactacatgttagcagttcgttcaattatgagtacaggcaataagcctcagtggtattagcagaccagtgattttgtcaccaagagaattcctatcaccttactgttattgcagatatcttgaaatatttacaatattgctactaaaaattatggcagttattagacctgctgccagatcttgttattgttaccaaataagctcttaagttactgtagcctatatattttatcttacccatttaaaaatatcatgttcagatgaggtccataggcttctgctgtctgctaaacgcgttctttgcagctgagcagcacattatttcatgaagggagaacccaccatgccacctccatgactgtccccatctaacttttctactttggatttcaagtagacacacgcaaagacaagaatgttcatgaagtcatatgtaatcatattgtctttatgatcatagggtttaattcattgtgtctcttataaaagagtgcctcctaagaatttaccctttaagaatgtaatatagtaccttcagaatccatttaaaatgtagaagagacaatttcaaaggtccacttttgctccagcattcagtgtcttaatctgttgtgtatttcataggtgtttggagcctttaatttgcagaacttagaaatattttttatttatgtatttattgatttattttagagatggggtcttactgtattgcccagactggtctcaaactcctgagctcaagcgatcctcccaccttggccccccatagtgctgggattataggcatgagccaccacacccggccctagaaacattaaactttctaatttctggcagagatcaatgttaatataactaaacaaatgttacattgggtactttaaaaaccattcactgtatcttagaagtaatttttatttcttagaattgcatttaggctcccagttccctagttcattccacactcaccagacttcatgtcaaggaaactcagctgtgatttaggcatcagacttatgatgagaagcaaggatttctataaagaaaggtcattttgcatccttccaagttaagattaaagttttcatctttgcattaaatggctgtgagaaaataaaaagcatagcattaaaaatttagatcagtgcttttcaaagtgtgggtaaagtatttactagcttataataattaaggagtttgagctgggtgtggtggcccacacctgtaatcccagcactttgggaggccgaggtgggcagatcacctgaggtcaggagttcgagaccagcctggccaatgtggcaaaaccccgtctctactaaaaatacaaaaattagctattacataaaattattgagattttatgtaatagttaattattgagcatgcctgtagtcccagctacttgggaagctgacgcaggagaattgcttgaatctgggaggcagaggttgcagtgagccgagatcgtgccactgcactccagcttgggtgacagagcaagactccatctcaaaaagtaataataatattaagtttggaccagaaattcacacagttacttcactaagcacattgttttgttcagctgacatatcttttgtaggactttctagatgaaggaagcagtacattgcattgcattctggaggaagtttgctatctctgtgagcaccttgaatagcactccttaagttgcaatttcagcatgataatcagtaggatgtccgaaagttgtggtttaccaacagggattactgtgggattcagagaagagaagatagtttcatgctagggtggtctttgaatgctttaaggactgggcaaagtttgacatgatgcttaagaattctctaggcagagagattctgcagggcaatcctgtggataaagaatgaaagaatcagccgtgtgttgagaatgtagagggtgtgatgggaaccatgaatctgaggaaaataggaatctagaaaagtagcagtgtcatgaacctgaagaagtagactggagccaaatcatagaggcctgaacccagataaaggaatttggagattatttttggagggaaaacaattaaagcacttgacccagaggaatgacccaatcaaagtatgttttaggaagactggtctgacgttgctgtgcaggctacagtttcactgggaagaagagagaggcagagatttgttgggaagctgtttgcagagtttccaagtaaggtgataaagtcttaactacagtaatggtggtagggggaaagaaataaaccagattccagagacatttctaaaatgattcacataactgagacttacaaggcacagggaagaaccaaaaacaaccaagatatgacacttaagcaaatgaataggaaatatatgaccaaattcatcaattttcagattgccttgtgtacacatgtatctagtattgtgctagcaataccacagtaaggaaaccccagtttcctttctatataaaatgaaaattttagttcacccatccagctgctagggcgttttataattagggccaggaagaagaactggattaggctaggaagtgaatttgtctcaggttagagaaataagagtttaattgttttatattttaaatggctttctctttcccaaggtgctgatagcttattggatataagttctgaagctgaccaacaagatcttctctctctattgcaagcaaaagttgcttcccttaccttacacaataaggagttacaagataaattacaggtatataaatagattgctatcatggactattctgtagagtcaagctcttggtcttttcagtagtcagatgtattttgttttaaatgtgtacattagtttctttttaaatattagctttaagcatcttatagtttcagattatttgtttcatgagagtgttattcattaactctttctgtaaattattcaactggtaaattataaataattatacacatagtatgatcagtattaaatattctatatgtttaataaattatataaataaaacaaaatttatagaaaaaattctatataaaatatactatatgcatagaatgatgcataatatataattttatattttgattttatatatattaaaattttacgttttaaattatatatgtatgtgtgtatgtatatatatatatatatatatataaaatattatccatttagtaaagttgatcatttaacaggtttaagtacttgataagaaatggctgtaccaaaaaataagaagaagaaatagctgtactatatatccattacccctcttggcaagtagaatgatataagaaataaaggaaatttttgaattggaggctttgtagagaaaacaattttagtgttttcaaagtgacacaaatcgtctgtcccaatagaacccaaagcaagctttgtgtcattagtcccactcatgtcccagactgtcttttttcatggcatgagaatacacaggcaaagtgatcatgctactctcccgtaccaaagttgcggatttactcctctcattctagttgcttgcttagctaaccacgcctttggtatctttttttttttttttttttttttttttttttttttttgagacggagtcttgctctgtcgcccaggctggagtgcagtggcgcgatctcggctcactgcaagctccgcctcccgggttcacgccattctcttgcctcagcctcccgagtagctgggatcacaggcgcccgccaccacgcccggctaattttttgtatttttttttagtagagacggggtttcaccgtgttagccaggatggtctcaatctcctgacctttgatatcatttaattcttgcttttttttcctaggccaaatcacccaaggaggcggaagcagacctaagctttgactcataccattccacccaaactgacttgggcccatccctgggaaaacctggtgaaacctctcccccagactccaaatcatctccatctgtcttaatacattctttaggtaaatccactactgacaatgatgtcagaattcagcaactgcaagagattttgcaagatctacagaagagattagagagctctgaagcagagagaaaacagctacaggtcgaactccaatcccgaagggcagaactggtatgcttaaacaacactgagatttcagagaacagctctgacctcagccagaaacttaaagaaactcagagcaaatacgaggaggctatgaaagaagtccttagtgtgcagaagcagatgaaactcggtcttgtctcacctgaaagcatggataattattcacatttccacgagctgagggtcacggaagaggaaataaatgtgctaaagcaggatctgcagaatgcattagaagaaagtgaaagaaataaagagaaagtgagagagttagaggaaaaactggtagagagggagaaaggtacagtgattaagccacctgtggaagagtacgaggaaatgaaaagttcatattgctctgttattgagaatatgaataaggagaaagcatttttgtttgagaaataccaagaagcccaagaagaaatcatgaaattaaaagacacactaaaaagtcagatgacacaggaagccagtgatgaagctgaggacatgaaagaagccatgaataggatgatagatgaactcaataaacaggtgagcgagctgtcacagctgtacaaagaagcccaggctgagctggaggattacaggaagaggaaatctctagaggatgtcacagctgaatatatccataaagcagagcatgagaaactgatgcaattgacaaacgtgtccagggctaaagcagaagatgcactgtctgaaatgaagtctcagtattcaaaagtgttgaatgagttgacccagctcaaacaactggtggatgcacaaaaagagaactctgtctctatcacagaacatttgcaagtgataaccacgctgcggactgcagcaaaagagatggaagaaaaaataagcaatcttaaggaacaccttgcaagcaaggaagtggaagtagcaaagctggagaaacaactcttagaagagaaagctgctatgactgatgcaatggtacctcggtcttcctatgaaaaactccagtcatccttagagagtgaagtgagtgtgttggcatcgaaattaaaggaatctgtgaaagagaaagagaaggtccattcagaggttgtccagattagaagtgaggtctcacaggtgaaaagagaaaaggaaaatattcagactctcttgaaatccaaagagcaagaagtaaatgaacttctgcaaaaattccagcaagctcaggaagaacttgcagaaatgaaaagatacgctgagagctcttcaaaactggaggaagataaagataaaaaggttggtgaaactgtattgctgttgggtttctagcaataagtcttagtctctttggcttttactatattaaatatttctagtgttggcactaaactggagtgaatgctcagaggctctgcacatgaactttatctgtcaccaaagccacattaagaatagtttgttgggtcggccggacgtggtggctcacgcttataatcccagcactttgggaggccgaggtgggtggatcacttgaggtcaggagttcaagaccagcctggccaacatggtgaaaccacgtctctactaaaaatacaaaaattagctgggcgtggtggcacacgcctgtaatcccagctacaagggaggctgaggcaggagaatggcttgaacccaggaggtggaggttgcagtgagccaagatcaggccactgcactccagcctgggcaacagagtgaacagacttcatctcaaaaaaaaaaaaaaaaaaaaaagaatagtttattgggtatttgtattttaaaaacacatctgctgggcatagtggctcactcctctaattccagcagtttgggaggccatgatgggaggatggcttgagaccagcctcagcaatatagtgagaccccatctgtacaaaaaatttaaaaattagccaggcatggtggtatgagcatgtagtcccagccacttgagaggctaaggcaggaaaatcactagagccctacaagtcaagactgtcatgagccatatcaacaccactgcattctagcctgggcaacagagtgagaccctgcctcaaaaaataatcaataagcaaacatcaatcttcggccacttctccttatactaaagcattttcatatatctgtcctttaaaaatcattttacagaagctttgccagtattggggatcagaagtgaacctgcaaactggaaagtatttgtgatccacctcaaacttcaggttctttttttggattcagaacagattcctccataatatgaaactaaaatactcctagacttaatcctgtttccctaaggtccatgagcttcccctcaagtcactgtaaaagctaccctcgccggtccctcctttgacaggtatataggagaggaagggggaggaatgtggggagccggcaatttgagatggcgctggacacaagagatggtgctggccgtgctgctggaggaaggagggaagcaaaggggaagttcagggggatggttccacgcctcaatcggctctgcatctctagtcccctgtctcggaggttccgaatagcattcatgagagactacttgtctttattcttttgtaatgagtgtttcaaaagagctttatcatccaggggaacagggattagggagtggtggggtacggtgaggagttagttgtgtttactttaaagaaagacgtccagagatatcaggcttcctagaccttattcctgatcacccatgtcagcagtattggacaaaatatagctgtctccaaataaaagcggaaatcctaattctgattttttttttcaatcatacccattttaagagtaaaagtaggaaaccaacatcacagcttttgttaccgccatcaccaaaacataatatgtaattcaagggcctttatctgaacctaatggatgtagcgggctttgttagtttgcctgattttgtcatccatttcattttatgagttttttaatttaaatgtattaaaaaggaattgttccaaagtcttaagtcccagaggccaaaagagatgactatgtttgaggcttacaaatatatgaaattttgctttgtagacatgttactgtctgctaataccattttcctttgcccctagataaatgagatgtcgaaggaagtcaccaaattgaaggaggccttgaacagcctctcccagctctcctactcaacaagctcatccaaaaggcagagtcagcagctggaggcgctgcagcagcaagtcaaacagctccagaaccagctggcggtgagtgggcttgtttctgctgcctggtttggggtggagggcctggcagatttcctaccatctcagctgctagggcaagtgggcgtgaacaaaaagattcccagcccaaaggaatgtacttcaatgagcagttgactgatttcttcagtgagggcaaaagagggagccactggtggaattcctggtcgttatcagcaatgcaacgggtcagatattcactgggaaggaaagaaccgacaggacagtaggaggaggctatgtgctcactcataccctaactttttaccccttctcctttttctgcaacagtctttccccatctctggcagtggcaagagctttttcttgttaggggccaggatctctagtagttgcatctctatatatctgaagctgcttcttggcccctctccttatttcacccaggaaagcccttgcttatctaaatttgtttcctgggtccattgtaacaaatcaccacaaatttggtttaaaacaacatgagtgtattattttacagttgcattgaactgaattccaaaatcactttcactggactaacttcaagttgttggcagggctggttcctcctcgagaccataggagaaaatcaatttccttgccttttccagtaccagaggctgcctgcattctgtggctcatggccccttactccatcttcgaggcacatcactccagcatctgctcagtcttcccatctcctccttcagcctttgattttcttgcctccctcttataagggctcttgtgattacatctaaagcccacctagataatccacgataatctccctctccatctcaaacccttaatttcatctgcaagatgccttttgccatataaagtttaacattcacaggttctggggattaggatgtggacatctttcaagagccattatttagcttaccacaatatctgttaaggtttgagttggcatgggtacattccgttttctacctaaagtccagggttagtctgtcctggactgtctctagcttccatatacaaacagaacatggatttgatgatttcttcggaatagacctaactgtagtgaattcaggtttctgcagtccttactctggctggccacaaagttcaatgctagctttggaggaaacagctctagaaatggtggatacttaggagaagctgctctttactgtgttctgcaggtcattcttctcctgataaaatggtattacagacttgtagataaagtgctattggtttatacagtaattcttataattacgcaacatgtgtttgttgagctcttacatcagtattatacatggggctgatgatataaaatgagtaagactcagtccctgccctcaaggagtttatactctatataagttatcagcaaagagatgcccagcataccgtgggcatacaaaggaaatgtgtctacccaatcttgctgagtcatgaaaaggttcctacgggagttacacttgtgctgagtcttgaaggcctgagtaagaatatgttgttacttagcaaggactgacatatggcactagctggcttttgggaaccttggtgagaaccattccagtggagtggggaggagggtagaatctggaccgcagtagactggctgctagagaagtaagtaagtagataggtatctggtggggctaaccagtcgcagtaggggttgggggaagcctgaagcaagcttgctggaaagatgggaagtggtggttagggtgtgggatgctttcagttgagatttcagaggtggtaatgatagaggcagggctacaaccatgacaggagttgctgaactgaagaggagcatgttattaaagctgaagttgaggaactgagaggtccaggtgttagatggatcattcacacagatatcaaagccaagcgaatgatgacagaggcagtgatagaaaggaagccagatcagaagataaaatcataaataattgagtagaggttgctgaaaggtggggagggaacaacacagagaaatgccaaatgtgccttcttatgatgtgaacttaaaggacgggttttaaaatgtcccttaataacaggaaagatacctcatactctgacactgatggggggaaggaagaatgggtattatggacttttgtacatttttgaagtaatccatatatgatggtctcaattttcatgatgaattaggaggacaggttcttagaacaagagtttcagagataagacccttgaaacagccactgagaggaactggagtaatagctcaacaaggagaaatagaagcatcagcggctgtattgaggaaccactggagattggggccaccaccctctttgccttcttagtacactgatagctaaataattgagctccccaaggattatacaatgctggccatatagtgggtaatcaataattcccttaaaaataataggctttaaaaattaaattagtacatatttggtcattgtagaaaagttgaaaaataaagaaaactctaacaagttcctataaataaaaattttccataattcaataactctgagataatcactttttacatttgatatatttccttgcagtatttacatttaatgtagctgtatttgcataagtatatgtacatatatacacacacatatatacatatatacacacatatatagacacacatacacacacacacacatacacacacacatatatatatatattttgagacagagttttgctctgtcacccacgctggagtgcagtggcgtgatctcggctcactacaacctctgcctcctaggttcaagcgattctcttgcctcagcctcctgagtagctgggattacaggtactgactactacgcctggctaatttttgtatttttagtagagacggggtttcaccatgttgtccaggctggtctcaaactcctgacctcaagtgatccacccacctcagccgcccaaagagcatatatttttaaaaccaaatgtggggtgataataactcctttttatacagttttttctagagttgacataccaagacttttttccctaagatgattgacaagtattcagaaatacacaagccagtaaggccacaacaattttagaagcttccagtgctagcataaagtggaggggaccacttgggtagcatttggctgcagctttctcatagttttttgtttttgttctttaaagatctcttaagctcattaataatgtgaaatattccctttctaggaatgcaagaaacaacaccaggaggtcatatcagtttacagaatgcatcttctgtatgctgtgcaggtatggttatgccccttgaagtatctggacatcctaaagaaatacggcagcagatgttgacagaactcccatcatttaactaggagaatgaacaagaattagaggagaatccttttcactggaaagcctgaatatgccttttgcattgctttggattctgtgtcaggagccttgtgccctgtttaccaggaacagccccatcttttaaagcagggcctcactctgtcatgcaggctggagtgtaatggcataatctcgcctcactgcagcctcgacccacgggctcaagtgatcctcccaccttagcctcccaagtaggtgggattacaggtacccaccaccgtacctggcaaatttttgtatttttgtagagatggggctttgccatgttgcccaggctggtctcaaactcctgagctcaagcaatccacccgcttcggcctcccaaagtgctgagattacacgcatgagccaccatgccccaccctcccatcatttattgaggaatgagggatgatgtggtcctccactgggaagacgggggctttattttccagcaatgctgatcttcttagttaccagtgctgccttggctctatgatgcttggtgttctggctgctggactcacatttgcaactgagaccccagatagcttttgctgagggttttggtagacactgccacctcatcttccagctggataaaggcagggccctttctttgactcagttcctcatagaaatttgggaaatgatagggctgacattcctgtgaaagatgtgggaattagcccaggtcttcattgcagtcagccatctcattccccagagaagaaagtgccatggcttaatttaggttctaatgagtatcttgtgtttgaatatcctagggccagatggatgaagatgtccagaaagtactgaagcaaatccttaccatgtgtaaaaaccagtctcaaaagaagtaaagtggattccttggcaggacactgccccttgtcatctgtctttgtgttagatccagagttgtcggcagccgctgccattgttctcattcgtggtatgcactgtggcctagcgtagcttcttccctttccaaaggtttctgaggacttctcccaggagaagactgcccgcctcagaactgcttagagacttcaaaccagcagaggtgaaagtccctgtcatcccttcagattccagagctgggatcagccatgcccagaggtctggtcctgatgctggcaggggggccccctcctccatccctgactggctgagtggctttatcaccaccgagtgatgtgctgaggcctcctgcagtgaatgctccttccattcctgtactcgggcagtgccattcagcacaggagagctctttttgcctttggctttcaattccaaaacatgatttaatttctaactaaattagtatggcactagttatgaagtatctgcttaaaacccttcatcatgatatcctgtggatttaaaaactctaattccatgttttcttcccatctgccttatatatctcatcaccctgcttatcaatattcagtttgatgagcactattaactaaaatatgaaacttaaaaacaaaagcaagttgtccttaaaagttctttttttaagtaaattgttgacatactgcaaattttctatgcaaacttgcctcctgctgttatctgtgaagctcaggaaatccaaacatttgtgtttcaacaagggacagtaaactgtgtgtttacagccaaaagaaatgcctcatagttcttaacctcaacttttgtagaagtatttttttctctgtaatatttttattggctcataaagatgttttcatatctgaactcctaaataagtgaaattacagtagattatattaacaaaatactttttaggtagccatgcttgagactttttaaaaatataactttttccttaaagttttcagctatagcaaaaggtagttatgtatgccagacctaatatgagctgccaccaacacccctagaactttcagccatggtgtcttcagaattgtagcgcatttctgaatctagcaaatcctccttttacccgttgaatgttttgaatgccctgactctaccagcgcccataaatgatctctagaaggactgttagtaccaatctgtttttcaactttgaagctaaaaaccctgatatggtaatattatggtgcatagcagaggtctcggaaaaaaaatatttctgttcactttactttcaggttaaaaatgtttctaacacgcttgcaacttcccttatggcattaatcttgttgagggagagagacagaatcctggactctccaaagtatttaactgaaagtagggcctgctctgacagggcccatgtcccacaaggctgcttggcctcagtgggtgcttggctgtgctggatgatatgttgatctgtattggataaggaccaatgacagcaaagcaaaaatggctttaaagcttggtgttacttttcttaagttgtttaattatagttaagcaatttcaaaaatgctccaaagaaatgtgaaaggaccttttgtcacagcacttcagaaaatacacaacagccccttctgcccccgcacagaaatgctgcagagtatataaaacttgagacatttttgtaggatgcctgacgaggtgtagccttttatcttgtttccggatgcatatttattacgagtactctggttaaatattgaaaagttatatgctgtagtttttagtattttgtctttgtaatttacagaagttattggagaaaataaacttgtttcattttgcatttctggtgttgatttttggtgtattcagaagcatatctgcgtggcttctgaagatcagttcaatagcatttcagtgtaataggttttctagtctgtgctatgctcagctggtatgagttgtccgcactgtctcacacaaagtctcacatcatttccttttcccagctcttggattcgccctgagctctgccctgagtatcagccgctttggggcagttgaatcacagttgcctttaattcacaattgcctctcatttaatctgcagtctgtttaactgtttggaagcctccgctggattttttttccctcttgcttcttgctttttttgaaaaagtaatacatacatatgtaaaaaaaaaatccagatacattttcctgccccattacaaagacaattcaattaattcctgacaaaactcttgtcaggtgaattctggcaaggttaaaatcataattaaaattgttgcaggttataatcataatcaaaattacatgaaataggtacagctacttaagaagttagcattgtttatcatactccaatgtaacaaggccatttcccttcacttacaacatgattccacctctacttcagtttcattgtgccttcctactataccctgaaactttatttcaaagaaagcatgtgtgtgatactcaactgaaccttttatttcaactgtggccaaccagacaactcagaaggtgacttcatggggacactcagctggagaggaaactgagataaacccaaaccagtcatctctgatggacagaaacgcctcataaggcaaaattgggatatgaaaagaaactctcctgcctccacaattagatagcagctgagattgtaggacaaatgaaaggaaccacaaataaatctttctcttactccccaatccttagtgcatctacccagaagcaacatctagtaagtttcttcggtgacctgagacattctctgtctatatgtacatgtaggcatgtatttttctttcttctttaaatatcttggatattattctctgtcagcatacacatctcattctttttaactgctgaataaaattgcatagtatggtgctatattttatcttgataattccacattatggacatttaattgcttccagtattgcagctacaaaaatgatgcaattgactatcctatgtatgtatgtatatctttacacgtgtaaggattttttgaattttcaaattgctcatttttacattagcttccatcaagatatgggcagaaaaaaaatgaatagaatattgttcgtatcatcacattgagaaagaatggcctttcccttcatgttgtttgaataagagtcattaatttgttttccttacatacactttaagacaaactccaaagcctttaataattaaacccacccatcttcagataaacacatgatacgctgtgaggggaaaacactccctgaacatgttgaagcacaacattttgcaatgcagcataacaagaatattgagtgctgacagtagcagaaacattatgcaacaaagattggggtcattttttgagcaaagttaagcagcagactgcaaggccaagagtgagctggaaaaagccacagaccaaagaactagggctttcacaagagtagcaattttctattcaccagatcagggcagagatttgtcaagcattatgggagcgtgtgacatatttgagaaacaaaagaacaaggactcagccataggagctgggcaagggaacaatcaacataggttccagcagatggaaaggctcctttgagaagtaaagcccccacgaggcgagtaggaggaaagcagagacattcctgcatacttactataaagcaggctctaaaatgggaagaaacagcatattcaagaaccgtaactggatgtaccagattataaagtggaggatacataagagtattagtccgttttcatgctgctgataaaaacatacccaagactgggcaatttacaaaagaaaggtttcatggacttatagttccacgtggctagtgaggcctctcagtcatggtagaaggcaaggaggagcaagtcacgtcttaaatggatggcagcaggcaaagagagagcttgtgcagggaaactcccgtttttaaaaccatcagatcttgtaagacttatccactatcacaagaacagcataggaaagacccaccctcatgattcaattatctcccaccacgttccccccacaacatgtgggaattcaagatgagatttgggtggggacacagccaaaccatatcagtaagggatggaaagaagcaggacacagtcaaatgatgcaagctgctaacagccaggagaagagggctccttatgtgtcacctccatatgtttttaaaaccatgcatttaagttacacactctagtaggcagaataagtcctcccaaagacatccatgtcctaatcctcagaacctgtgaatatgttagctgtgaatctaacctgtgaataagttacatgacaaggaggaattaaggttgctgatagaattaagcctgctaatctgctgacctttaaataagattatccaggtgggcccagtataacaagaggggtcttttaaaaatggaaagaagggtcagagatttgaagatgctgcattgctgctggctttgaagatgaagagaacaaatcaaggaatgcagccaggctctagaggctggaaaaggtaagaaaaaattttctccttgagctcccagaaggagccacccttgcagacagcttgtctttagcccagtgacacccatttcagactttcaacctccagaattatacaataataaagttgtggtttgttaagccactgagtttgtggtgacattacagcaacaataggaaactgatacacacagggagaatctctactaatggagttcctaaaggtcatttgtagtttatgtgttttttttgttttgtttttcttttttaacactgatatatcccaggcactgtgctgaatgctaaaggctcaatgataacaactcctgctcacgaggagctcatagctggccaatcagggcctgctacctagcaggtattctgtattcactgagtgggtagatgaatatttagacggatgaattgcctataaggccctccatgacctgatgccccaccactttactgacacagtcttttgtctctttcctcctcattcttactacccttggctgttctttgaccccattaaacttgttcctgcctcagggcttttgcacttgctgttaacatcttagaatgttcttctcctaaatatttgcacaatttgttgcacgatttgaggtatcttctcaatgtcatcttgtcagagaggccctgtttaactacactatgtaagatggcacacccctcccgccatggccacatcaccttctaaatcccttacctggttttatttttctccataactgtttatcatgttttctttttcttttttctttttttttttttttaagatggattcttgctcttgtcacccaggctggagtgcaatggaacaatctcggctcactgcaacctctgcctcccacgttcaagcaattctcctgcctcagcctcccaagtagctgagattacaggcacccgccaccacacccagctaattttttacttttagtagagatggggttttgccatgttggccaggctggtctcgaaatcctgatctggtgatccacccgccttggcctcccaaagtgctgggattacaggcgtgagccactgtgcccagcccactttttcttaaggtgactcttctggctaagggagtcagtgagtcctgaaatccagcccactctctgttcccaaagctgtactccttagcaggggtctgagtctggctggaggaaaaggctttttccaaattcatacactgtcactgcatactccctaagccttctgcctttttgtaacttgcagagacaccatactgtttactagcagctctgtttttcttcatctagtagaatataaattcctggaaagcaaaatcattatcttatttgttcacttttgctttcctactgcttagaacattatctggcacatagtaggtattccacaaatatttttgtctgggtggatggatagatgtatggagattggagaaacttgcaaataaacagaagtgccagtacaatgtgagagtcatgatgagattgtggacagggtactgcgagggctcagaagcaaggcatctaaccctctcttgagaggccataaaaatgtgttccaagcgaaagtttatttggatttccttgccttaaatttcacagttcctgggataagaatagcttggagataatcacatttgatttggggttgttagagcctagaaaaaccccccatactgcttcctctatgcaatttctgcaatagcaatgcttgccacctctacctccggatcaggggagggaatgtgaatacacacggtggaaacgcactatccacttagattagtgggatgccattctagagttagtgaacaaacctaaaagtgtatatactacaactaaagcttacatttgggggacagggttaacatgacaaggaaagaaataccaaaaaacttcaagagtcctcaaagttctggctggacggtggctcacacctgtaatcccggcactttgggaggctgaggcaggcagatcacctgaggtcaggagttcgagactagcctggccaacacagtgaaaccctgtctctactaaaaatacaaaaactagacagacagtagtggcacacatctgtaatcccagctactcgggaggctgaggcagcagaattgcttgaacccgggaggcggaggttgcactgagccaagatcacaccactgcactccaacctgggccacagagtgagactctgtctcaaaaaaagaaaaaaaatagtcgccaaagttattttattttgatttataatttttacagatgcaggcaacatgcttccggtcagagctaatgaaatggaggccgaattagagcgttggctttaggaatgggaattcagtgcctgttctggttcttctctccacaattatcagcaaaagcaaaggtttagaaaagagacattacctttaatatacttagaaacaatctcacagccatttcctagaatgaaagaacattaaaacctttcaatttgatgaccaacttaacaaggggtaaaagaaataaatgttggagaacaggaaacaggttcttcctttttactcccatacatgttaaatactgttcatagagtcacaaaaatcgtttaccccttacagaaacctggaaccagaaggcgcttcagaaagcaagtggtacaaaaactttcaccgtataggcaagaaaattgggacccactggccgtgactcggcccaggctacagagtcaaaaccagaaccttgacattctgaaatcaggttcattgctgtcatcattgttccatgctgagagttttcttaggaaaaagaataaagtgggggaatctttccaaaattgtgactatggagctcgaaagtacagatttaaatcttgagttaacagaccatacaggttttacttaagagatattcaagcaaactcatttaaataactcctccaacctaactccaaaaaggctttcttggcagtcttggatcaatggcaattaaacttccagcctagagctggaaataacaaacaccaaacgtaaacaccatctttcacattctcaatgttctccttgtctctctacctagtctgctcttttctgaaaacaactgggacacattcactccaacttgacttgccataggcctagtctatgatagggttcataataacatccttcaacatagcgttgcaagagctggcgctgtttctttgggtatggccacaattgcctctgcaccttgtgtgtattacacacactgtattccatgccaacgaaagggtaagatatggctgcattatttagggctaagtgctaaataaataatgaacagctaaccattagcagatctagtagtcgatttcttaccctactctcttcctgcaatcagctttcctaaccatgcctagctccaatcttactgggtaacacagacggtgccagcacagtcaacagccatatctaagcctttcctctggggtccataaaaacaaaactcccgaggagctgtgggggtgcaccgtggccaggatcgtcgccgaatacagcccgcacacgtcgcagctttaaataagtagggccgtggggcccggcgctcccttccatccttggacggaatgtatcttctcttcctacgccttcacctccgaggggtaaggtctcgtgagatacaatatgcagaggccagttttggggcgagccggaggccgggcgcgtctaacctgcggggaagggaaagcggagggtaaggcaagggctgctgtaggcgccagacaacagggactctccgaaccggaagtgccccgcgtcgccatggctacaggcgctcccagcagaacccgtagcgttccgttcccatggcaacggtattgtctccttggccggacctgggctgcggaaggtaactggggacgtcgcaggctgtgcagctttcgcgaggcaccgctttggcgcccggaccgaggtgcgccagggtcaggaggccgacgcagcgggaggaagccgcgccgtcgggctcagggagctgggaggctggttccggggcgtggtttctccgccttgagccaggtgccctttgcgcactcgcgcgttctcttagagcctccgcggcagagaggctctcagagctcgacctgcggcgtcagggcttacagacttgccgcagaaccacagcgggaaaagaggagcgattcgtccttgaggggctcagggccgtgcggaacgtcataggaacagagtccgggagtttgagagatcagaactctttgctgtgggcatagtgtttaaagtggaggttaaaaagagaaattagtgactctccctttctgattttcggataatggatgctctggagcctgggtcagaaagccactcagggctcggtgggaattagtgattctggagggtgaaaggagaggcgacttggtggatgttaacattcaataagtaactgcgttcgatttgggtttgatttaagcgactggcatagccttccttgagagttgaatttcacaaatactgtatttagaaatcacatttttcgttttgtgcttccgaggtttctcctatcatctaacagcaacaactaaaacagacacatgaatttcattttattgttttattttattttgagacggagtctcgctctgtcgcccaggctggagtgcagtggcgcgatctccgcctcccgggttcaagcgattctcctgcctcagcctcccgagtagctggaactacaggcgtgcaccaccacagccgactatattttgtatttttagtagagacggggtttcaccctgttggccaggctggtctcgaactcctgaactcgggtgatccacccgcctcggcttcccacagtgctgggattacaggcgtgagcctctgtacccgcctcgtgacccctgtactagaatctgctattaattagtgaaatgaccccgggggggggggggaaagcagaattaaccaatacactggctgtgcttcgtttaccactgagagttggttgctttgcttaaatccaacacgccgtcagacctgcaaaaacaatatctgagttaagtaggtgaccatagttttgatgacccaggaactgtaaatgtgcttgctttgagacataaaggccagggattttggagaagtagggtggagttgaaattaggggaaagaaatttaacttagacatttaatttggcaaatgtctgttttccagcggtctccatatctaagtatgcgtagtctgtggatttaggatgggttatatatttgagcagttttagtttaatgttaatagcaaaccagagggggaaaatagaacagacacccagccttttctctcaaagctgaccttacctgattcttggtaggaagaagatgcaagccagccccatccgtatcccaactgttagcaatgacatcgactgggatttctgcttccatatgtaagtatcacagcattttgacatcacaggtacttactgggctgaaacactgggacctcctgcttaaggcaaacctgggtgaggagctttgcatgagaagcgttcacgaccagcctgaccaacatggtgaaaccccgtctctactaaaaatacaaaaattagctgcgcggtagtggcacgcgactgtaatcccagctactcgggaggctgaggcaggagaatagctgaacccggaggcagaggttgtggtgggctgagattccatcactgcactccagtctgggcaatagagaccctgtctcaaaaaaaaataaaataaaataaaaaagaaggttgtgtttctgatgtgctttaataatgattctgctataatatctgtttgtatttacaacctatgcatgatagaagattgctttttcccgacttaaggaaattttaaaagtttttaaaataaaaataggttagttataacaagattggcaaaattgtagagagttagctataacaaagttaatgagaaaatttttatgaaatagagtaaataaaactttcgtatcgtctaatacttattgagcacatactatgtgccaggctctgttctaagtaccttaaacgtcttagctgatttaatccccccaagccctgtgaaggagttactgttattggtacattttatagatgagtatgaatcaaagagatgttagggagtttgcccaaagttgcaaagctagtaaatggtatttaaactgggcattctgactctagaatccattcttgttttgttttgtttcgtttttagagacagccttgctctgtcacccaggctggagtgcagtggtgcaatcacggctcactgcagccttggcctcttaggctcaagagatcctcccacctcagcctcctgagtagctgggactacaggcacacaccaccatacctgcctaatttttacatttttgtagagatgcgttctcattatgttacctaggctggtctggaactcctgggctcaagtgatcctcctgcctcagcctctcaaagtgctgggattacaggcatgagccactgtgcccaggtagagtccattctttaaccattctctatagcagggtttctcggtctctgcactgttgacattggggttggataactgtttgttgtggagggctgtcctatatgttgtaggatttttagcagcatccctggccaccatccactagatgccagtagcactagctccagttgtgacaagcaaaaatgtctctagatgctgccagatttcccctcggggcaaagtcatccttagttgggaaccattgctctataccagtgtcatcaaatagaaatataatgcaaaccacatatgtaatttaaaattttctgctacccatattaaaaggtgaaatgaaacacatgaatttaatttcaatactatattttatttcaatatatacaaaatatgctaaaattattaatgaaatattttatctttttatactctttaaaatacagcacatattttacatttacagcacatcttaattcagaccagcaatatttcatgtgcttgatagccacatgtggctagtagttaccaagttggatagcatttttttttttttgagacagagttgtggagcaccagattctgttgctgtttggggggcccctatgtaacctgccacaatccctggtggactgaacaaaggaggggtgaatgtgggaataaaagacaagagacaaaagagtatacttggaagaaggggtcagggggcaccttgcctctagtggacgaaggccctgagctgtacacagccctctgtatttattaggcaaaagagatggtgagaaggggggtggaagaaggggtcagctgcttagtccagagtaggcttgcaagacttcattcctcaaacaacaggctctagatgtcacagtagataacctcagcgctagggagtgattgcctccagcaaaccctctgtcggcaggagcactcgtgagtttgctcacatcctgcattcatgataaacagtttgctgtttgatcatatcgtctccagtggaatgctgagttggtcacatcccatgggccttcggctcccagcacagagtcttgctctgtcacccaggctggagcgcagtggtgtgatctcagctcactgcacccttcgcctcctaggttcaagccattctcatgcctcagcctcctgagtagctgggattacagtctcactgtggtattttttaggagatacagggttccaccatgttggccaggctggtctcgaactcctgaccgcaagtgatccatgcacctcggccttccagagtgctgggattagaggtgtgagccactgtgcctggcctggatagcataagtttaaattcataaaatatcttaaggttaagggttatatgactataaaaattgaagttcataaaaatgtcaagttcacagtaaaatatctgggaaataatcggataatttatatcgaacattactaatcagaattcctattcatgatggtaacatatggaatcaattataaacctggcaaggcagaccttccattcaacctcctattctttttattctgaccatcctttgagatgtctgactggtcaggattctccagccatctttctcaccttctataacatgatgttcaaagctagttcagggatttacattctcaaatcatttgtcaagacctcaatgtttctcattcctttgaagtccctgaggttgaagcttgccacctttggtcttaccttaatgttattcaaggcttaatttaaaatatttcgggcttataatttttactatccataattagcaatctggtgactccaatagatttaacttctgctctaggtctgtgaaatatgcagcttaagcaaaatttgctattgagatatgatctcttttttttttaactgccccttgcagaacagggctagctcataggcagcatgcccagagtcagccgacttatgatctcttgccacagatttcctctctcctcaatatttttcaaacattctaaagactgcacattcttttctcattcatttattcatcatttaacaggccattatttgtttttactatgagccagatatcaggttttcagaaacaaatgaggctcagcccctgccgtattggagtttactttgccagcaggcaaagaagactcagaaacaaaccaaagaaacaacaataaaaaaatcaaacaacaataaaaaaaaatcacagtgtactagcagtttgggggaaatttttgaaagccctttggaggctgcctttattgctactccagtgaaagacttccaggaatgatgacatctgagttgtgtctcgaaggaggagtatggaattcaccaggcagagaaaaggaagttcatcacctgtcttctgatcaggtcacatccccaaccttccctggctgtcccatcaaattagcttgtctactgaaagcacactcgtctgtgggcagaaggcaagcctgcctgcgcttgggcctcaagaaatgttgcttccctatctacacaacctggtttgcccacgtgcctcttgataagttaattagaatagaactctagaaggatattagcatgtcatttttcaaacctggtgtaaaagattacagttggcatacagctcttaaaggtggcacagacccaaagagtgagcagcagcagcaaaaaaaaaaaaaaaaaggttacacttggcagttattttcttcttgtgcttttctgattttttttttatttaaacattgaacattcactctttaagctttttgtgcttttctgaattttctttttatttaaacattgaacattcactatttaagcaatcagtggaaaagaaaagtaaattttattttaaaaactactcagtggctgaacttttgagttattgtgagtataaagatgagtcctttgggagacttatttatacttaaaatttctaccgttgctcctaagatctcaaaattctgtttcttctgtagcactttattgatttttctggtgatgttaggatatagttctttttaacacaactagggatatttctcctctgaatctgcacttgatgtagcgtggggttccctccctgtctctggtgggacccgtgtcctcttttcttggccaccacatgttgaagcttttaagatatgagaagacatgcaaagtccagcctcaaaatgttggtttcctttcccttatttcattgtatccattttctttccttgcttggatcagaattttagaacacagatattcctggggatcctccagttcaacaccctcatttgtagaagaagaagccctgtcctggagctaatgatatactaatagctaacatgaaaggaacacttagtgaatgtcacacactgtgctgatttatgagtattatctcatttaatcccataacctcatcaagtaggcatccatattctcattttacagagaagtaaattaataacttggttagggtcatgtgattagtaagcagcagagctgtacctctataaatcggcttcttctgaactaccacattgctgtcttaatgctaggctttgagggcgacgtgagtttactgcctagctttattccttccggtttatgttagaaatcatgtccctatcccctagttgggagagctatgcccttcaattttaccttgtttgagatggagaaggttaaatcctgaatccttgcctctctcatacctacaggtcacagcaaaccgagatcccagctcaccagcaaacagatgagttgtatcccactggtgggtgtggagagagtgaagaggaaactaaagctaaagagaaggagaaggccatagactgtatgtctcatcccaaagagaaattagcccaatcccagaagaaagtagctcagctgattaaggaaaaaatggtaaaacaaaaaactcactaaaattttgtttccatttaaaaatatgttcctgtttagagaagctttgccttcgatgcagattgaagcatatgaaatagaggaaggtgtcatatttctttgtaagtagcagaaaacaaagcagagcctacttaggtagccagcccaccttctggttccatgcatggttcattgtctgttcctccttggggcatttctggtcctagctttaaactaaaaattaggccaggtgcagtggctcatgcgtgtaatcccaacaccttggaaaaccgaggcgggaggatctcttgaggccagcgtgagtaacatagtgagaccctgtctctacaaaaaaaattaaaaatcagccaggcatggtggagggagcctgtagtcccatctacttgggaagctgagacaggatagcagcttgtgcccaggaaattgaggccacagggagcccgtgattgtgcaactgcactccagcctgggtaacagaatgagactgtgtctctaagaaaataaagtaaaaatttgaaaaacctaaaaattatcatttgattgtttttgttgctgttacctttaacttaaaattaaaaaaaaaaatagctgggcgtggtggctcacacctgtaatcccagcactttgggaggccaaggtgggcagatcacctgatgtcaggagttcaagaccagcctggccaacatggtgaaaccccatctctactaaaaatacaaaaattagccaggcgtggtggcgcatgcctgtaatcccagctacttgggaggctgaggcaggagaattgctggaacccaggaggcagaggttgcagtgagctgagatcatgccattgcactccagcccgggccgacaacagctagactctgtctcaaaaaaaaaaaaaaaatatatatatatatatatatatatacacacacatatatatacacacacatatacatatatacgtatatatacaaatacatatatgtgtgtatgtgtgtgtgtgtgtgtgtgtgtgtgtgtgtgtgtgtgtgtatccatcctggaaggtttcaggatgctatctcttaggtaacaaaaaggctgggatagtaaggcaggaggttgagaacaggtaggcaggcaggtctaagctctggcctggaaaggatatgggtaagatgcccttggttacagtggaatcataaacaaaccaaagggccagaaacagaaggtagcagtggaggtcaaagattccaaatatgcatttctaagagcaagtcaaagacttgagtcaaagatctcagagcaggtttgtaagcatgagtattcaaaatccaggagactgagacagcaagacgtcgactctcattattagaacacaggcaccagcctgcttccagagcatgatttatcaacagaagagcttgtaccttgacttcctggctcctcctagccaaggggaaaaaagtaatctagagaggtttcattttctatcatttgcctctgaagtatctctctagatggatatttgtaaatttatctctgtaaatgacccaaggaccttgcaaaggacagtcatcctggcctggacccattagtgattcacaaatccaggctagaaggatcatttctaaaaacacacaagtaccatctgccatggagtgtaagtgggggttttcaaggcttaaaaactccttggccagattggataatgacaaagatttagatcttaggagagaaatctgactcaaatcccaagctcatcaaattgtataaagtgaacaggtgcagttctttgtatatcagttatagctcaataacgctgttttttttttttttttttaaatcaaacccaacctagtactcctagccctgaagggcaggggatgccacatcagcagcagaagtgctgggatgacatctggagcccgtattggttgtcccggtttctccaagtcaaggagttcgaggatgaatatacaatgtccagagccaaagctttggtctcccattccagtgattttttcatggcatgatgcttcttcctcgaaagagaacttagtatttgctgtggtcagcccatggtgaactctaaaaaatgctgactaaatggatgttttggaagcatcaggggaagtttccttctaccattgcttgcttctgtatatttgagcagggggcaggtaaaacatgaagttgggtaggagataggaatcagtaaggagtgtattccttggaataacctatggtactgctgtatcttatctaacattactctttaaatgggttactttggttacctgtacattattcttcaaacgggttacacttagatctgacctaacaacactgaatcatttggacactatttttttttccttacagtaactccatgaggtagatggtacaggtttccaaacctcagaaaaggaagctgagatcaaagtggcctgccccaaagcaacacaatcagtaaacaaacattagaaccagggctgaaactttaggtttttggttccttgaagtgctattttcacttaaccaggaaaaaaatgcctgaccctatcgactcgttcagccaataatggctgtgtttgtaaagtcactgaaatatatgacttgaagatacagttcggtgatttcttagagagctctacctgtcatttctataggggtagaggattattttccccaacccatctttaaccttgctaataaatgattcattcagcaaatattgaatgtgttacacctgtgtgtactgggcagataacagcgaacatgaggaataaacttctgtcctcaagggacttatcttctatttggggagataatagacaaacaatagtaatagctaataaaatattagatagaagtaagtactatgaagaaaaagtaaaataggtaatgggatattgagtgatgaagtggtgtctattttagataaggtggccaaaaaaggcctgttgataagaaaagtgaaaatgaaatgagaaagtgaatgacatggaagagtgtcccaagcagtgggagcagcacgtgcacagccctacattggaagttagctggtgatgttcaggaaccgctggtcagtgtagttctagcagacagagtaggaggaaagggtggtagaaaatgaagtccagaggtgattggcattgggtcagattatgcagagccttggaagccatggtgaggactttgaattatattaagaagaaaaagcgggaagctgttggaggattttgaacaggaaagtcatgatctaatttatatcttaagatataaacacataaaatacgttttaaaatccataagtttctaataataataacaagctatttgatcacaattagaggatgctagtgaacaattcatttttctgaaagctagtaaagggcaagaataaaccatgtgtcctgcctttccaacatgaactgtactattgggtaaccaaagagtggaggaggagaaattctccttacagaattattccagctaatgtatgaagaaggaatgatagaattagtatatttgcattttataatcttttgttaattttccatgtagttttcctaatatcagagaaaaaaaagaaaaaacaaccagatagtagatgtattctgctggaagaacataccagtagccatgaagtcgttttgtaaaaaaaagaattcaaagctgaaattaaccaaacttctaaacccaactactaatataaaggcagaacagagaatggagggacatgatgagacaccatgaggacgcagtcatcaaaatttatgtctgtgggaaatactagaccaaatgactcagctttttcaaataattcgtaagaaaaagaactagagatggaaaagtaacctatagatgaaaagagactgatctcacagtgtggacagtcaaacaaattatttaaaaaattccatttctgtgattagataaggaattattgttaatattttggtgagataatgattttgtggtatgtttctaagtccatatcttttagaggtatttacgaaatgttaacagaggcaacaatggaatgtctgatttgcttcaatttaaggtgaggatgggtggatgaggggtctagatatgaaacaagattggccaggagtagatcactgatcacgctacatattcatttttcatgctgtctgttttgtatattaataaagtttttcatgataaaaggttaaaagaagtcactctggctattatgtagaaagtagactgtgagggccagagaggaagcaattggaaggggctgctgtggccagccaggtcaaaggtgagggtggcctggactaggtactcatggcagaaatgaggagaagagcttggttttaggatttagggggaatgtggatccaaccagacctgatggattagacacaggatgagaaggaaagagaagagaaaaaagatgacaggtgaattcagtcctgtgttccagtgataagtccatggggtagagacttctcttcctttccaaaaagtataatcacttctgtactctacagaatactcaagcaaacaaggagctgattcgatgtgtcatcctttctcggattatttttggggaccatcactggaaatgtgcacgagctctggccaacctagcttatggctacttgacactgagaggtacttggttttcccagctgggtttgggtggccagcctctgaaggctgaactgacccacacaacctcagtgaggatgggcatgactaggagggccccttcttgcccctagctcacacattatcaggaaggaaagtccatggatgagggagacagtgtgcaaggatctaagtaataaagataataatgatgatgacagttattgagtatttagcatgtgccaaactggtctcattagtcctcacaatattccttggagggagatactattagtaacctcagtttatggatgaggacactggagcacagtgggcaaagggcagtatcaggggttccagccggaggacagtaggggaaggacaggcagggatgtacactcagcatcagggaggcagacccaataatgggacttgaattccaaaggtagaactcaagttcctggaaggtttggcttagtgaaaggtaggaccctcatcctagagaaatggtacttctggaaggtactctagtataagagaataagacaagaatctatttgctaaaactgaacccaagtgaaagttccttgagagtagaaagtttgtagtacaggctgaataaatattgggtgatacactgaggcgagagcgcatttcaggaaccagggacatagccagctcaagactctctgttccttgaccagccatgtccccctgtgtggtctgcatacattttcaccgtggaactcattgtactgtgctcatatatgctttaaatgcttcttcctctgacatagaagctccctcagggcgggactggtctcatttgatctagaacagtcctttgtacacaatatggtttggcatattactgcttatgaactgagccactggcctaggggttgttcaagtacctctgggacctcagtctgaaggggggcctaacttgtaatacaaattaaatgctttatgggcttaagtgatttgaaggctacaggaaaagggaagcaatatatttgggccataatgaggctggatatcagcaaagcttttgaaaaaattaaaattgagttcacttctcagttattgatctcagaatatattctccttcttagggctctataggcccttttacacccatttatttttaatgcaactttagattcatttattgatgtggcaagatcacaggtagctgagatcacagcattaggacagtgatgctgtgggtcacagtgggggcacagcgaggcccttttatgctttaagaacacgtgttgtgttctgaaagaaggtgctatggctagggagaggagaatgtccttatgtactggcagagcaggcagccacctctatgaaatttcagagtgaccaggaaggatcttcccctagtggcgttccgtgcttccttacttggaatctctctattcccatcagactgattttctcaaaaacttactgccttcatgataagagtcaaatttagggatttactccttcagtacttatggagttcttgttataagcctggtggcacttgcagtcagtgctggggatacataaatgaatattggtggtccctatgctctaggagcacacaggggtcttatgataggtaccattctagaggtaggaacaaaattctggggaggcagttcagtggtattgccattgaggaaagtcagggaaggctgccgagagaaagtgatatttgtcctgtctttgaagaatgagaataggtttatcaagtagatttttttactttttatatttttatttttgtagagataaggtctttctacgttgcccaggccgatctcaaattcctggcctcaagtgatcctcccacctcagcctcccaaagtgctgggattacaggcgtgagccatggcacctggcccccaagtagattttgaggggagaagtagagagtacaaagttggtcctttatatatgttgatctaaggcataggaagtgagaggagggcactctgtataaaactcgttacacagaatattgtagcttctctgtagacccagggggttaaggtaggacggaagacaccttaggacagacagctcatgtttggaaatgggactgaaaaggtaatttgggcccagatatcagggagtgtggagagttattaaaaggtttgaagtgaggtggtaataatcaagcttgtgttataaaatgagagactccaggatgggttggactgggtagagaaagaagaggcaaagaccagttaggccgttatcctgcccagatgagagtcgatgagggcattgggtatggcagttggaatgaagaaagataacctaaaatgt

SEQ ID NO: 5652 - DNA, 465790 bp, Homo sapiens
  ARFRP2 gene - 53216371 - 53642160 of chr5; NCBI Entrez Gene ID: 54622; Build 35; sequence includes 20,000 bases upstream of initiation codon and 20,000 bases downstream of termination codon of the gene
ttccaacagccattctttgccttgcctagtgagtgctgaaccatgataggaatgaagtttctgtatgggctcacaatatggattttcttctaccaaggctgatccagctatagctgctgttgaatgctcaatctcccaacagcaaagtccaacagtgaacccctgatatggcaccattcccaggccaggtgtgaagatggagaaaaccagctagccacctggtggcagattgattatgctggaccacttccattatagaagtggcagctctttgttcccagtggaatagatactcaccctggatagggatttgccttccctgcctacagtgcttttatcaaaactgccatctgtagacttacgaaatgccttactcaccttcatggtattcagcacagcattgcttctgaccaagaaatttgttttatagcacataacatatgctaatgtgctcatggtcttggaattcattggtcttatcatgtttcccatcaccctgaagcaagtggcctgaaagaatgattgaatggccactgaagactcggttatgacaatagctgcatggcagcaccttgtagggctggaggaatatcctccaggatgcagtatatagtctaagccagattgtgctatttctcccttagccagaacttggggaatcaagggttggaaataggaatggctcatcttatctttggtgattcactggcaaaaatttgcttcctgacttcataactttatactgtgctaatctagggttcttaattcccaagggagggatgtttctaccaagaacacagaaaatgttccattaaattagaagttgcgactacagcttggtgactttgtattcctcatgcaagttaatcatcaggcaaaagagggggttattctactgactaggatgattgatcctgtctatccagtggaattaggtcattcacaactacagaatggagagaaggaagagtatgtcagaaatgcagatttcctgtagcatatttttgtattccatattgttatggattgaactatttttttccaaagagatatgttgaagtcctaacccctggtacctgtgaatataaccttatatggaaatagggtctttgctgatataatcaagatgaggtcatatgcaattagggtgggacctaatccaatatgactgatatctttataagaagagaagaggccaggcgcggtggctcaagcttgtaatcccagcacattgggaggctgaggcaggtggatcacttgaggccaggagtttgagaccagcctggccaacatgatgaaaccccatctatattataaatacaaaaatcagccagatatggtggcgtacacctatggtcccagctacttgagaggctgaggcatgagaatcgcttgaactcaggagatggaggttgcagtgagctgagattgttccactgcactccagcctgggtgacagagtgagactctgtctcaaaataagaaaataagaaaaaagaaaagaggagacgaagagacacagaaggaagatggaagatgtccatgtgacagcagaggcagagtggatttatgctaccacaagccaaggaatgccgaggattatcggcatccgctagacaccaggagagagggagaacagattttttttccctctgagcccccaagaaagaaccaaccctattgacatttttatttcaaacatatatcctcctaaacggtgagagaataagtttctgttgtgttaagccacccagtttgtggtaatttgtatagcaccgcaaggaaagtaatagatatatcctgagattaatattcataggaaattccaaaacccaatttaggtagggcagcaagtggctcagatccttcaggaatgtgaagggattgggtcaccccaataagcaaagatctaggacaagattaaacattgtcgagggaaaagagaatataaaatagatatagtcaaaaaaccaaaccacataatggctgcagaaacaaggacaataatagttatgagtatttttctacctaattttggtatgagtgtatctatatatgtagtaaatgtttcttcccttctcccattcccctacttctgatataatagtcattacttttatatctcagtataagttacaggatatcaatggggagtacgactcagctaaaagaagaatgaacaaatttgctgtcctagaaaaatgttttccagaattcccatatctttatgcttctgagttagcagtgaccataggagaaatatgtagaaggtttataaattagaaggggggttgcagccctattgttttatactgtgaaagtcaatgtaggaggccagacgcggtggctcatgcctgtaatccagcactttgggaggccgaggtgagtggatcatccgaggtcaggtgttccagaccagcctggccaacatggtgaaaccccatctctacaaaaatacaaaaattagccgggcatgatggcgggtgcctgtaatcccatttactcgggaggctgaggcaggagaatcgcttgaacccgggaggtggaggttgcagtgagccaagattgtgccattgcactccagcctgggcaacagagtgagactctgtctcaaaaaagaaaaagaaaaagaaagtcaatgtaggatgccaggcatcctgtacacactgtggtgacaagctgctcacgttgtctacataaggcagcacttgggcccacacttctggtaccagaattccttcagcttcacctaatcctaggccaaaagcatgggctattctatggcaaaaggtgccaacttcttctgcaagtgacctgcagcatcaaaggtagagacagtctgagactgatgtggattccagttcatcctcacagttccagctcattctcaggagttttaagttcatctttacttttcttcccacttggtctggctgacttagaacaacttctggctcaacacctaatgcagagacagcagccttgcatagtcccttccattggtaaaactgtgtaaggtcttagccctataataaatccctttttctatatagttgtaacagtgtttagcctgtttaggaatgtttgatacgcttattcaagtctataatttgcaaattcttaaaataaaaatgaatttgacttatagcttcccttcaaaaactaagttgttttatgatgtctcataccatttaaaaatattccttcttaataaaagtttcaggcataaagttacatacctaaacccttaggaaaaaaaatgtacccatgtaaaataaagctccatgatgttatatgttcatgtgggacatctgattataccagcttgccttcatcactgtacactcctcaaagaatgggttttggtaggaaagagaagaccattagctggggttttggaagagaatttaataaagggactatttacattggtgtgaacaggggtctgggaatcaacaagggatggtgaagcaccaagaactagccccagagggagcccttatcacctccatgcatgaagacacgaaggacagaaccaatgttaccacagtctactgagagctagagccatgaaaggggccgccagcaagggctgtggatgtagagggatgcggctattgccacactatgccatagcaggacaggtgtgccaggcgtgaatactccagcccctcttcaactcccaccttctcgtctccagctgatgtttcccattggcaagggagcctggggaatgcggttagtagggtgggtcagagaatggagaaacggagtgtggaagagaacaaactgagaatgtcagcaacatgtgggacaaaaggcatttagggctcatcaggaacaagggacctagagcaattcctactgtgccatgggaatcagagggagaacataggagagtaaatcatttttttagcctgtacctagctggagcagttcatttgcaggaccaataacaagtatcccttcagaggctcccctcagccaaggaagacaaggtgctgaaaatcccacattggtaaaacatccaactctcacttctttaaataaattggaacctagaacagttaagcaggttagtgggaagagaatttaggttgcttagttcgggcttttcctaatctatgaggatctttccagtattgaggagaataggcagtacttctaaatacttcaaagtacttgaacattgaattactgcttgtgaaatattatataacatgatactcaatccaatcattaaggtaaaataggcaacaaaatccacactaatgaaagagctgttaaacgacttcaacgttttatattctgaccccagaaggcttatttgcagctcttgttctgctttagtgtcagtccttttgagctgttaatccttcaggtggttctaatcacaaacagctgtactaggtggagctctgctacccaggaaatgcccttgtaatactcaggagtcttgaccccttctttctcactctcgctttcacaaatgatggtttggaaaccttcaaatacaaagggtgaggccagctcctaaagtcccttcattttctactgtctaacaactactgccttatctcatttaagtaaaatgttagccagtagaggcaacctcaagatcctagagacatctttgcctcctctctcttttgatccccgtatctaattatttcaaggcttcctattttttctttggcagttgctttcctcctccagtcatgcttatcaccctggtccagaacctcaccctgtgcattcttagataagcctcaatgccttttaactgaaatatctgcttctaggctcttcccctacattctatcttgttttctaggaattagtactatttttagaacattacctggagagactatagtggcttcctgtcagagcctgatctcctcaaccataacattcaagccctccatcaaccggacacatctcacaacctgattttgccactccagtcaggctgtttaataaaagatcatgcttaattctgcctttttcagtcccttagaatttaccatcccctcccctaaataaaccacgttctttatctcatgtccttctatgtcctacctcttttccagggtttgaattataggccccagtagtacttttcttgcacaatctagcccttaatttcccttctgctaggatccaggtaatccttgacaatcatgggtaagaaaaaaaatattttgagggcttactatatgccaggtgccattctaagtggtttatagctttgcatgtattaaatagtttaatccaaacaatttgtgtggagttggtttctattatcagcactttccaggtaaggaaattcaggcatcgaaaatttaaataactttcccaaataaaaggtgggatgtgagttggaacttgcgtggaattcatctccagaattcacattgttaattgccatgtaatcctgcatcccactaggaacgggggcaggatttttgtgagcctattgcattgcagagcacctattacacaggacagcttcacagttaactgccattttctcccagttagttgatgctatgattctgatgcaaatttatgcgtcaagtgttaaactaccctatttgatgaggcatttgattgaaaactgttacaaacgcatattaacttcacacctgtggttctttcaatagaagtcttttctgagcaaagtctattcaggtagcataagcagttcgcccactgaagggactaccccagctttcagtcatttgatgggttgcctacacagcctttttttctttggagctgatttaactcgcttaattttgtacttgtcaagcacagtgaacatgatgaatccctcctaggtaccaatttattaaaaacatctattaatttaaaaaatgtgccacagcttgaattttctcttacaaaagcaggaatttgttcatttgtaaacaagcttcctgttcctttctcaaggtttacatccatgatgttgtaaaggctgggacatcgctccttatcaacttgcaggttttaaacaagtcattcttgcccttctttctgttctcaataagagggatattttagtccttcggaaaatgtagcttatcatttttgatatggtacaaaacagcatttcctccctttctgttgcatgaccctgcagtgacaatctctgttttacaactttggacaatgatacaaagttgtgtttatggtcaacctatgctgcattctacataaaactggaaattttagtaactcatatgggaccactgaaggaaacataagacttgaggagacccagacatgctaatttggtctactatttaaccattactgcaatcctgcaaaacataaataagcatacctgaaggtgaccaactatatcaccatgtactcaaaatagggcatttgtctttcataagattcataatcctcagtggaggctttcctgtgtgaaaacagttttcacatttgtttctgggttcacataattcttaaaacattttgagagtagtttgtcaagttttaggattgtggtatgtcaaatcattttcacaaaataacctttgatatcctaagaactaagtattttattattgctttgtcttgtgaaatgccctatgaacaataccactcataactgtgatattcctgtatccacacagtaattgtagccttttcctgagaggtttgagcaaatagagccccactgcttccctaaccaggcataataaccacacctctaacgactgttaattacttctcataagaatgttgaggctgagataaacaatgcaatagtgagtttcttaattttgaataggagctgcacatggtcttaatattgctataatttccttttcttaccataaataactcattgaagtgtccctttgtggtaaaaactgattgtttattctctgacaaaacaaaattgttaatcttgctatgacatggctgagttatctgagcttccggccttcttactgaagagtttggcatctgagatataatactttttaaagggtgtaaactgaattcccacttaatattagtaaataacattctgtactagtatggaccaggcaacattttttatttttatttttctccttctaaatatatcctaaaagttgaggaccagtgaggattactggcataagacaaaagctgatatttttccttggtaattcagtcaaagcatcactttcatctggatactttgtactttgtatgtggtctggaacttttagtttagtagtctagacattatcaaagtaatatgttgaatggagaacatttatgaatataagtgattaggagtttgagattcaaagtatttcttccaacacagctattttatataataatttatctgttattttacttataggaactgagagctctacctagttgtacgatctctatagatatttctgctaccaaagagaagtgcagagattctccatttatgtgcactgccatctgtcacatggagacatagtgttgtgtccactacgtaacatacaactaaagcttgtacattacaatgctaccatacaaccatcctggagggcaggcatggtttatatcaatggaagtgggcaaatgaaccaagcagcctgttgaaacgtttgagaaatttaatgattgatcactcactttagttgcagcagagggtctcctacggatgcatcttatggcttccatataggtaatacaaaatatagagcttagtggcacacaaagccagcttactattcctggattgcccatcttaccatttcttctgattctgagttatgctgcagagaagaatcaacaaagccatcatctctctgctgccctttaattttcccttttgcttactttgctttatttcatcaacattttaaagatgatactgtaactccaaagtggaataattttcctgagatccttaaaagtcaatggtggaagcaggattcttctacttctccagactaagtcaaaggcactgtctataaaaacacaattcctccaacaaggctttcagtacataggatagccagcacttcagtgttcagtatatttgtttttgttttattattttttaaaaagtattttatttatttattttttttaagatggagtctcgctctgtcacccaggctggagtgcagtggtgcaatcttggttcactgcaacctctgcctcccaggttcaagcgattctcctgcctcagctttccaagtaactgggattacaagtgagccaccatgcccagctaattttgcatttttagtacagatggagtttcaccatgttggccaggctggtcttgaactcctgacctcaagtgatccacccacctcggcctcccagagtgttgggattacaggcatgagccacctcaccaggccatatttgtttttaatccttacaacaaccttgaagaaattacctatattgtttttaatttccattttaaagatgagataactgagtttcagaggttaagtatccttcttaaggtcacacagctaataaagcacctgggattgaaatttagctctgtcttctgacaaagcttgatcttaacccttgagctaactggatcagaattatatgaaatagctgtgccaccgcatgtgattatggtgtggtaagttagccattactctttagaccatttgaaatctcatgaagtcacatgccttggtccattgcttctttcatttcctattaagaaaactagccaaacctcttagtctgtaacattatgatgccctttgtaatgccaaaatgatttctaccaattccaaattgcttctgttctctgaactattaccttggaggcagcctgagaagtaggaagatatggtataatatctagcatgctgttcttccttgatgtcttccagcaggtctaatagtaccacaggcacaccatcagtcagccataacgtgtaccagaacatacacacacacaaagggaataaagagaggccttggtggaataagcacgtccagaacacgtccattcactgatgtactttggcagcaagcatacagtactgtcttctctagctctcatttgcccagagaattcaacactactcaggtacataaaaaaccacaattatgttagagattcctatttgaagaaaagcttctcaaggacaaagcattacaatgaatcagtctacatggcatggcattaaacacaagatgcaggcaaagacttcaaggtcatggcaaggagacagggaaagcattggaaaagcttggctctcatgaatgtgttagtgtctttcatgaacccattagttaattaattattaagataatagttaattcttatgcaattttttttttcttaaatgccctcttttctttctaagaagagtaacgtcaggtttaagcaattgatttaaaagtaaactgtctctgggccaggcacggtggctcatgcctataatcccagcactttgggaagcagaggcaggaagatcgcttgaggccaggagtttgagactagcctaggcaacatagtgagatcctgtattaacaaaaaatttaaacattatgtggtcccagctacttacaaggctgatgtgggaggcccaggagatcgagactatagtgagctgtgatcacaccactgcattccagcctgggtgaagtgagaccctgtgtcaaaaaataaaaaaatgaaattaattaattaattaattaaactgcttctggagtattaaactttaaaataatttattttgaaagcaaaattaaatcacaaggatttcctcctttgtttcattataggctttgcagactagtactgaatggaaaggcacatttgaaggaatgagcagaaaaggagaacagtagtatgccacgattaatgcattcaggaaggaacacagttactggtgtgggtgcgcacagactcctccagtctcctgccaaagagaaccctgaacttagaaactcaatgctttgccttttgcttccaaaaattatttcttgcagtattgacaatgaagccaatatacataaaaggaattgtggtcaggttagagagaaaagaaaaaaacagactgatgtgttccgtattgtcacagaataaacagatcaataaaacagaggagagctcagaggcagagtcatgtatagaaggcattttatgtaggttaagggttggctccacctcactggagaaaagaatgaattgtttagcagatgtttttggaaacctggttaaacagatggacataatctcaatttaaccccacatacaaaagatagactaacaatgggtaaaagacccaaacatgaaagggaatgctataaagtttactgaagctgtggcttcttgattttgtggtaggaaaggacttttttaacttcagcagcaccagcccttaggtttaaagttggtggaagagattacatcaaatccaaggatttttgttcaaccagggacatcatggacaacgttgacaggtagcaaagtaggaaaagcacatcaggcatattgggatgatttcctgttagaggaaggaacaggaattagttaagagggattaaaagaaataattaaatagagagaggaacgctgttgtggaccaatgatgataatacagggtaccgtgaactgaggaatcaggtccattcaacccttgtaccttgagtaccatgataataagttgggagaatctcaggcatttggtgaaaaaaggcttctaaacagcgaagaagtgaaggataaataattatatgggtacttttacaagtgttatggatcatgctttggacatttagtattcaaaataagtagaaaatggactcccttttcaaatactttatgccactgaatcaggcttctttaaatatgacacttcaggacagtggctcatccccagcccccactgacaatgtattttgtgttatttaacagacactgaagtaggctccaaaggtgcacaatccaatgagacagtttccttccttcaaggaactccgactagtgggagagagaatgaaaacagcagcagcagcagcagccaacacttacataatgcttactatgtgcccagcactgttctaatgtacgacattaactattaatctcaataatccagaaggttgatgatgtagctatttgtttcctacctataaaatggggtaaataagttactgagatgttaagtagcatgcctaaggtcacagaactagaaagagggaaagccaagattcaagcccaggcagactggcatctgtgctcttaaccactatacacaaaacagtatggtaaatgccaacagaaatatgcagaagactggcacttcactcacaaaaaggagggcactcccctcaaattaagaacagttaagaaatgtttctatacagtgtgctctgtgatttcaaacgttattgtttgttttaaatctataagttaagttggggagaattcacatctctacagtctttccatccatgaacatcatatctctgtatttttctaggtttttaacttctctcaaaatcttaaagttataacaattattcttaggtgcttttaaagtttctactttaaaggtcatttaaaaaaacatattcaaaaacacatttcctaactttgttgctaagtaactagaaatacaattcattttatattgatttttaaggagtaacagatttaattttaactttaataattgataggcagatttgtgttttacatacacaaccacaatctgccgatgaattgtttctttctctccattctttatattttttctctggttatgctgtccgggttctctagtataatgtagaatagaagctgtgataggtgacaccgttgtcttgtttctgaccttaaagcacacttaaagtttcacaaatgaatatgtttgctttaagttttttgtagatacccttcatcaatcggaataaattcccttttactcttagattgccaaccatgaatggtgttatggactgaataatgtctcccccaaatttatatgttgaagccttaacatccagtaccttagaatgtgaccaaatttggagacagatcctttaaagaggtagttaaaatgaggctgttagagtaggccctaatccaataatcctagggtcctaagaagaggcaatttggacatacagagagacaccaggggtacacaactacagagaaaagacagagcgaggaggcgcccatctgcaagccaaggagagaggcttcaggagaaaccaaacctgatgaaaccttgatctcggacttctagcctccagaactgtgagaaaataaatttctgttgtttaaaccacccagtggatggtattttgttacggcagctctaaaaaacaaataccaatagatatttaatttctaatggtttcttttttgtatatgttgaggtgatcctgatttttcttccttaatctgataatgtggagagttaactgattttccaatgttaagaacatctggcattcctaggataagcctggcttagtcacaatgtggttttttttttttttctacttttcttggatgttttgcaatatttttccatctgtgtttgtgagtgagactgatatataattattgatgtccttgatcaggtatcaagattattatagttgtttgagatgacctggcaagcactccctccttctctaccctggaatagtttcaagttgggacattttgtttagggaatgtttggtagaacttggtaaacttgtctggcacggtgcttccacatgatggcttttaaatagctgtttatttaatttcccacctcagagaaccaggtggtgcttattgctgagctgatgagagttctgcaacaggaatcagcttgtttcttgctggcttcccccgcctcttgaacttagccttcagctttctctgttccgctacgtcagttgccacttctgtatccactttctgttttcctaaatggttgacctcttatatgctggagtctctcctttaattctctgtcttggtggatcttttttattcctttactggcctgtgggggtgagggtgggggagataagcaagtatatttaatatgtcatgtttaagtggaagacctccattcatatttttactgcataccttcattgttcaatacagtatccactacctgcatttctagttctcaatagccatgtgtagctaatggctaccatactgggcagtacaagtataggccatttccatcattacagaaagttttattggactgtatcacttagcacaacccagagatgccatccacgactacctgtctagagtatgcttccctgttactcgccagcacatctctttaattctgtatagcacttatcactagttgatatctttcctgtctccaatcactagagactaagctttatgtgagcagggataatatttctctagcatccctaatatatagtaggtgttaaataggtatgtagaatgcatgaatccatattagcctgcccagagtacctacatgcctgtctttctcaatttaaacagcatagagtcagaatctcaagtctggatgagataggaagcattattatctagatggtatatgatagccacttttttcattggctttattttatagtttcttgtttctgagtttctcgtttccttgcaagctgccttgaatcaattgccagcttggattaaggcttccttatatgtaagccttgaaagaagagatcaaaattataaatcacgggcattcaagatgtttccaactttcagtggaatacctacaagaaagcaatttgaatagtttctatattatcccaataggtgatgatctcataagaagcaggcaagaaagcaagtgcccaaacacttttttgggatttgcttccctctgtagttggcacatctttatgccagtcttagggaccagaatgagggagcaattacactggatggagctgcaaatcaacttccaccaacaccacatggggagttgggaagcaataatctgcagagaagctcctagctgaaccctgatttgcaccagttagacttccccaaactaaactgtctatacctcctataccttgggctcaaacactcatcttcttttaagtatgtaatgcctcatccccaatttgttgctattgattctttatatgctgttttcccatctggaaagttcccctcacaaatcctccaagataaattttttctttcttggagagttctattagaactccagaaactttggcaaaccctcactgagttctcatcccttaaacactttagtaactcctctggcaccaggttgactgtgtgcacatttgtatcgggaagggctttgtctattcgcctttctttgtcctgttatttctaataagcggaagtttctccgtggtagactctaggcctgctttattttcttgtcacactgatcccaagatcttgtcacttccatagtagtatagggaagaaatagatattccagggttatggaaggaaagtccttagctctgttacttaatgtgtgatcttgggaagggtattttatctgtgatttttgctgtgagatttcagcatggtgatcatgaggcctaatggatttgttgatttttctccttcacttggagctgactgtgtcaggaagtactaacaagtatgctcaggcagtgacatattgacacaatgaggctggctgtaaatagtgaggtctatgctctaagcaaccaatcaatctttagtggtgccagggctacatgcaaggtgtcaagccaggctgttgagggagattcagacacacgtgtgtggcagaaaaggagattcacaattcaagaaaggacttgctgcccaattgcaatgagtgtgattcactaatggcctccatctatctattaactcttttagctcttccaacacctttattttagttccataaggctcataactggcttgcagaataggaaattaatacaatcagcaatgtagaaatgtatctaagagattaaatgaacttgctggggttggtattgagagggatttacacagcttcttgatatttggtgcttgaatggtggttgcttgtgagatctagttatctttccctcgtatatttaccattttcagtggatgtcttatcttgctttaaaaccccaagacccagcaaagccctttttggaaaaggtgagtgacccttaatcatggtagggattagttgaactctatcccctggctgagtaaacaggagcctggaaggaacaggtgacctgtccaagctcatctagttaagtagttacaaatcttcatcttgactgccaggactgatctttgaaaaatagacatacaaggccttaagatctacctgcaggagagaaaacaggtttaaactgacatggagatattttagattaaaaacttcagacttagctatttcagtgaggggttcctctagtttgagttgcaagtaggtcaccatgctaagagcagaaaaccctactctaattccaacctctgacctcattcaataatcattggcttgattccatttatgaatcaagctctgttagcggcttcatgtggggacaccctgttctgatgaagttcatcttctgggacacagtgatacttcatttaggtttaggaagcagagaagaggactggggtaaatcagaggtgggtgtcaaggtatccactggagagaaagggaaaaaggactcagaagagaattttaaagtcacaggagttattggatgtggtaagtgagaaaaagtgcctgatgacctctgcagagctgaccactttttctgaaaaagaagtgtccatgatttaagagtcattataatgaaagataccatctttcagctattaaggaataatattaaggcaaagatgagacaagataatcattccctactttggagctggggggtagaaggaagaagactacataagctaggtcaaaactgagtattaaaagtgctcagctgggcgtgatagctcacgcctgtaatcccagcactttgggaggctgaggcaggcggatcacgaggtcaggagatcaagaccatcctggccaacatggtgaaaccccgtctctactaaaaaaagatacaaaattagctgggtgtggtcacgtgtgcctgtagtcccagctactcaggaggctgagggaggagaatcacttgaacccgggaggcggaagttgcagtgagccaagattgtgccactgcactccagcctggcaacagagcgagactccatctcaaaaaaaaaaaaaaaaaaagaaaagaagtgctcatactctttgtaccagtaattctattactagaaattattcttaggataataagatgtggatagttttataagcaaacattcactgtaatatttataatagtagtaactaataaaggatttgttaacacagtagtacatttttacaatagttttatgtatccattaaagatttatgaaaagtttcagtgagatagtgtatgcatgatacaaaactagtgaaggcagtattctccttggaaacaacaaaagaatagctggaaataaccactaatatgttgatttttctggaaagttgggagaccaagttgcaaaaatgcatttctgttttcattccttgcaagtgacagtttaacaaaaaattttcctccaaatttggctagccagcagcctttatggaattttagagtatggactgtcaaaataatttctctttgcttttgacaagcaacagtgatggcctctgtattagtctgttttcacgctgttgataaagacatacctgaacctgggcaatttagaaaagaaagaggtttaatggacttacagttccacatggctggggatgcctcatgatcatggcagaaggtgaagcaggagcaaagacatgtcttacatggcggcaggcaagagagaatgagagcttgtgcagggaaattcctcctaataaaaccatcagatctcatgagacttaccactatcatgaggacagcatgggaaagactcgcccccttgactcaacttcctcccaccgggtccctcccacaacacgtgggaattcaagatgagatctgggtggggtcacagccaaaccgtatcagcctctttcctcaaaacctatgcactaatgcaattgcctcatgagtttacatgtttcttccgcatctggaagagggtcattcttttcactgacagcaagggcagaactaggttaatgagatcatgtcttgttctggattgcagtctgttacttggcatacagtatggtaggttgattaaatgcattctaacttctctacactcttttaaaaagcatgtattgaggtgattacctcaataggtgctaccaaccctatcagctatgactgcagcttcatgtagtgggtagtgtattatctgttcataccaattcagtcaagttagcctctttcctctgtaggggcggactcactgacatctcagaaaacatctaattgaaaaaatgtgctccatatggagttcaaaatctacaggttgttgttgttgttttataaggactctttcctaaaatgcaatatgtgattttttaatacattacactgactacaaggttttcattgatgccagtcacaatgaatgtgcaaattgtgtggaataaagtgaatattatggtgcagtctttggaacttttccttgaacatattctttcatctccctgctttggccccatatactaattcttagaggcagcaagaaccatactgaccctaatgacatgttcaggactatctttccctaagcttaacttttaaaggaaaggcagaagccacctgcttctgagtggctatcctcctctgcatagagactgataggcctctcgaaagcctgactgggcagtagcccacacatcatttatcactaagacaatggtccataaggtgtctctttgctaactcaagccctttatcttattttaaatatgcttattcacgaagaaaagcaaaacaaacaaaaaatgttccatgactatttctgctcattgagagattttgttttccaaattagtttcaaacaaattgtgctaaagagtgtacgtttatggacgtccatctcctccaaaatctaggtgaaaatctcttctaaacctacatgtgtttgaattaacagaatgccaaggaaaatcaaaattggatctaatagcactttgggaggccgaggtgggcggattgcttgagtccaggagttagaaacaggcctgggcaacatagtgagaccttgtctttacccttaaaatacaaaaaattagacgagcgtagtcgtgcacacctgtggtcccagcgactctgcaggctgaggtgggaggatgcttgagccggcgaggcggaggttgcagcgagccgagatcgcgccactgcactccagcctgggcgacagagagaatccctgtctcaaaaaaacaaaaacaacttccccaaccccgccccccgcccaaaccctcacaactttctggctgtaggaattctcgttttgcagctgaggaaacaggtttggaaattagactgcatacctaaaatcacttggctcatcaacctacagctccctctagggggctgcctcgcccttattggttatgtgcacatttggggtgaattccacggtcatctaacagaactgttttggtagtcccaggtaaacttacggtacggaaatttgtttcttgaggatacaaaaaagaaaggtgtcagggggaaagtaaaaattcaactcctaaaacatcgcgtgtagagtcaggcagtcacttcataaagagttcagtcgatgaagtttcactcttgaaactttactgtatgtatgcaagccctaactattaatacaggtgacagcatccaccttatcttccattctccctaagccctgagggtggggatgggggggggggcactccaatcacctgagcctaagaacatagcctaagaacatgtgtctggcatggtctggttatttatagcctaaaaaaaaaaaaagccagcttcttgtccgattcaggctttccctgcccaaacccactagcttaatgcgatattgacattaccaggaaatgcatacgtcccaaatgcatctgcttatagatgtttttacctcctgaaataataccgggtcacaaatactgttgtgttttttgcagagagcttctactgctcatttaattcaggggcgttggatttgtgctgagcgtaatttgactccaagcatgcaaactgatcaacttcttcccgtgtgtttggggagtacaagtgactactgcgactcctcaaatgtttttcttttccttttcacgtggaggaaagcgaattctccgaagactgttcggcgttctacgcaggggttggaaggggggttcctgagtcacctctggctgcgcggggggcctgtgtgtaccctcagggacaccaggctggaatcgtccaccttactttcaaatgataaaagtgcggagggtctttctgcccctaagtcgcgtacaggattgcctgtttacggagtacactttcacacacttctttcccggtggtgcagtctcgtggcggcagagcctttaggaaggctctggggggagacaagatcagtggcgaccacgcctcccatgttacagcgctcgcttcctactgggggttggcggggacaccaaggctctccagcccgggaacacggagttcggctccgttgtacccaactggaaagctgtggaaacacaaaactcgggcggcgacagcaccagccgattttccgctctcttggctctttcttccgcttgcaccgcccccaccccggctcctccgctcagcacacaggaacccacatcccccaccactcccgcgtttctctcctgccaccagctggggcctgccttttataggcgccgcagccaatgagcacgcttctttccttctgcccgcccgcctggccaatcgccgcgccccttgtgtaatctccggctagtcggctgctttcggctattttcgctgttgctggctttttcaggagctgctcgctcgcagccagagacgctgctttttttttccgggttcggagccgttccggatgctttaggctgccggatgtctgatctccgaataactgaggcgtttctgtacatggattatctggtaggtgcagggcaggggtggcatgtcgcctctcggatctcggcgtgcccgatggccccctgccttgaggagcagcctttttgctttctttctttgggataggatgcctctggggttctttctcccgcagccggctggtaagcctttccctggactcggaggggcagcctccagggcgggtgggtggtggagctgacaggtaaaggtgcggcctgggccagcacggctgcagggcgagggtcgcgctggggctgcttgagagatggggcggccgcggcggcgcgtcccctgcccgcgatcggcttcctggcttccctctgcgctctccgcagaggactttctttccgggggagcaggagttttcctctctccctggagcagaactccaggtgctattaaagagccataaccagaatggctcactaagtgcccagcagccctggtcatttgattgttattaaatctctaaagctatgacctcggtcgtggcggggttttaaaagcacattaccataaagcagacgggtctaaactacctcgcaggctggcacgaacaggactgagtagggacaggtatagccccaccattccggtcttgggtgcgtgccgcggttccactgtgcacggattggaacccggctgtttaggccaggcttgtgctgagaagtttaggtgggaaaagtgtcagcacagtgctgggaccgaacatcattttaaaaatggacttctatgtgtctttgtggaattatgcgagcaccatgttttgttccagaaattatatttccccagagttgcttgtttgcgtttaaggggatcctcatttacagagacttgtgttcgatcctatacgattattgtgtttaccatgttgggcagaaccgctattgccatgcagagttgaagtagacggttagaaacattgaccctcctgtcatcttgttggacacatgcactcggttttcgactgcagattggcctggcagagatttgccagtgccttctaggaattacacttaaggctgtactgagaaagtctgtgcatgctttgatggccaagaaacgccggaccggctttgtgctgttatctgtgtatttgggcttattttagtgtacataaagaaaatgtttctcctaatgcttcagagcttgatggtcttgtgggaaaggatggtgactgcagttaatgcatagccttgtgaatggagctggatctaaaattctgaattcaagttctgttttgttgttcatttgttgatggcagtaacttcctttatctttgtgataaagggatattattcacccagtactgtagctggttacggggattatctgattatgaacattcttcacaatacaaggtgccctgtaagttaagagagctgccagaagattattttctaagttaaataactgatttaatttgtaatttatcttataaaatacaatacatggtttttgtcttgcagtctgcctaaattaaagcgaaagtttgttgggataattaccaagtaggaaagggtgacattgcctgtactactaaaagctaattttgaatacttaaatagttcttaaaaaagaaaatcaggtggttctgacattttattattttctttatttaccggatgtgttttaaatttataaattgcatcacaaagctgtctttgaggtgccaaacctatcaaaatgcttagtgaaaacaaaattgataactctggttaattactcaggctaacctctagataggcatagtctaaaggtgagtggatgaatgtttgtgggcccaaggttaccttaaaagcagattaatttatttgccaatttactaacagctttgtgtcaaaatcaacaggtcacaaatttgacttggcctttttgttttacctgggctcaagtttaccctaaaagcagattaatttctttgccaatttactaacagctttgtgtcaaaatcagcaggcctcaaatttgacttggctttttaaaaagctttacttgccatacatcttagttttacttttatatttaaaaaaaatcattattttgccactttatccatctaaaattcacaagtgcagtgaccaaccccataaaagccagtggctactctttggaggtgagaaaagaaatcttaaaggaaacagtttagtttttgtgagtgtgccaagtgtcccctgtgaaaagatttcagaaaattctttagcattaaactggatggaaacaaacagaaaaaccatctcaaaacaaaaaactagccctcccgaggtagcctttttgtgttcaccttttgcttgtcgactttcagagaaaatgatgtgccacacattatttttctcttcctgtctttcggattgacttgcttgcttatgcatactctgtgtggcgtttattaaaagccctatttctgaggaatagaaatcaatttatttgcatctggtatcttattttatttttaaaaaattcctgagttcttttacttaccttgcagggaaaaaaaatgctcctttcattccaagtttgactccagattttgctgaatggattagagtaagttccctttccatgcactgacaagaatgatggtgtgtgtcatttctttttaatcagtatttgactttcttgtgttgttcctgttggaaactggaagagagagctgtgtgtgtgtatgtatctattgttcattgttctttgggctggatgtcgtcacttaacctttttatttggaggagagtggaaaggaagaagggagagaaaggtggaggtgctattttgtcttaacaggattaatccttttaataagattgagatattaaaacagatgaagaagctctactgatcttcgggtcgctgttgatttcttaaaacaaatgttctcagaagtgacagtcaaggtgagggacagggatagtactttaatatttaagacagggttttattgatttcagtcgagagaaagaatagaaatttgctaatcctaatcaattagatgtatcacctggtgcggtgcctgacttggtttctggcatgtattaatagttagggcccgatattttatttgttgaatcagatgaatatgaaatggaaaggaaaattctgctttttttcaccagtttttaaactgagacaagataaaatctgtttggattaggtgttttgttcaggggaatgcagaatgtatcctttactcttaacttgaagatgatcaagatataatccttttagccagggtggcaatttaaacataaaaatctctgttttccagttgatgagtgaatcttcctagaagggcacacaacttttcccctttccatgatggggtttaaaggccatgtttacatctgccaagtctctgggtaaacatttagctgctgtcccaacaggcagtaccagcatcttactctttcttctcataggtagaactagtaacacaatgtgcagagctttttggataaggtaggagaaaatagtcaggttaaaatgaaagagaaaaacacatttctcgagttttcctgggaggttggacaagatcaacttctagattcctttcagttcaaaattttctgtcttgactcatgtgatgattgatctggaattaaccttttttccctctgcgccatcaaaacaacagtggtagaattggttgtactctgtgtaatacctatgatgattaaatgagatagtggagggaaagccatttgtaaacagtacgttgcttttcaaatataaaatgttaacgtattgtgtggctgggcgaggtggctcacgcccgtaatcccaggactttgggagggcaagacaggcggatcacttgaggtcaggagtttgagaccagcctggctgacatggagaaaccccatctccacttaaaatagaaaaattagctgggtgtcgtggcgcatgcctgtaatctcagctacttgggaggctgaggcaggagaatcgcttgaacccaggaggcagaggttgcagtgagatcgcacaactgcactccagcctgggcgacagagtgagactccgtctcaagacaaaaaaaaaaaaaaaaagttaacgtattgtgattatgttgctgatgttacttttatacctcctgtagaatgactgttactgcttagtggtattgaaataccttttaaactagtctcaatttatggaaatactgggagttgtaatcaacaagcaggaagtcacaagactcttttaagaatcttttaaaagctacgaaaataaaacccatttgaataatttatctattcaacaaatatttatggagcccttactttctgcatggccctgaaagtcatgcgggatgaaccctcagctgtaatatcctccttgactgcaggactggcagtcgtgtggctctagaggaacctgtggcaggacaggttaagtaaggcacataggggagggggtagcttctgatgtgcttctttgctttctagtacatttctctcattttgtgtgttttattgtgaactaaaatataaacttagacttgaaaatgtgacaagtaaaaatggttgattagtcttggatgctaattgtcaattaatattcattgcatttgtttatagtagcctccaccctcccatccacggttttacttttcaaggtttcagttaaccatggtccaccgaggtctcaaaataagtgagtaaagtacaataagatattttaagagagagagagaccacattcatataacttttattactgtatattgttatcattgttcacttttattattagttattattaatcacttactatgcctaatttacacattaaactttatcataggtgtgtgtgtataggaaaaaatatagtgtgctctgtgctatgttagttagttctatgatagctcagtactatctgtggttttaggtatccactgggacttggaatatatcccccatggatgaggggaaactactgtaccgtgttggggattttttatttatttattttttttttgtgacagagttttgctcttgtcatgcaggctggagtgcaatggggtgattctcctgtctcagcctcctaagtagctgggattacaggtgcccaccaccatgcccagctaatttttgtatgtttagtagagacggggtttcaccatgttggccaggctggtctcaaactcctgacctcaggtgatccacctgcctcgacctcccaaagtgctgggattacaggagtgagccaccgtgccctgccagtgtttgggatttaataagattagatttgataggttagtttaataagatttctttgtatagactggtggacttgacctatttagtttcttggttataggctgtatctgccatcataaaaatgtatgtctcagtggggaagatgtggtgagagaattgggttgatcatcacaaatctgtcaccatttgcaggataaaaaccagctaactaaccaacaatagaaacccatgatgtgctacaaagggtagagcccacaggcactatgaaattgtaaaggatcctacttgaaaagaggagtgaaggtacatttgtgatttcatattatgttcagttatctgtgaactgaacttctttattgataaaaaaaaaagtacattgtttcgttgtttttaaccctgaatatctatgaacattgtaagttgtatttattgtgactaactttaaagtgataatgtaggtcactttttagtctaaatgtcgagtggattaggcagtcatattaaatattcctttcttaataatttataagataaaaattatctgagcacaataaacagatctaccatatatggagttcatatagcaaaaatgttttgagcaaatccgtaccattaggtaggaacttttctacaaaggtgttaagtctggttcccaaacttctgtggctccagtctaacagtatgagccctaggagaggacacatagggaccttgattcatgccctccaggggcttgcattctgaaagatgccaaagccacatgcttgttggcatgtgggcagtgctcaggtcgggggtgagaggagataagtatatgagttataatcaggagggcaaaatcagttaacatttattgaacacttactctgtgccagtgttctaagtgctttgcatgtgtaatagcattaaactgaggctcagggaggttgtgtaatttcctcaagttcacacagctagcaagtagttgaactgcgcttgtggccccagggccctccctcttcattgccttccacctacaagtagttcccttgtgctaggcagaggctcaggcagcttggtgttaaggcagttgggatgcactcaaaatttttagtatattgcttcttaagtaaacaggtacagaaaagtggtccttgaccactactatgttaaagaaagcagtggccatgagcaggcaggctgatgcgcccttgtccccaaggactctggcaggtgattgttacagagaaggctggctaggaagagaactatgttgtgtgctgggaactcctgccttacagtctccataccctggtcatagccactgaggtgatcttcagcatctagtgttccaccaggtgaccacatatagattttcaggcaacctccttactcagccccctagtgtcacttttgggggcacattcctacctgccccaagccccagttttgttttgtttcgtttttcttccctcccttcccctcctttcccctcccctcccctctcctttttcttctttttttcctctcctcctctttcttctttttttcctctcctcttcttcttcttttttttttttttttgacagggtctcactctgtcatccaggctggagtgcagtggtgcgatctccttactcagtcccctagtgtcactttcaggggcacattcctacctgccccaagtcccagtttgtttgtttgtttcttgcttttcttggttgcttgcttgacagggtctcactctgtcatccaagctggagtgcagtggcttgatctcagctcactgcaacctctgcctcccgggttcaagcaattatcccacctaagcctcctgagtagctgggactacaggcgtatggttagtttttgtattttttggtagagacggggtttcaccatgttgcccaggctggtctcaatctcctgacctcaaatgatccacctacctcagcttcccaaagtgctaggatcacaggcgtgagccactgtgcccagccccatttcttttgaagaggtactgagactgtgctatgttcttttgccacgcactgcctgggaagtcagctgttcccaatagatactaggccataagcagcctgttgcttatggacttcagctgggcaaaatctcctgatggtattaactttataaaaggatttatttctaaggtagactaaagagaaggaaagcttgttagggaaggtctcataactattgtaggtgacaagaagtgggaatttcctctgatacttcccacaaattaaattattgaggggcttttgttttggatcctgcagccccctgtgttatgttgtggctctcccctgtcatctccccaaatgtcccaatgtcccaggtgtttggatgagtctaagaagcccagttctggttgaccctcattttccgagtgtctgtaaagtaccaagtcacatctacttttagcagggctggcttcccagccatgcaaccgctgggttcagaagagccccatgcctggtttactgctctttggtccccatcctggaaaaaaaaaaaaaaaaaaaaaaaaaaaaatcttaattttagaacaggtgctttgcgttttcattttgcactgggccgcacaatttataaggccagttcagatttctagcgctaaatacatggctggcatctgagtctgtaacctgcatcattgctggttccctgaccgtcttaatcaccattttatcactggaatctagtctagtgtctggtaaatacaggactgtgtaccatttacagtgctgagtgttttccttggatcacctaatttaatcctcccaacagtgctgttaaccacaaagacatagcaacttagaaaagaggaaacttgagactctgaaaggttgagtgttgcccagaattgcataaccagtggagggtcagggtcaggatcagtgtatgagcttgtctgattctaagcccatggccatgagcattcttcggtgctgcttaactattataattaataattgttgagaggatgagtgagagagactgtgtgaaccatagataacaattctggaaattgaggggtcacttgattgtttctgtcacctggttgcctgtgagaggccctctgggaactcagtgacagtgcagctcccactgggaaagttgtgtgggtttgtgtttgaggcgggagtctgctcactgattttgctttcattgattacccactctctccttcagtgtgcataaaggtaggtgttctgccctttggctcatagagccaagcactcctacatgattttgatagtagctcaccatctgaaaagttgcatttgcaagccaatctcatttatcaagttcctctgtacctagatttgctgggaactgttttaacctctggactgctgctttcagagttgaggacttatcccactaattatgtccatgtctctccaagagggattcccttgggttcttttttcaacaggagagctgctgctctggcctctctctctctttctcttggggaagggaatgacaatctggaggcactccaggaccactgattgaggcattggaggtctatacccgttcctaatcagtatagacatggagtcaggagctaaacagaaatataattctttcagagttttatttctaattatgaattattttaagcattcagaaaagtacagaaaataatataacagacttctgtgtacctgccttcctgattgaacattttgccattttgacttcaaaattctggtgatctttaaatgaaactaaagactcctgttccctgcacgcttcctcctccacccttctcagtggtgaccactatcccgaggttagtgagtaacagtctcatgcatgtttttggctttttatcatatatgcatgtgggtgtaaaccatatatagtatcattgtgtgtgctttaagaattttaccaaaattgtaacataatgctctatctttctaaatttgcttttttccctaaaaaaaaatgttgagtgaataagacattagtctgccctcaaggtacttatgctcctgtacgatgaaaaataaacaattacattttggagtagcatagtctatctggagggaaataaagacggctagagtagcacatgaaaggcaacctaacctagatttcagggccaaagagaacttcccagaggagtcttttaacatctgcaacattaaagctgagtaaagttggcccagtgacaggcagggccagggccaggcaaaaggaatagctgtgcggaaatttgggggtgagtaaccccatgacttcaagggacttcaggggttctgtgtttttggagcagggtttggagcagtgctagaaatgaagctgcagagcccagctagggtcatggaaactctgaaagtttgcctgcaatgacatggtcagatctgtctgcagtgcagagaaggattggaaagggagggaagactggagcaagactagttaggaagatgtcctgatccagaaatgagatgatggtgttcacaaccaggaaggggcaggagggatgcataaatgtagatggatttaacaacatttaagaattgccagaattttgtaattggatgtggaagatgacaacagaatagatctcagggataattcttaggtttttggtttgagcattgttttggttatctgagtaatgaaccaccttaaaacaatagtttaacacaataacaatgtattttactcgtgaatcggggtttgactgggttcaactaggcagttattgttcaggatccctcatgaagttgtaatcagatggagggtggggtcacctcaaggcttcatacacatgcctggcatctgagctgggtacattgcaacagctgggtgctggacaagggtggccccctggggcatctctcttcatgtggtctttctatgtgatggcctcaagatagctggacttctcatattgaggccgaaggcttacagagcaaacgtaccaagagaaactggcagaaactgcctggtcttttctacccaatcctcaacagtgattcagtgtcacttttactgtgttcttttcatcaaggcagtaaaaaaggcattgctaggttcaagggcagaagggagatatctcttggtgggaggaaggttgaagaatttttgggcatgttttaaaaccactgtaggtattgaggtgggtaatggggtcatgcactatgatctgtaaccctgaagaaatagcaggtttggtgggaaagggagaagtttgactttagagtgactgagtttgaactgcttgtgcagtaattcaacttgagatttcacataggtaaatggaaactcagaggtgaggtttggagatgtagttaaaactaatacctagggccaggtgcggtggctcacgcctataatcccagcactttgagaggccgaggtgtatgtatcccgagatcaggagatccagaccatctggccaacatgatgaaaccccatctctactaaaatacaaaaaattagccaggcgtagtggtgcacacctatagtcccagctacttgggaagctgaggcaggagaatcacttgaacccaggaggtggagattgcagtgagccgagattgcgccactgcattccagcctggcgacagagcgagactccatctcaaaaaaaaaaaaaaaaaaaaaaaagctaatagctaacatttattgttacatactgtatactatactatattattaatattttgcaggaggcacagtgctcagtattttttatatgctatacatttactattatcgttttagagattagaaaactgaagcttagagaaattaaatgttgtgcctaagacatggtggagccagaatttgaacctaggtctggctaatgtttgagctcacatttgcaaccacttagatggtagctgaagccatagccatgcatgagggttcagttgtgtgggaaaggaaaatacttgaggatgcctacggcctcagccactgctggcgtgtagtatacatgcagcttttatgggatcaccaaaagtaaaggaaccaaagaggaacttggcagccagtcatggtggcttgtgcctgtaatctcagcacttttggaggccaaggcgggaggatcacttggggccaggtgtttgagactagactgggcaacatagtgagacccctgtctctacaaaaaaataagatagccaagcatggtggcatgcaccggtggccccaattacctgggaggctgaggcaggaggatcacctgagcctgggatgttgagtctgcaatgagccgtgattgtgccactgcactccagcctgggtgacagaacaagacctcatctcaaaacaaaaaatgcaaaggaaaaaaaaaccaaaaaaccaacagcaaccagaaagaggagtctgggagaaagagaactgagaggttggaaggaaacctggagagtgtgatgtcaagcaggtgaggatagagactttccaggaaaaagtggccaattttgttaaatgttgaccagagatcatggaagataatgactggaaaatgaccactgaattcgtgtcagtggtgaccttggccagagggctgtcatgggccttgttgcggtgccgattagtggaggagtggggaatgaggaaatgatgctgctccaatgaatgttttatgagacattcaccaggaaagagaagagaaagggctggaactggaggggcaggaaggttggggggtggctttccttaaatgggactagagatggcgcagtgctggtgcagtagaacgtgaggtcattttgccaagtgtgactgaaatgtggtcaggtagcggttttaactgaggaggatagaagaagctgcagtgaggacggagggccgaggatgaccagagacacagagggttggtagttgtgtcgtgctgaagttgcagaccgtcttggcacacatttagatggttgtgtgatttcttttttctttccttgtgtagcctttgtagccatctagatgtagttttaagaaggtgggccgttagattggtaagggttagggtttttcctaatctaaggtgaatccataggtagacaatggggtgcgggaacttagtacactggtaagaaaatatttgaaattatagactgagatctgagttataggaaaggaaggaagggcacatagaaagtagaagatttctactttcttctactttctcacgcctgtaatcccagcactttgggaggccgaggcgggcggatcacgaggtcaggagatcgagaccatcctggctaacacggtgaaaccccgtctctactaaaaatacaaaaattagccgggcgtggcagcgtgcacctgtagtcccagctgctggggaggctgaggcaggaggatggcgtgaacctgggaggtggagcttgcagtgagctgagattgtgccactgcactccagcctgggcgacagagcgagactccgtctcaaaaaaaaagaaagtagaagatggaagggcctggtggtcttgatgaggctgaaccataaatgttgtatggagtaacaagtcagaaaactggagggaaagaaagttcaatgtggtcagacaataggggtgtgaattgaagactgcagaggtcagaggtagactctccaaggggagggaaaactaaaaattatttccacaatactatgctccttataattttaattagatagaagtcatgatcacagagcccattttagctttactgacaatgcatccagattactatacaattgttccagacataacataagagggctaacctcacaaactgccctaacaaaacagccctaagcaggctgcccacaacaaaacaaactccaggctccaacaactgcctgcaaccagatttcagtcctgttggaaaggccttggcctgggccatcttcattagcttctggactcagcacttcaaactaccaattctctgccccaggaacctgaagctggcaggactcaatcccagggacccctccaaagaaatccagcctagtgatagatccagacagcaactgagtcccttgaggggggtccagtctgcccattcatcaggaactagaactcccctggtagtgcaacccctcttagtagaaaaaaataggccgagagtcttacgaatccagtaattgagctgtgagtttagtaatctgaatgaggaccctctgtagcacaataaacctgggcctaatcttctcccaactacctaaaccagggaaatgctagatgaaatagcatctttcatattaaggtcatccttactgtacactgctctgtgcctcctttccaataagcccatctcacactagtacctgccctctccagcctttccatacaaccctctgccacagtggtggtggtgcattaactctgcagaactcgttaggaaagagggcttctcttctcccaacctttcactaccaaaacagaattgagggtccttccagggccactgcagggctgcctcagacagtgaggcctgttagacactgcacagaagtgcctggccaagggggcaagtggggctgaaatccagcccctgcttggcttgcccagatccccattgtgaactggcacagaggtgcctaatgtgctagccataacccagcctcgggcctttgttcctgtctgtgttataggacagagcacattgtggcacagtgcagggctgggttgcaggcctcttaatatgcccagaacctggcacaagtacacctgacaggtgctgagtaaatatttgattggactgagatgctgcacataataatggtcaggggcagagccagactgcctgcatttgcattctagctctgtgacttacctgctctgcagcctccgtgcctgtttccttgtatgcaaagtgggtgtaatgatagtattaaatacctacctcgcagaattgagttaatgtgtgtataaagcatttaaaagagagcctaattctgtaagtactacaaaagtgtatataaaacaaggacttatggtactgttgtcaccaaaaagattttgctccatttcgattcattttccccctaccagccttccaaaaatctccctgcctctgcctaatacgcatagtgtagggtaactgggttaaagacacttcaactgcttgctggtgttttaagtggcagctatttctgattcacagggtgaaaggtcctggcagggaagagggtggcccacatctctcctcaggccagttatgcttacagctgttacctaagttcggccacacgagccgactcagtagatgagttttctgaggtgctactctggaattctgtgattgtttggagccttcagttcctatttcattggagtcaaacaatttgaaagtcaagtttctgcttttgagaagcagagcatgtgatttattggccagctcttttatcccttcttcctgtatgaatgtttcctgagaggcagggtatggtagaggaaggagcattgggacgatttattgggtaatgttgccgttcttggtcatttcgaatgtttcctgaatgaggctggttctcttttcaagtcactgggctaaagtagaaaacctctttggattattggatttctctctttgtttcattttgtatagaaatgtatattttatattgttcaccagtaatgtttttttcagtgtaacatactttttcctataattttttgggatttctatgtgtgttttaaaggttgggtcatttagatgtgatcacgcgattgctcctaggtttcctttgcatttcctgactctttcagggtccctactgacctggccttgggctgtgggtagcatcactttttgagcctggagtgcagcccctatttattatttctgtggatgtaggctgcaatttttgtgcatcctgagattcctgtgctagtgatgttttagtttcattatgtcattatttggggagaatacctaactatactggggatctttgttaatacccataggtgactattttccatttcatgtcttctgagttcttcctgttttatcataaataattatgtgtacttaatattcacgtgaaatagtttcataaaatggactcagtaaaaatttcgattccatgttgagaaagatcttgcattgctaattctaaaattcttcacatcagattctttgtaagagaacacaagtataatgaaacaagttgcttaaaaagttgaaaagctgtgcaagatgtgatgcatattttaatactttctacaaaggttgtcttgaataaaccatcgtaaaagtgagtgattattaaaccatgaaggagatgaagaatcaagagttatagtaagctcattgatgattcagtcttttcctcatctgtcttaaagcagttcttttctatttccccaaatccagagtgcttaagagttcatctgagggaaagattatttatcccaattgctttatataactgcagtgagtgatattaagacaataagcagtagcaacagtaacaaatacatatgcttctaacactatgagtagtattttcctgtgcattcaaaattaacaaggacttttgttttattaaatgatattttaatcagtgtttatgtgcctgaaataaaacatagtcgctttaggtcctcaattttaattctgctgtgtagccctgtgttaaaagatcttgcagcaagacaaggatctgtcaggttttaaagtattctataaggctggatttcaggttagttttgggagaagaaaagccctaccttcccttctttctaatctccctctttccttttctgaccttccttactcagcaaatacttattgtgagcttaatgtttggcaggcatttgggcatcctaaataatacagggatgacccttgtaactactgagacggtagcctgtaacactgaacgtaatatacatatgtctttctttcaactactgaactccaccttagtagtttgaaagcagctgtagataatagataggcagatggctgtggttgtgtttcaacagaactttattggcaaaaccaggcagtggactggattttcccacagattggaatttgccagccgctgggttagtagaataggatttacctacctcctcaaagaagagaggcagtattgcatgatacttttcgttggcattggagttttggcttttggacttggggagaacctttaaagaagagcaagacagtttgggaggccgaggcaggcggatcacatgaggtcaggagttcaagaccagcctggccaacatggtgaaactaaaatacaaaaattagctgggtgtgggtggcacgtgcctgtagtcccagctgcttgggaggctgaggcagaattgcttgaacccaggaggcggaggttgcagtgagctgagatcgtgccactgcattccagcctggcgacagagtgagacttcgtctcaaaacaataaaaaaaaaaaggatgatatgatgagtggctttagttgtttgaagggcataaagtcttctatgaatctgagcaggtcatgatcataggaaggccaggtattggttcaggtaaagaagaattctcttaagatttgttcatcttccttgagtaggaaatgacagaacagaagctgggtccctgcctgttagggacatcacagaaaggggttcatgcactgagtgagaggttggaatagatgcaaagttcctttcaactttttccttgcttctaggttgatcctaatgtatcagccaatctctcttcactttactatgagttatttaagaaaacattgtggtataggggaggaactaacatgtttcttttcatttaggcagtggagttttttccaactaattttatgcagaactattaaacaagtgatattttactatatttgactttttacaagcctatatttatgatatttacttacacgtttattattattatatattaatcagtgaggacaatgaagctgttctgatgaacacaaaaactgcctttagacatggttgagaactgaaggcttatcaaatagtttatttggttctgcattttgttctctttttggtgtagcattgaggaaaaacaggattccaacagaatcatagttgcaaatgttacagattggaaagtagctcactgtgcaatgttgagctgatcttcagtgagaaggcagaacataggttttatcatgaaacttgatctttccccccaccccaagttactctggcagcatgagttatgtgtgggtggtgtgtgttaaaattttatatacagtacatttgaacatgttgtttctcatttcagtctctaattaaaattcaatttctacttaaaagtatttcttgaatatccaactgtctctttgcaacaccgtgtgaggttgcagagttggaaaaggactggcttagaattagacctgggcagtagtctaccttctgccacttgctagcctcgggctagtatccttttgtttttttaatatgagaaacaggcctggaaatacccacgttgctctaattgtgagcgctgagtgagacgacagtataaaaatacctagcgcatagtagaaccttagtaaatgcctttttttccttctcttgtgacttgtaagataaggccatccttttaaattgaattgtgcgtggttctactcaatttctataggtatagttactagacattattcactatcttaatgaaacgcttgaataggaactctgccctcagaaatgcaaactgttcatctgaaaggagtgggcttacgagggtctatagctcacctggttcatgggttgtgattctgccttctggtttgagagtgaagggaggactttggagagatccgcttgctgataacaggtggagggcaggagtttcagtggcttgcttatccacacgacatgtcagaaacataggcaatgactatactgcctttagttgttagatttttatatcaacctccacatatctgttccctttagtccttagcactaaaacccattcataaagaagggccagtgtgcacatctttggagaagcaagaacatcaacagcaagggagggaggggagggctcctgccacttggcagccaggctttagggatggggtaaggagaaaatctacaagacttaggaaaaagtggtatcccttgaaaaagaaaagggaaatagggtgagtccctggggacaaaagtaggtagatactaccacctgagttgggcacagggatccctgggacttacagaaaaccccaagtagttccctgagcatatagattggggctatttgtcttcagcaagtatgagacagtggtatagctgctcataggaatctcagaggttggggtatcagatgctgaagagtggctcaaagaaattggctgtgaacccaagccccaggggagcccagttaagattccgtagggtctggcagttgtggctgggagttgggtttctgttaagattactcttaaactattaaatagttttaagcaggaggtgatagcaccagatttacatgttgaaaacttgctctggctgttgaatggaagatggattatacagggatcagatgggaactagtggggcctgttcaggagactcatccacattccagtagtagatgtgggcggcttggctttggattcactaggtgtgagaaaatatcttccctttgctaagcacctgatgcttgcttatttaattcagtagagttagtagctttagtattattatagttagccttctgtatctgcgggttctagatctgcagattcaatgaactgcaaattgtaaatatttgaacaaaaaatataaaaaataatacaaaataaaaaatacagtctaataattacacaacattgtcattgtattaggtataagtaatctagagatgatgtaaagtatacaggtggatatgtgtaggttacatgcaaatattacagcatttcatataggaacttgagcatccacagattttagtatctgcagagggtcctggagccaatcccccatggaaaccaaggattatctgttctcttttctcatctgaggaccacttattgaagttcagggtggatgagttttctaaagtaacttattgaatggttcaaacccaggtttgtctaacctcaaagcttacctttcttttccctccacagttagaaaaacaagaagaaaagttgagattgtctaattaataggcaaatagaaatttttttgaacctttaagtggttgttagaccacgttctcctgtagtcagccttttcctggcagtacaataatttttgtaagttaatatagaagtactgattcagtaaaaggggttggccatttgaatattttgaggactttaaatatagatttgacagtgtaggtatcatgcccaaagaagtggcttaaaaagataaattcaaggaaagaacccctaaacaatgatttctaaggttttagtagaaggacagtgctgaaaagttgtgttcatttaattatattaaaaacgaatgggacgtagggaatggaagatgaattcatactctggataattgaataaatataattttccttatgattctaattaattttgcttccaagtgcctaatggacaatgcatggcaaagtagatgcctatcattataatagcattaaaaatattaaatattattgaatattaaaatattgagtgatgctggacacggtggctcatgcctgtaatcccagcactttgagaggccaaggagggcggatcatgagatcaggagatcgagaccatcctggccaacatggtgaaaccccgtctctactaaaaataggaaaattagctggacgtggtggcactcacctgtaatcccaagctactcaggaggctgaggcaggagaatcgcttgaacccaggaggtgggcagaggttgcagcgagccgagatcgtgccactgccctccagcctcatgacagagtgagactctacctcaaaaaaaaaaaaaaaaaggttgagtgatagttgatataatcttatataatgtagactaaaacttcttcagtttaaacatgtcgcattgccaatctggacaatattgtgaggcctggctaaaaaatggatgttgtttattgttttgcatcagttgctggctctgttgagacagagtggtaagagagaaacttggatttggaatgtttactcctttggggaatctcagagttaccattctgggttacagtatttgcagtaagaagtcacaggagttagtcctggtaatgcaggtgacagcaggcggagacaccaagagtacagacaaggcctgaatgcaaggcatctgtagaagctgatggcagactgcagcccctggggcttcctggtgtgtggggccccattatgcaaatgcttagaggaagttgtgtgcctggaacatagcagatattcaattaaaatatacattatatgtcaattacaaaatatataaaacaaaatacaaatctgaagcttactgtatttccttttataactcattgaatcctcttagtacccaatgaaataggtactactatgatcctcattttacaaatgacaaattaagatgcacagaggttaagcaacttgcccaagctcctacaaatagtaagttgtatggctgggatttgattccagaaagtcttaacactgaaagctgttagatttgctcttaatgtctcccagaactgcttctcaataaatatttgtggattattgaattgagtgtctaatgctgtgactttttacggtagaaatactgtgtttgcctatgcaaggggtttgggaagcaaagctgttgaaagcttttttggcatctcttttattgtctataatattgttagaatgaccacgtctgctcttaaaaatagcagtaccggaaatccaccctctcctgcacattctctcttttttttttttttcttcataggacttgtcaccatctaagttgattttatttgttgttttgtgtgccactaccactggagtgtaggctccataagagcagggactttgctctcactgttccgtccccagcatgggacatggctgggcacaaaatgtgtggtcaatgcaaatatgaaattgtttaattaatgaagagaattaatacaaagttcattggtgcttcagcttgggcatctaaaatccttgagcctttcaaaggaattgccgatctatgctacacttgccaccctggggcatcagtggtttagggagttacaatgcctgggctgagttcttctagttgttaatgacgtatggaaaattcttttgcttgaagttaatgagacaggcctcttacttccttgcaaaatatgctgtaggctttccagaatcccgtgtgctcttgcaagtctcatctactccttacaaatctgaatttgataggtttctgccatgcatgagaagctggtgcctatattcagtttttattgcccatatgccttattgtaggtacttgtattgagggaaaaaccttatatgtccaggtaggctacagagtcaaagaggcttgtccaaagtgttatttgtagtaggtgagtgacactgcatctgcgtgtttttcttttttattggcctttggtagtcagacttttatgatttgttgaattataaaatacatgtaaactgtaaacctgctttactcagtttgtttgacttcatttgcacttgctcataatgattgagtttggcccccacgtccaaaagacttgagttcaaattgtggttctgtcacattctctcaaccactgtatcaattaggactggaattggttggaatatagtggctttgacagtttcattttttgctcaggcaagtaagtccagaagtcattagggccccaagaagcttctgcccactatatgtagactttaagcttatggtccaaaattagtgccagagctcctgccatcacttctgcattccagatagctggatggtgaaagggcagaagaagagtgtgcttccctcctggaagacttgtaagacttactaattatatctcatttactagaatttgatcatgctgccattcctagctgcaagaaactgaggaatatagttttttaactaagaaacagacttgtctgcaactgcactcagccattcttcacatactgatttctctctgggtctacttctcctggggttattagcagggttgttattctcctctgctttgtgtagcttttcttttttgtatagtttcttgttattcatactagtagctttgtaaatttagattgctgtgattcttcatggttatgaagttatttaatagctttgctttttgtattccctcagttttattttgcactatgaactgcttcatcttttcagtatttttcaactcaaatttgggagaaaaagaatatgattaggttagcctggcccttcctgctaggccacaccatggttgttggtcagctactaaggctaaactgcctgctagttcaatcagctgtggcatcttgcttgtgggcctttgcatctaaaagggtggggaggcaaaacagactctatgatgtgaccatgctaagtccctgacaaatggaaattcctttggcagggagttagagataagtcttaaaatgaggatgttttgtatattcatatgaatgcattttaattagtatgtagattgtcagttaatagttatcaataattgatatcggactgagaagcaattatttgcaaagactaggaaggtgtctagggcatgcattagcagccctcagatgcttgcgcattatgggatgtttcttgctttcacttttatctggaatgccgttttcttctgtgctcctttgaacttggatacctctcaatcttttgagactcaaaattcaggagatgcttccaagtctttcctgacatgcctataagaatgactttgatgcctctactctgtttccctaaagcccattgtgcatacccctgattgtgctgaacacatttacattgcacttgtctggcacaggtatgtttaattaccgctttctcctgaactggaagatcactgatgctagggtttggtcttctttatgtttctatacttaacacttacctagaagtgcttgccacattaaggatgctctgggccaggtacagtggctcattcctgcaatcccagcactttggcaggccgaggtgggaggatcactggagcccaggagtttgagaccaacctggccaacatagtgagaactcatctctacaaaaaaataaacaaaattagctgggtatggtggcgtgcgcctgtagtcctagctatttgggaggctgaggtgggaggattgcttgaggcaatcctggacaggaggtccaggcagcagtgagccaagactgcgccactgcactccaacctgagtgacacagtaagaccctgtctcattaaaaaaaaaaaaaaaaagccctgcaaatgtttttttcgttttctttctttgaactgagttttaaaattcccagtgcctggtcaaaagtgaaggaataaatcctccaagataagtggtactcattattttactctaagttagaaggggatttctctccctccatactttttaatcagaattttcagaacgagaactattcttaccttcaccatttcagccaaaatctgcctggatattacgtgtgatttttagtgatgttttatagaagatgggctaacattttgctggatgaaatctgtaacttctgatatgatgatttatgctttcatttggttatttttgctagatgacttttcaaatctcaggttatttctgctagatggcttttcaaatctttgtgattgaatttcacagagatcatgtgctaatcatgatgattgttattttttaatagggagagggttgattcctttttgaatactgattgaactcttacatattccatccatggacattggtagattgcttggaagtatagatgctcttggcgtgctgttggcactgttaccactgaaaacatttttagaaaatgttgagaggccaattttattagctttgctttagattgcaaatgtttctctttgggtagattatcatcatcctttctcctaatttgaagaagctataaaatatatgctgaggagcaaaatgctctacattttgtaaacaaatcctaattttattttgtaattagttaaaaaaaaaacttacttttttcccatttggggaaaattactttcaagtgtactaagggagttgtgaaataatgcactgttaatgttttcagtgacaatactaacagaaggagatgccagttctgaagtaggtggcattcccaagtgtttatttccactctggaggagtgactaaagcataattgacagacgcgacctttactcagaaaggattcgacccacgcggcactttagcgttcccatgtaccttggaacgggtcgtcactctctgtatcctccatttattgcatctttgccttcagcccatttgtctgctattgagaggaaatgctggatctttgttaaccttatttggaaatagaggacccaagctagggcctcattcgaaggggttttactgctcccgtatgccctttcttgttttaccagttttaacatactgcttgcaggactctgaagaactggcttggctgttttaactttttaattttcatcaagcagaattatagaggagaagataatataactgtcatcttgctttgtatcaggatgagggattgcacaggacatcaaaattagaactgtcaattatgttaagtataaaaaatagctctctaaaagaatattgtgtttattagccctctgatggaactcaaattataccttgataccattttttggactgtatagtaaataacgtttattttctgccatcttgttgaagttttgttttctcctttattttcatgcttacctttgaaatttcttagggaaaacaacaataaactgtaagtaatcacattaatttcaaatttagtattctttttctgtcttaggcattctttttctatagacctctcttaaacagattgtaaccaatctgtcttgtttttgacatcttttttgctgttttattagatgaggcagcaaagaagatgagattcatctttgaaataatattctttagttcttcctcagggaagtctagatgtagatttatgaatattactgtagaggctaccgggtcagagtttatctgagatagaaactcattcttttattggaaatagttaactacttatccttcattccaagttatgccttatgtctcatgggtttacagttaaaatagtttcttgcaaatatagcatctatatagggaaataatataattatttaaaatttattaccagttcatatactgtgatcaaaggaagtttggttatgtttttaaatatatgtatccgactcctagtaattagagggaagaggccattgttgagaatattattgttagaatgaatttacaagctggggcaatagacatgccacctggcctgaggtcggatgttcaaggataaggcagtatttgtaaggattagagattagagagaatgaggtaatatggttagtcagaaaaaaagttacacaaaataaattgagggttttcagggtaataattttagcaatcccaacaacaatacttgtacattttgagaatatgaaaaggagtggaaagtaggtttttagtaactaaagagtaaatatttctccctccttaaaagataaagctcataaaaagagttaattctctcatgataggtgctagagccctttcatatggcactgggaatacctactttttaaaaacaaacgttgctctgtactggttaggattaggttaggctgtgagagacacacaacaatttttaaacaagttagagggctgggtgtgatggctcatgcctataatcccagcattttgggaggccgagggaggtggattacttgagctcaggagttcgagaccagcctgggaaacatggcaaaaccctgtctctacaaagaaattaaaatatttgctgggcatggtggcatgctcctgtaatcccagctacttgggaggctcaggtgggaggatcacttgagcccaggatattgaggatacagtaattccagattgcaccactgtactccagcctgggcaaccaagtgagaccctgtctcagaaaacaaaaagttacaggttgatttctatttcatgtacaaagtctggaagaggagggaatggcaactctgctgtcatttgcatctttgggttctcttatctgtatggtctacttcatgtgtccactgttctcattgtgccgtcacaacccaagattgtcactggagctacattaagtctccgttacagcctggaaaagaagtaggaaaggcagaagagcaaaaaagggctcttctcagagtcagttccctttaagcacctttcagttacatctcattttggagaacttagtcacaggacaacacttaaccccaagaaaggctggtaaatcttttattccaggtggcataaaataagagttatctttcagttggggaagataacttttccagcttactcagagagttgttcagtcattcactattatgttacaaaggtacaacttggggtaatttccaaaggtagatgggaagaatgatcttggacaaggcaatgagcgttcttagtcttgggctctgaggatgccagggcatggcccctggtttgttttcagtagtgtatttcattcaaaataaacccaataatgttacagtcatgatagtaataacttaataatagatgtgatcatgatccccagtatgaaattatcagccatttgttttgaacaatagcaccgttgatatttgaaagtttagattgagtttaagtacttcactcaacagagtgtcctaagagtttgattttccattgctgtaatttttatttttaatgtccacgcatatagcctttggctttccaatcttttatttaccaaattccttcaatcatacagaattcagtttcttgtggatattgtctaaaggggcaagagcctttggcagaatgggtctgatgcgacttcttggtcttcctcaaggactgcatctctggaagccttttggctaccacagaaagccagggatcctatgtctttgcctccttgccacaatggataaaaccgtgattgctgagatttatgacattataaactttagggagaagctttaacttgtcaacaataaaccataataacagtgttcgactgtataaagttagggttattttgactacatgctaatttaatgtgctaaaaatatttctccagctaaagaaaggaaaagaaaccagtagtcatgtttggtatgcatggttttgtgagtgggcatgtgttttaggaatctgaatttgatttgggagttagaagttgtgaattctaagttgagtactgccattgatattctgagaccaaggatctcagtcttctgtcaaaatttagcccattcataactttcagcatttaactatgagcatttcccttttatagagatttttttctatccattataaggattatagacttttatgatctaataagaattgaactgaaaaagaatgcttaaaaagctacttatagcagccaaatatttattattaaaatgggatattagagcaagatttgaaagaagtaaaattaaaccattacaataagttacactccttaaatgatgctcttgtattagaggacaaagtatctgccttacagtcccaagataaagccacatgccccagactttattatccctgtctttgagctagcctagaaaacagacggaagaaattcagccacttcctcataaaacagatgttggaatacagcagattttctttaaagagggaaacaagagcaaggggaatgaagacagttctttggtacaaacatttcttattctcttattcttattttaatcttatagagaatgtctgaatgcatccagatctcatttgctgtttgtagaattgggatttacacggtaagcaatgtatatttttgtggtaccacatgttgtgaaaaataagtgaagaccctagtgttggaaatcatgtggagtgatggcaattatcctctactgctgatgggggtataaatatatacaaccactttagaaagcaataaagctgaacatgagcatatcttgtgactgagtaattctactcctaggtatatagctcagagaaattgttgtgtaattaccagaagacctgtgtaggaaaggttcctagtagaaatattcataaaagcaaaatgttagatgcaatacgaatgtccatcaataatagattggattaaacaattatggagttttaatttaacggattacaatacagcagcaaaaatatatgaaaaaatgattgtgtgaattacagcttgtaataatacaccgtggatgtatctcacaaacaatgttgaatgtaagaaacaagtcacgggaaaatacatggagtacaatttcatttctatggagttcaaatacagtagaactaagcaatacattgttttagggttacatatgttgatatactataaataaaagcaaaaattcatattgtgattacctctagggcagtagttctcaacaaggggtgactttgccctccaggggatatatggaagtgtttggagacgtttccggttgtcacaactggtggtgatggtggtgatatgctactgtcatcttatgggttgaggccaggggtattgctaagcatccaaaatgttctggttaagaattatctgcccaaaatgtcaatagcgtgaggttgagaaactgttctaaagcagtggagggaagaaaaagtgctttaaaagttatagtaggccaggcctggtggctcacgcctgtaatcccagcacttaaggcagatcacctgaggtcaggagtttgagaccagcctggccaatgtggtgaaaccctgtctctaccaaaaatacaagaattagctgggcgtggtggcgggcgcctgtaatcccagctacttgggaggctgaggcaggagaatcgcttgaacccaggaagtggaggttgcagtgagccgagatcgtaccactgcactccagcttgggtgacaagagcgaaactcggtctcaaaaacaaaaaaaagttatagtaatattctgggttttaacttgaatggtgagcgcacagtgtttttttatgttattctttaaactacatatttactttatatactttttgtatgtaaatatttcacaatacaacaacaacaaaaatgaatattttaagatgtttgaggttttttttttttttccaccagcctgtgtcagttgacccaaatgccttgagctcatttcttaacttgggattttggagatgtatctatgtagatgagcatgaaggacttttctaatcagattaagtgataaaatgtcttgacattttccctttagaggcctagggtggggatttggagactctagatggaaatatagtgatacttacttttaaagaccaaattattttctaagtaaggacttaaaaatatttacatgaagtaatcttgtttactcatctgcttcgtacagaagaacatatgtatgtgtgtacaaaatgcttaaggaatttgtttaaaatgaatgatgtaaaaattctgaataaaagataggagtgcagcttgtaagttccttgagggcagggagtctatcttgtgtttgtctttatagcctttacaataccttgcacaacgtctggtacttggcaaatgctccatagctgtatgcccaattatattaagttatagtgagaataattttctgttttgcctttatttgaatgtaagaaaaagcagattttctttatttcttctatcaccttttgctttagctgtctcagatgagtatttgtccccggttagatgaacaggttacttgaaagctaaacatgttttttagttattttaagtgaagttaattcctgagtctgttttcccagatcctctgagaagcagttgccaagctgggatttgaatgcaagttggggaatgtctatgaagtggaaagagggaggaaaccacaaaaggtagagagagccttcagaccatgctgtaggtctgacatctgtgaaggaagagtgggaaggaaggagggatggggaagaattttacaatgccatgtattcctgagaagtcttggctggatggatggggcttccctaagcaaagttgcctgttgctggagtttcgcactgggcaacaacagcagtgattccagtacctctgcacacttgggcgctggctcgcagcccagtagaaacacaatttctgcacgaatgccatggtagacctgaagctgtggcagcaagaggccggcagttagttgtgcttctccagaaagggagctctgactggcatatttccatggctgctgcagtaagccagcacaataaggtatttccatctagaacttgggaatattggaactgctgatatcagaaattgtatgtattcctctttgaatacctagcactgagcctgggcctgagacctaacaggtgttcagtctctgtccctgcttatttaatgaagaaaggctggtcatggattcattccaaggcagataaaaatcggccctaaaaggagagagtgtgatgatcttaattgtgtcccacacaaaactcatgtgttgaagccctgactccgaatgtgatgatgtttggggatggggcctttgggagataattaggtttagatgaggtcatgagggtggggccctcctgatgggattagcactcttataagaagagacaccgaagggcttgctttctctctctctctgtctgccatgtgaggacataagaaggtggacatctttaagccaggaagagatccctcaacagaaactgaccatgccggcaccctgatctgggacttccaggctctagacctgtgagaaaataaatttctgttgtttaagccacccagtctaaggtattttgttttggcagattaacacagggaggagaaaaaaaaaattcttgtaaattgcagataacataaaccagaaaaaaaaaaacaaaaacaaactcttattagctcctgttgcaaagaaatgctgagttatgagtaaaacaaaaagtagaagaggaaacctaaaaagattatgggttagcttttgggatgagaaatagtgttagattgttgagctgagttgttttttttggtgcttttaatgttactgccaaatagcagtgagttaaaatacttagaagttaaggagcaaaaagccttatattttacatattaggaatccatatctgaagtgagcaagaccaaattggaacatatataggacagaaagcttcctaggttaagtgtgtgatatacaggtaaatgtatgcctccattaaaaggtttaataaagatcattactcagagacaacaaagggtatccagtgcatgccgtccacctttcccactgaggtttggagtagacagacctttctccagaccctgaaaagcagtgatgcttatttaaagggccttaactcaggaagatgtggcaggaaacttaaggtataggtagaaaaacttagacattatcagtggtggagatatgaaggcttccaaagcccagaacaaattgagacagagggaagcagataaaaaacaaacaaacaaacaaaacaatctttaaaaccaagcatctggtccaaggagataactccacttcctatgagtacagcacaggagatagtgttattctaatgtaatgtagggatgtatcacaaagaagtaatttagtttctgaaacaaaaggagtcctgttatatggatctgttttggatcttaagcaacattcatttggttctgttcaggaggaaggaggggacgtaaatttaggccaagagtttatagtacaattgtggttctatgattttatgaaatcctggcagtgaaaacaggccatgcttaagaatgtgatcttgaagtgaaccttctaccatcaggcatggttgagctccaggccagagaggcacacaagggcattgctttggaatgctcttaggaatgtcagggtaagcattttccaaaggtgttgtgctgagacttccctgcgttgggaactataataacaccatcatggagccagaagcacaatggtgggcaattagctggtgctgacaagaagcaggttaagggagcagtgataattttagcttctagtgaccttcctgtgggttgtggacccttttggccaacattgaacggcccagatgaatgaagctagggccagtgaatcttgcccttctccaggaatggtactgtttgaagcatacggaagccacaggggtgactgtttggttttctgtacccaacagctgcgtaaaactgaaacaagtgatggagatttgaactaaataataccaggggaatgtcctgcatggttacagattttggttatcaagaagagctttaaaaactctttaaattcttctttggcctttgcagaaattattcttttctctttttttttttgagacgaagtctcactctgtcacccagcctggagtgcagtggcacgatctcggctcactgcaagctctgcctcccgggttcacgccattctcctgcctcagcctcccgagtagctgggactacaggcgcccgccaccacgcccggctaatttttttgtatttttagtagagacgtggtttcaccatgttagctaggatggtctcaatctcctgacctcgtgatccgcccgcctcggcctcccaaagtgctgggattacaggcatgagccaccatgcccggcctgcagaaattattgaacgcgttttactagcagagaaagcattcatccttcaaaacaatagcagtaaaaatggcattcaatttcatcttgagatgaagagtcatttgctagtgggtagaaatcatccttttatctagttacaagatttgcttgtacctacttatattcaatttctgtgacttctttttcttttttgcggggggagggaggcagggagagctacctttgtgattacagtaaaaaggcaaaacaattgtatgttactattggtattactactgataatattagtaacaatattattaataagattatatattattaaaattgcttattttcatttagctctttaggtctggacaaatcctaccctaattcaattgggttattacaatatacagtgctacatgtaaggacactgtatttcctatggatgctgtaacaaattatcacaaactttgtggcttaaaacaacatagattctcttgtaattctggaggtcagaagcctgaagtgggtttcactggcctaaaatcaaggtgttggcagagctgtgttctttctggacgttctgggtaggaatccattttttgcccctttgtgcttctagcagctatctgtattcctcagctcatggccccttctggcaatggcatacttctagcttttgcttccattatcacatctcctctatgactctgacactcatgtctccctctttataaggacgcttgtgatgaagttgggcctacatgaataatccagaagaatctccccatctcatgatccttaatcatatctgcaaagttccttttgccatgtaagataacatattcacagtttcctgggattaggaaatgaacgtgttgggttgtgatggtaattgactctatgggagacattattctgcctaccataagcaccttagtacgatcttaggccttagtacaatctgtcctcttctagagaaaaaagaaaaccagtgtagcctagtcctaatgctgggtgtagaatgttgtcatcatatataaaaccaaggttaaaaatttgtcagatagatcggaagtcttgcactctgcaaatactggttctagcaacaaattaaagagcagatttaatatatgaccatttggagaagagtggtattaactgtacctgtttattatgccccttggagattccaacataagcatttattgtcaactgtgtgggatgctgagatgtctgcagtcattataaaggaatgcaaaactctaaaacaaagtgagacacaccttaattacataaattctgcataatcacacattttaatgatttgagtggaaatgaattaaggtgttggcttggctgtttttataaagaccaaaataatagtagcttaagcagaataagtttctcatataaaaatccaagctggccaggcatgatggtgtgtgccagtagtctcagctactcaggaggctgagcccaggagttcaagtccagcctgggcaacatagcaagaatctgtctctctttgggaggccgaggtgggcggatcacgaggtcaggagatcgagaccatcctggctaacatggtgaaaccccatctctacaaaaatacaaaaaaaaaaaaaaaattagccaggcgtggtggcgggtgcctgtagtcccagctactcgggaggctgaggcaggagaatagcgtgaaccggggaggcagagcttgcagtaagccgagattgcacccctgcactccagtctgggtgacagagtgagactgtgtctcaaaaaaaaaaataaataaaataataataatataaaattttaaatttaagccagtagtcactttggaatctagctctttgcttcatgagtcaggcgctcaggctctttctagcttgttgttcttccattgcctcagtgcttctgctcatgtgcaggctgcaggaggttcaccactcccgtatgtttgtttattctgtgggaaagggaaagtggaggccaagtagtttccttctgggggcatgatctggaaatcacagacatcacttgccctcacatcccagttgccagaacttaaggtacgtgatgatacctgactaccaaagaagcttggaaaggtgaactctagtaagcctccaagactctaggggttctactcctaagggggcatatagaatggatattggggacaatcagtcatctttttcacaagtacatgagctaaggcagtttgatctgagattaagccaacagacggtgcagtgtacctcaaagacagtgtgtaggcagagaatcagtgttgcccgtagccattgtcaggcacacactgaatgagcacatagtgtggcagcaagactggttttgtgttgtgtggcaaatccagcttcagcttctgattggattgataattgagactctatgggccaagattgaatctagtgttttctttatgatatcaatatagtttatgtatttttgcccataggcacataagcacacagagttgttcctggcagttttatttctgtgggtagaagtgaggggttatgtgttttataacctaggaaatgagagtttataaaggttttttttgagacagaatcttgctctgtcatccagactggagtgtagtggcgcaatctgggctcactgcaacccctgcctcccgggttcaagcagttctcttgcctcagcctcctgagtagctgggattacaggtgtgtgccaccatgcctgtatttttgtatttttagcagagtcggggtttcaccatgttggtcaggctggtcttgaactcctgacctcatgatccacccgcctcagtctcccaaagtgctgggattacaggcatgagccgccgagcctgacctaaatgttttctttcttacctttagtaagcaaaataatgttctcaattagagtgagaacatctggctagcataccacctttctggcaggggaatttacaattttaggtttaatgaacctattgagagccacaaatgtccctcctaatttctatttttacagtaaaatagttacactgtgaaatacataagattgataggactgctgtatttttctttatcatgttttgaaattagagtccaggcaagaacaagataaaatctgtttgctttaggtgttttattctggggaatgcagaatgtatccttttctctcaagatcaggacttctctgccacatgcctttgtgagtccagcacaagtccccttgggtggcccttctggttgagtctgacccagcgtcagccgactctcttgctgcccctaaacctgctcatgccctgggctcctttttctcagtgactggcaccacagcccgttcagctgccaagccaggaactagactcaatctacagcactcccctgcctcacgatcctagcagtcctcaagtttgatctcttctaccctagttgcctcacctctctgtcattacctggattccaatgccagcattccttgcttagaaagacctaacggcctcctttgaactctagagcctttcatcagccaaagtgcatctattgcactatcttagaattgcctggtcatttttctgtaactcacatctcactgtaagcacagtgaggacgtgacgatgttagtctctctgttcccctcccccagcatctggtggctcttcaccatcatcatggtcatgatcaccactgacatttaccgagcacttattaagtgttgagcagtgtctgtgctaaggcttttatagatgaactcattgaactcggtataatcttttgaagaaggtactgtaatattactatcctcattttactgagaggagaccaggacatggcatggttagatgtcttttccatctggtagagataggattttgaggcagaatttgatacattcttagccaccacacactgccgttatccagacagtaggtattcaatatgaatttattgaatttaatctggaataatttctcaacttttttttgtcttttagtccttgacatttttgaagaggccaggccagttattttgcagaatttctttcagtttagatttgtctaattgtttcttcgtgattaggttaagattaaacattttggacaggaatattccataggtgacactgtatccttctcagtgcatctcagcaggagcacagggtgccagtttatcccatcattggtgttgcttttttaagttcataattaacctaaatttcagaggctggtaatttctggctttaccccaaattcatggactgtaccctatttagagcctactatatctcttatttttcactacacaatctattttttattgtatctttatagcatatttagaggtagatatgggactatgtaagtttagtacggtttgctgaactttggaatgtttttataatcataatattttgatcaagatggaaccttagaattttcctctcatttggattagaatgttaattctatactaggtagttcttgtggctagactgttgcacttttgaaggcagatttaagagttccactttcatgtggtccagccagctttcttctgtgtctcagaggtctccttactctgctagctgcctttacttttagggattaatggtatggaatagtggctataattgcaagcatattaattaccacaagtggaaaataagttctaattatgtattctatattaacttcatataggaaaaaacaatttttaccttctgactgtagatgttataatgataattttaaaaggcaccacagaagagggagtgggaaattgtttagctacatgaggatcatcctttacaaagggccattgtgaggtttcttttggtaattataaattgtagctatgtgtttaggtggagaggctttttttcttgataagaaacatttggggttatttaacttaggaacttaaaatactttgaattttgcaacttaagtgacatggtgacccttgattttcaccaagagtatatctgattgatggaaatttccaccctaggaattgtacatttttgtgcactttcttttcatggatggtcgactttgttttcttgacaaacatgtagtgttttatcctcagaactagtacttttttcttgataggaagaataatttgttttgtcaatgattaaaaattatcctagaacgcagtcactgccaaggatgtggtttactcatatccgtagtttgggaacaaaattatgtttcaaactgtaaggttggacatgctggctcctgcttgtaatctcagaactttgggaagccaaggcaggaggatcgctttaaggccaggagtttgagaccagcctggggaacataacaaaacctagtcttcaaaaaaaaaaaaaaaaaaaaaaaaaaagccaggagtggtggcacacacctataggcctagctattcaggaagctgagacagaaggatctcttgagcccaggagtttgaggctgcaccaagttatgattacaccactgcattccagccggagcaacagagaaaggccctgtgtcttaaaaaaaccaatttaaataaataaataaataaataaataaataaataaataaatgttaagcacagccaatagattaatattacataggcagaggagaatctgcttgaccctggtgatgatttggtctttgctttgtagaacataaacttatttaaacagtgacttaatgtattatataaggtgaatctgaatgagaggttttatgcttattgtatactgtggaggaccagtctgcatcctctctattcttttgggtttagctaatgttctggcacgtagtaagtacttcctggctctctgttgactaagttagcatattagagttctccagagagaataaaaaggatatatatatggtcagtagattccatatccatgaattcaactaaccaccattgaaaatatttgaaaacaaatttgcattcgtacccaacatgtatagatatttttccttgtcattccctaaacagtatttcccaaacaatgtaactatttacatagcatttgtattgtatcagatactctaagttatctagagatgatttaaagtatgtaggaggatgtgcataggttatatgcaaatacgataccattttatatctagatttgagaatctgtggattttgatacctgaaggaggtcctggaaccaattccccttggatactgagggacaactgtacaactgtttagatctataagaggggatttattaggggaattagcttatgtgattatagagtctgagaagttccacaacaggccatctgcaagctggagaccatgggatgctggtagtgtggctcagttcaagtccccaaggcctcagaaccaggaaagccaatgttgtaactttcagtccaaggctgaaggccaggcaacccggggagccactgatgtaaaccttggagtccaaaggcctgggaccctggagttctgttgtccaaggcaggggatgagtgtattccagatcctggagatagaatgacacattcacctttttcctgtttctttactgtcttcaccaccatccaccagactggatggtgcctgcccacattgagggtggatcttccccacctagtccgctcagactcacatgccaatctcctctggaaacatcatcccagacacattccaaaacaatgccttacaggtttctagatattccttaatccagtctagttggcatttcaaattattacagtgggaatacagttctttagagtagagagaagagcaggccacaggaggctcaggcaggtggccgtagcacccaacacagacctaacagattgtgtgcttcctttagaagggccatgagggcaggggatttcttgttttgttcattgctgtatctccagtgcctagataagtgtctggcatgttgcaagtgcttaatacatgtttgtggaatgaatgcatgaatgaacagagctccaattagtgtgtcgaaaccaggatacacatgcccctggggatacgtgggcattctaagttatggtaggtagcagtgataggagtctaagaaaatcattgttcatttgtgtggattctcctttatcgcttcccctttcacgactactctattttcagttaggagagaaaggcgctactctctcatcctaaatcttggtgcattggccttggaaataaaaacctccagggcacaagccaaaggaaaaactcaaaatatgatgttagtgttgagaaagtgaatgactctaatattaccagataacaaaccattttcagttctttgctttcaataaaacaaaatatactcaaattgtcagctgatctttaaaaatattgataattcatgtgcaattttttgttacataattaagaagaagtccaaagaattgaatgattttacagtcgctaaacttctattcctattttatttatgagagcaggtttcgtatattttatatctacattaaaaaatgtgaaaaataggaatagaactgatgctgaactgtatctcatcctagtgataaataataatcctcaggccgggcgtggtggctcacgcctgtaatctcagcactttgggagaccgaggcaggtggatcaggaggtcaggcgttggagaccagcctggccaacatagtgacaccctgtctctattaaaaatacaaaaaattagctgggtgtggtggcaggcatctgtaatcccagctaatcaggaggctgaggcaggcgaatcgcttgaacctgggaggtggaggttgcagtgggccgagatcgcgccaccgcactccagcccaggcgacagtgcgagacaccgtctcaaaaaaaattaaaaataaaaaaattaaaaaatcctctatgttgtgtaaataaaaatataacctatccatctcattaagagatgtattactgaaaagttttactttttatacattatggatttgtcaacatttattatatattaattttgatcaattgtggaccaataataattttaggaacttagtccataagagaaaatttaaaaatattgaaaacttacggccacaggaaatgtaaaatgtgagactgcaattatgtacacagtttatttgtggggagcatgatagagtgatcagtaaaagatttacaagcataaaaatatgttattgaagttctgctggggatatggaaaagatgtatgaattcaagaaaaaattaaaagaggatatatgactgaaaaggagcttgttcttttattttattttattttattttattcttattatactttaagttttagggtacatgtgcacaatgtgcaggttatttacatatgtatacatgtgccatgctggtgtgctgcacccattaactcgtcatttagcattaggtatatctcctaaagctatccctaccccccacccctaccccacaacagttcccagagtgtgatgttccccttcctgtgtccatgtgttctcattgttcaattcccacctatgagtgagaatatgcggtgtttggttttttgttcttgcgatagtttactgagaatgatgatttccaatttcatccatgtccctagaaaggacatgaactcatcattttttatggctgcgtagtattccatggtatatatgtgccacattttcttaatccaatatatcatcgttggacatttgggttggttccaagtctttgctattgtgaatagtgctgccataaacatatgtgtgcatgtgtctttatagcagcatgatttatagtcctttgggtatatacccagtaatgggatggctgggtcaaatggtatttctagttctagatccctgaggaatcaccacactgacttccacaatgaaacccatctgtacatcaccatcatcaaagaccaaaagtagatgaaaccacaaagatggggaaaaaacagagcagaaaaactggaaactctaaaaagcagagcgcctctcctcctccaaaggaacgcaattcctcaccagcaatggaacaaagctggacggagaatgactttgacaagttgagagaagaaggcttcagacgatcaaactactccgagctacaggtggaaattcaaaccaaaggcaaagaagttgaaaactttgaaaaaaatttagacgaatgtataattagaataaccaatacagagaagtgcttaaaggagctgatggagctgaaagccaaggctcgagaactacgtgaagaatgcagaagcctcaggagccgatgcgatcaactggaagaaagggtatcagtgatggaagatgaaatgaatgaaatgaagcgagaaggaagtttagagaaaaaagaataaaaagaaacgaacaaagcctccgagaaatatgggactatgtgaaaagaccaaatctacgtctgattggtgtacctgaaagtgacggggagaatggaaccaaattggaaaacactctgcaggatattatccaggagaacttccccaatctagcaaggcaggccaacattcagattcaggaaatacagagaacgccacaaagatactcctcgagaagagcaactccaagacacataattgtcagattcaccaaagttgaaatgaaggaaaaaatgttaagggcagccagagagaaaggtcgggttacccacaaagggaagcccatcagactaacagcggatctctcggcagaaactctacaagcgagaagagagtgggggccaatattcaacattcttaaagaaaagaattttcaacccagaatttcatatccagccaaactaagcttcataagtgaaggagaaataaaattctttacagacaagctaatgctgagagattttgtcaccaccaggcttgttcttttttttttaaaaaaagtaatgtttttcaaatctctgtgatacctagagagatttttatcaatgtaagggaatgattaacagttttatttataaatctggatatttataacaagttggaaattatgtccttatgcaacttatcaaactagatgtcaacttaaaaatggataagtgagtataagtatatagcttcagaatattaatgcagaggatgctgaaacaaacaatttcgaggatcattgctttaaaacagagctctggccaggcgcggtggctcatgcctgtaatcccagcactttgggaggttgaggtgggcagatcacaaggtcgggagatcgagaccgtcctggctaacaatgtgaaaccccgtctctactaaaaatacaaaaaattagctgggtgtggtggcacatgcctgtagtctcagctactcaggaggctgaggcaggagaatcgcttgaatctgagaggcagaggttgcagtgagctgagatcccgccactgccctccagcctgggtgacagagtgagaccccaattcaaaacgaacaaacaaacaaaaacaaaaacacagctccatccccagggagtgattctgtagctctgtgttgagacccaggaatccaccatttaataaatatccagatgattctgctgcctaaaatctttgaacacagatacagggaatatatggaaattactttttgtctgcctgaaaatagagccaattattttttgcttctcacgtgtgtgtgcattttattgttagtaatgtgatggcaagaagcttgctttttttgggtcatcttctattgctgctgctcattgtgttttagtatctcacatggttttcctgtaagttcatttcatcttctaactctccaagataaaaccattttcctgatgtcttgagactatcacaattttattttaaagatactttgttctttagattaattgactatatttctaaatgccagcatttcaaatccttctatgttctgttttctttttgctcagtgaagattatttggttttcagccccatgtataaacccagatctgagtattgaataaccaaacttttagttgaagtaacaggaacccacttaaaccactaaatacagagagataatagatttttccggtttctgggatttctcatgaaatccaaaagcagggacatacccatactcaggaagacttggaaccaaacccaggaggtcttagtgactctgggatttttgtctctactttgtgatttttctctacacatctgcttctttctcaacaaactgacattttctgctactttgcctacaaagcaggcagaagctggtcccaaggtcatctattatgtacagccacggggagaggtctgctctcatttccaactctgaattcccgaggaggtggattttcctaactctgttctagtcagttgaggtgggattctgttgttcaaatatggctgctatgactctgggactagtgaaggtgcttaggctcaaaagatgttgctgcaactggcagttaatgaagttagtcgtttctctttcatacattttaagtgtgaggcaaagcagtaagcctgacatggagccgtttagaacagggatctgaaataaaaaactggatatttagtagttctgtgactttgggcaagtcacttaacatctctgaacccctgccttctcatctgtaaatacgaatagtaatagttccaacctcacagggttgtggtggaggttaaacgaggcttaatatggaacctgatatatagtaactgcttcgtaagtgtcagccatcattctaaaactcatacacaaagtcagtttgtagtgttttataaaatgtgttaaggggctttctttaagtatgtctgtctaaatacaagtatttctaaatatatggaatagatgtgcttgtaaacataaacagaaaatctgagtctaaaaaccttttgtttcactgaaattttcttggcaaacttagctacaatagttaacattttttatataaatttgaaagggcatgatagaaagtaccataaaagtgcaaaatctgaaataattcggagtccctcttcaatttaaaaagaatcactatgatacattcaattgcaaagtgcctgaatacagctcatggatgttaccatcggctgaaccttatctctggcagaatttttgcaagtgtaccatgctcttactttaatatttgtgattatttaggattgtttttatgtcccctaaaatgtcctgtaagtagtctttaaagtggcagcactcgtgctcaaaaagattttcttttaaagtcagtaactttctaaaggaaactaggtgagttaaaatgtcatacagaaggccaaacaaccactacattccagaaagagtattttgtaaaatataacaattgtactaagaacattaaaagtgatattaaagcaaaaatgttgaaagggatcagcaaaaagagttgggtttttttaggggaagtctgatttatacttttatttaaaaaaattacagcagggagttgatgtcatgagctgtgcttgaaaaagatgaccttggggcaaagatcctgcaaccagggtgatcagtccattcattcagtcagtgttgaacatttaactatggcatggtacttgaggcagttggcataaaaccctgaacaaagacaaaatctctccccttgtagagtttacattctaatggggagagacacagtaaacaataaagatggtaagtaaactacatattgtatgttagatgataattgctttggggaaaaaatagcacatgataaaggggttgtgagtatataggaggaagttgcattatgaaataggtggtcaaggtaggcttcatggaggaggtgagatttgagaaaagtcttgaaggagtgagggagttagccatgtggatatgtagggaagaatgttcctggcagaaggaacagcctatgcaaaggtcctaagacaggagcaattctgtgtttgaggaatttttaggagccaatggctgaagcagaaagagtagggtgagtgactgagagaatagaggagatgaggttaggaaataagaggccagatcatctagggctttcaggcctttttaaggactttggcttttactcttagtgactgtgggggtacctcatagggttttgagtagggaacaatattgactaacttgcatttttaaaggatcactctcgctgctgttttgagaataggctaacctagggcaatgttaaagctgggaggccagtgaagtattatagtcattgtagagatgaatttggtttgaacagtgtgataaggggagaggtgacaagtggtcagaatatggatgtattttggagactgaatcaatagaattttctcatggagtggatgtgcggaagaatgaagagaggagtcaaggattcatatgggggttttttagggaggagaaaggatatgattttcatcaagtgaaatggaggatgtattgagcagctttcagagggaagacctaaaatcctcaggaggcttgtgcagtaatctaggcaaaagatgattaggtccctaatggtacagggaatgaaaaggtggagacagagtcaagaaactttgtagatattcagcaatcaggtattctgtgatatactgaaggagttggtagaggtaaaaatggagaggttggagtttaacatgacaacaatttggtggtcagaagaaatgagtggatggtaatgcttttaactgagacaggggacacatagaaggagtaatttggggagcaaagaagatgatcttgcaactagatgtgtgagttggaggtgccatgttggaaatacatttttgcagcctaaaagcagtattagaaatgggggttgtatggatggggttgctctctgcttggttcactgctctatccctgttgctcagaatattgcctcactcaaagtaagcattcaatgatcatttctcagatggatggatgcaattttggaagtcatccaaatggagagggttgctgttttacccttttggcctcattggttcattagatggcttgctccagtttcctgtttcctttcttcgtggaaccatagggttatagacaataatgggctgggaagcatacatacatgcatcttccttattattttacactctgtgattaaaatgctccctttccccttcacccttatctttttaaattatgtgattcccttttgtttttctctctgcactgtaggggtagaaaaatctttaaacaaaagttgcttcattgtgtcttacttttatctaatctttttttatttgttaacagtgacagtggttaactgggagattcgaactgccatttgacttcagctttatctgcacaggttcaagatgcaaattattaattacagttgtgttattacaaaaccactaatgatattagaattccttttttgcatttctagtttttataaatgcataattcacttcagcctgtgattatactttaaaaaaaaaactaaaatattgtgccataaagaaaaaaactctaaaatattgtaccatgccacagggcttgcagtctctgccttaacattttcccaccaatggtggcaacaaagtggaaaatttgccatattgttatcctactttcccaccccatccaaatgaattcaacctggatgagaagataagccagaagttttactgcccagtgactccctttgtgcctattatgttcccaaatactttttgttgccagtgcccggcaaacagaattaaagtgcctgttcattccactgaatttcattatctggtttcctgtctaaacctttaatacgaaagaaagacaaatggaaattttttgtggggaaaaaataagtgaatttagaaattaaataaaacttttaaaagtttggaacatgaaaattatttattttaatgagatcatatgaggagtacaagaaggggctctcagctctgcttggcaaaaggatcagtatactttgccattattttacttaatagagataggagacaataattattagctacaagaagaagaaataacaaaactagcaacctctagacataaaatatgaagtagaaatatagttattaacaggaatgaaaataggtaactggagtttgatccattttttagggaagaggcagtttttcagtaataggttctttgagagtctcaaaatcacttccataaaggcagacagttttgtggatcacaaaggcacgttctgattcaggccctgctgtttaattgaatgacctggggtaaaatattttataatctgggccttctcttctgaaaaacattgagtttgaatgaaattctcactattctgctcccaattctgcttcttaagagtccagtcttggctataaagcatcattgaaaccagaggtttacatggtggcttggatcttggggatgaaaatgttgttgagagacaggaatatatattttaatctaggattgtgtgtgggagggtgatgttttatatacagaaaggttaggaaaatagacttcttaaatgagagaggttgagataccagatccttccgagaaatggcccttaacttacatgtgagtatttatttcaaatgttcatatttttccattgatttaatgatttttagaaaaggtcttatattgaaaacatacattatcccagataaacttagtctattaactaaataattggatgattaatttaacttagcacattatcctctggaacacattaatgtgaaacttcaatttgatgagaaccaaggttaccagcctgtcattggaattttcgcttgttcattcctagatgataagagcaagtgacccccaccctcccgaaaaaacggtgtggtcatggggtgtgtgtgtgtgtgtgtaagatctggttcagtaccccatataacaggtaagtatggaagcattcacttatctgtcctgagcctcaattttctgctgtatgaatataaaggacttgactagatattctctggggatattttcagtacatatgctacatcattacaaattgtaataataaaacccagacttctgaagttctctctttttttttttgcatatttagtcccaatattaacatacccaacatatgtccagttcagtttgacaaataactattgaatatctactatatgttaagtaaagtggttggccctagaatcaggacagcatcctgacccttcaggaatctaccgattattttaggagacctttctgagttagcttaatatatttgagccgggtgagataccttatcaaaaatcctacccagtgaattcccatggttcaactggattgtgaaatgtaagtactagatcacttaaaaacaaactgtggtctgttaatgggtgcagctggcaaggaagaaagtgttattgcctatagaatatcatagtcctggtatcttcccataggatggatgtggcaggcaatgctgtcttgctaatgaccagttgtaccatgtgtctcttactgggtctacaaggaaactcatggtgaagttaccttctgacattctcacacttccccacttgcagcccctcattcctcacaaatgagggcaagacctgctacctactggcctgtcttctaggggtttagatcagaagcggggggaactaatttatttttttctttggctcatactgttgaagcctattcagagaagcatggagtttactcattatccaggctatattccaagttctgagattgggatacttgggggattggtggtgtcaattaatgatcgagtataggaatgtaagtgctgatatgactttggacacatttgtcacttgtcctaatctgcttctgtaaaacaagagggctggactgtagcgtggaagatgtctgtgattctgtgttcagaagaatgccccttgagtcattgtcagagagtttcatcctgtttagagcactctgccctcttgagataggaaaaatatgcattatataaagaattttttcaaatcagggttgaaaccagtaggacttttatttctttgttaagtggtaaatcagcctaactagaaccctgtggtctcttgggatttatttctacttggagcattgtggtctttgagttgggttaatatgaatggagcttctaggacttgttcaactcttgaattagttcctgaggtaccaaaagtgacagaccagactctgaacagcatagacatatcaaaagaaaacgatttggaattatggaattcattttaatgaatctgtaatgtcaaatagagtggtgacttagtacctatgtaattgttatgataatggttgaaggaatcacactttcatcccatctaccctggttcttccttttctgctagtacagagaagctggtttgcatttaagctcagagtggctctgagtaggagtaggacaaggaaagaaagaagagtgcagagtgcaggatgtgcattccagagtggcaccattaaagatgcgcatgctgtatacctcacgctaggatggccaagggaacattaacgtgctttaataaatgtgctttcctctgagactatgggcttagacaatggtttgcatcactcttgaattctaacacattcagggtttatttgggggaaattatttcaggttgacgaatgaattctagcatttcctgcattcctgtttgtctgtattcacagaatcagttgtaccactaaaagtagtggaaattctaagtgttttgggtaggcatcctcttccatgattcttaaaatattgggtatctgtattacaatcaagttgctggccaggaacgaaaaggatttttgctcattgtaaagcaatgttataattttgctgtgatgttgtaagaccatgtgataatgttgtatactgctgattgtcctatttgtcagatagcacattacttggccattctttatgcctgtatgttctctgagatacagaagagttattgtagtcatttacctcccctgcagtgtaggggtctatagatattgttgatttttgggtgtctgaatgttgatgacctcccaaccatgaaaatctgttaaaatcctggactgtttcttttttccactcatctctaacctgtttctttcacttgccgtcacttcagggaatttcaactagtttcagtattgggaaggagaagatgtgtgggataaataagctaatagaaatgttgagttgctgaaaaatcacatcctcattcctggaaagaaatgatttaggggtgatttgtagttttccagtttacttatatatctatttctctggtgtgagtcatcaggaatggatgacagaactgtttgacagcagccaaccccaaggttaagtttatatgtgtgtgcatatatcagtatgtgtgtgtgtgcatatatgagtatgtgtgtgtatgtggggtgagtgagtcctgcctattcaaatgggtgagtgcccatggttgaccccaggctgttctgttctttgtttagaggcctgatgaatactgggtccaagatgaatgatcataggtgcaccctattaggctctaatcattcaacgtaggcctctctgtcctaaattgagagccaagaggatagcttggctggattgaaagtgtctccactggacaacaagggttgaagtagctgtctagactgaatacagtcttgcccctttctttgaatttgtctatatggttgttcatgtttcaaaatgtgtgttttccttacagagcctgaggcaaccacctctggcatcatgttctccccattccatgacactgcccccgtttccccacctcagcttagcctggaggggctcagggtgggtgctttgggcctgtgatcttcatgtttcttggcagctttggcttgatcactgaatcttagggagaatctgtttttcatttcatgcccctctccttccattccccttctgatctggtggctttccattactccagaggatgttgagctgcattggggacttttttggccccaggtagaattaagtgccctggggaatttgtacattctggagctattctagggacagtatgggaattatagttgaattaggatcagcttgtgatctaggacttcctttcaagagaaggtggactctcttagagtgtagttctttaaggattagtaattgctcttttcccagcaccttgatttttctctatgaatctcttgcctcagatcccctaaaaaaatggggctagacagacatagctcgtgaataatgtgaaaacttgatgtccctccatgagtatccatctgtaacgggaggatgggttgatttctttttgagacaggttctcactctgttgcccaggctggagtgcagtggcacagtcacagctcagcctcccaagttgaagtgatccccctacctcaggcttctggagtagcttggacttcaggcatacaccaccacgcctcactcataaattttttttttttttttgtagaaacaaagtcttaactatgttgcccaggctcgtctcaaactcctggactcaagcgatcctcctgcctctcggcctccctcagtgctgggattacagtcgtgagccactgctcctggcctggatgggttgatttataaagtgctttgagctcagcagcccgtgtgattctatgactgtgtgtctgacttagccagtgtctacagaacagttcccgtacctccacttaagtatgttttgcaaatacaaggtgtttttgttatggcagtaataagtcaatactcctgtgtttatagacagctctgaaaaaaaccaacaggaaagcagaaaccaacaattgtggtctgaaaacaagtacctatccctgttttgcctccagcactttctttgtgtgggcttggaatagatgcaggtggtattcaccaacaggaaaccagtatcctcttctctgacatgcaatcagatacttgggttatttcttaccaaaagtttttgcatttgtttttaattttgaaagtaatatatgattataataaaaatgcatcatacaacttatctgcttatttatgttgaaattggctccacattccacatggtcactggctctgatcctgattcatagcacctcagatccagagcctacaagcacgactgggcttccaaataggaattcctaataaatagaaatttggcccagtttatcttagcagctcaggtcaaaagtcaaatgttggctttcctaggggtgtgttcctctttggtgaagtgttggctttgatccttctgctgagcctggattttgggacagagatatatatatctcctagtagagatctttcatctctttggttaagtgtatttctaggtattttattttttgtagttattgtaaaatgggttgaggtcttgatttgattctcagcttggtcgttttttgtgtatagcagtgctactgatttgtgtaaactgatttggtaaattgagactttactgaattcatttatcattggcagagagagtttgacatcgtcttttccaacttgggttccctttatttctttcatttgcctgattgccctggctaggacttccagtactacgtttagcagaagtggtgaaagtgagcatccttgtcttgttccagttcttagggggaattctttcaacttttccccattcagtatgatgttggctgtgggtttgtcatatatggatggattttattattttgaggtatgttccatctatgcatagtttgttgagggtttttatcacaaagcaatgctggattttagtgaatgctttttctgtgtctattgagatgatcatgtttttttacagctctgtttatgtgatgaattacatttattgacttgaatatgttaaaccatccctgcatccctgggatgaaccccaccttgatcatggtgaattgtctgtttgatatgctgttggatttggtttgctagtgttttgttgagtcttttttgcatctgtgttcatcagggaaattgatctgtagttttctttctttctttttctttttttttttttttacattctttcatgcttttgctatcagggtaatactggcttcatagactgagttagagaggattccgtctttctcagtcttttggcatagtttcagtagggttggtaccaattttttcttgaatgtctggtagaattcggctgtgaatctgcctggccctgtgatttttttttgttggcttttttttttttttttttttaaactgattcgatcttgctgtgtgtattcttctgttcaggatttctatttcttcctgattcaagctaggagggttgtaggtttccaggaatctatccattacttctaaattttctagtgtgtatgcatggggtgttcatagcagtctcaaatgatcttttgtatttctgtggtgtcagtggtaatgtctccgttttcatttccaattgaactaatttgaaccttctctcttctttttcttggttagtgtagctaatggtctatcagttttgtcttttaagagaaccaatttgttttattaatcttttgttttgtgtttcagtttcatttagttctgttctgatctttgttatttttttttttccttctgctagctttgggtttggtgttttcttttgtctctagttccttgaggtgtgatgttaggttgtcattttgtgaactttcagacttgttgatgttggcatttagtgctataaactttcctcttagcactttcctcttgctgtatcccagaggttttgaaaacttgtgtcattattatcattcatcttgaagaattttaaaatttccatcttgatttgttaaccccaaaaatcattcaggaggagattgtttaatttccaggtatttgtgtagttttgagcgtttgaaagtaattttatacaatatttttaaatatttcattcatgaaacaaagttttgactgttttatgctgcagcccatcacatgagttcaactttggaattctccatatgtggtatcatgttagcgctcaaaaagttttggattttggagcgtttcagattttggattttcccattaggtgtgctcaacctgttatttatacttccaccagcttagtatgagagaaactatccttttcttcacctccttatctcaactctagatgttataatttaaagggagacgaaacaaaatctttactacctaagataaagtatcttgtggatttattaagttaatagtaattattaatttgcatcttttactaccagtgaattaaaattttttatgtttatagggtgatttgtatgttttaagcattctcctttgttttttattttttatgtttatagggtgatttgtatgttttaaacattctcctttgtttctggcactttccttttaaacttccctttccagccattaaaacaaacagtaaatgcaaggataaaaaaaaaatgacgtggagtagagtttggaacattctctaaactaattatacgtgtgtccatttcagtaactagcttttcctgggaacataagttcctggaattgaaggattggagcagtgaaaaaacaaggttacagggtcatgcctataattggccaaggtggttagctatactctgtgccatgtttccagaccttgtctctaaacaggcgtgatagaaaaacattcagatcacaacgggactggagtgaggatttgaaagcacagcacggagctgtgaaagactggaaaccaatttagagttgctagtgtccaaagcagaaaggagagcacagttgctctaatgcaaaaagcaaccttcactaatatgatttgcaaatgataagttcctattaaactttaggtaaacaattttgtgataacatttatcccctgcccctctcccctgttgattttttctggatgaggaaagcaaggctgtgccagccacgtaactcgtgtaaggacacacaacagtgcttatgtctccatcttcaggtcaaaccactttatgaagggcctactacatgccaggcaccaggctaggtgctagggaattgaaaggacccttttcataaaaccatcatgagggtctttgtgatttagagctcttctactaaaagaaactatgcatttactcctgtcaacttctttatgatttatgtattaagattagtcataaaagaaaatacagactacagactgttgctctggttggtcctcaaattcatttagtggtgacagagcccctagaagttttagcattcttcctgtgacacctcaaaatgttaaaaaataagcttcgaatagctaatgtataattttgtaataagtcagactccttatataatagaggcttgtgtagacaagctatatagcaagtacccaaggttacaaaatgtgagtgcatcatgaaattgacaacaatcttcttaactattcctccgtgttagttgacaaaggatcttcattatctgattttgggtagtagaatgactctgttcagggcacagagaatcagtgatccacggaaacagagtttgaagatccttattttaatctgcaaaagattgtcttaattttgaaagaaaatttatgcagaatagagtccagtttttctggctctatttcatcacccccaagctcctatcttgcaatgctcccatgtcttaagaaacttgttagtgatcttcaaagattgccaaaatttgtggaagttcttttagtttaggaaaataatctcactggtttcttaaccttatgtaggtacttataatgtatcatctgggctgggcatggtggctaatgcctgttatcccagcactttgggaggccagggtgggagggttgcttgagcacaggagtttgagaccagcctgggcaagatgacgaatcctgtctcttcaaaaaatgggaaaattagctggacgtggtggtgtgcacctgtagtcccaactacttgggaggctgaggtgggaggatcacctgagctccgaggtcgatgctgcagggatctgtgatcacgccattgcactccagcctgggtgacagagtgagaccctgtctcaaagaaaaaaaaaaaatctgattccttaagtcaattacataactaactgtaactttaaaattaacctatttccagttttctcttgaggcttggcagggaacccacttgtgtttgaattgagtgagtacagattttcatttggtggtactttgtttttatcagttcttcaatcttcctaacctctactcccagctccctgggctggtgttgattacatggggttacatgttgattacttgggctgctcttggtgccctgtggaagtggtatgacccagcttcataatccattatttgaagaacgtgagcccctttaaattttcaggcccaagagaggcattggaatgaaacaggagtcatatcactccccttgagctaaataattacctcttgaagccacttgctatttgagtgctatgctgactgctgccgagaagccataaaatgccgtatacctatagttcaacaatgtatagccaataatcaatgttatttttgtaagacaatgagaattcctggtgaacaatgattgtaattgtcccctctcctgattcttgcttttttaaaaaaaaaaacttgacctctgggccaggcatgatggcttatgcctgtaatcacagcactttgggaggctaaggcgggtggatcacctgagctcaggagtttgtgaccagcctgggcaacatggcaaaaccctgtctctacaaaaaataaaaaacattccaggcatggtggtgcgcgcctctatggtcccagctgctcggaaggctgaggtgaaaggattgcttgagcccggaggcagaggttgcagtgagccgagattgggccactgcactccagcctgggtgatagagtgagaccttgtctccaaaaatacaaaacaaaacaaacttgttctctcttgagttctctggagcaccccctaaggcaacttggaagtgtccctggctgcagtcttcagccttggcccaaatgaactccatgttaattttgcctcagcttcttccttttagacatcactttgaccaatcctgattgaccctcatcctgtgacatgaaccctgtcggtggttaaactggtgagagaaatcttgtcctttgttaaatgcatggtatctttattaaagacttgtttgctgaaacttcagaaagtccagggagcaaaagcatagatgaacttctaagtagcaagtgttttccttttaaaaagagcaaaataagtatctaaaacctggacttcagaactttcttgatgctattttgcaacagaaaggtttgaagaaatgaactggattgcacaaggtgacttaatgaggcagtctcttccataaagaaaatttaccttaactactagatcaacattccttttgcctggagtgatgtcgagatccttttactaaatgttaaatgcattcaggagtttcctaacacattgccacctgcttagtttggtttctgttgtctgcctgatgactcacagacaatctctccagttactataaggtccatagccctttgatcctagtctgcatgttgctgatagcatggaatatcatttcttgtgttcaataaggaaaaattcagagaattttaaattagtctttttcatttattcattaaacagttgtttgacgtggtcctctgcttcactggttgtcaactttgattgactatgggaatcccatgggcagcaaaaggccaatatctaggtcttaccccagggattctgatgtactaattggtttgtggtgtggcctagcattgggattttttaatgtcctccagggtgattctattgtgcagacaaggctgagaaccactgctctaaagctgattgtgttcttaattggggacacttcatgcttaccttattacactacaggtgttcttaaacaggacagtgtggtggacactgaagaagttaaaatctacttgttggatccttattcttggagattctgaatcagtaggtctgaggtctttaggaatagctccttaggtggcagttctgatgacatccctttatgagacacagatacagaataaccatttaaataaactttagaaatctagtaagggtacagataagatgccagtacagtttatcagcagcctccgttttctgccatccctaggtgctgcagtggaaataccatattacaaactgttgctgttgactaatgctaatattcaattactttttaaaaagcctggctttccttaatttaattctgcttgtggaaaaacatactcaacaaacaagagtgggaaaattaaatgaaaatacctagatgtttgtcaaaagcctacagacgtatctctttctttgcactaaagttcaaagcatgcttaagagttgtttggccaccttagaattttgcagtgtgtgttttatcataaaaagtgtgagccagtaattaaagctttacatcattgtttacttatcttcttccttcttacctgaattaggggaggggctttcaagtgaatcactttctaagcctctgtgcaaattagcagtgttgtgtttccttcagcttttccaagccatgcttaataattaggaagataggctgattcaatttaatatagcatctgattgaaagcatttgaagttagattactaaatatagtaaaactatatttagttaaataaagttagcctgtcactgttaggaggtggaccttgctttttataacttctttcagagagtgaattgtgtttcaggtagactaaaatggtgaccctagtgaccttcactgtgcctacttgtaagtctagatctctccagagctgggttgttctgggatcagaagatgtgggatttccagttagtttcacagccaacatggttctccctccaggctgcccccaggacctgtggactctgctccatcttcaatggccctttgtcaccagctcttggtgttttttttggtcccgtccctactacccatgtccctgtacttctccctctctccaccatcatgtctctcatcaagaccaccaaaatcacagaccttcgtctcttagcgaccttcatttctactcctcagaacttactgaaccttgttcttcccacttcagagactgcacaatcaggtattttcttctccaactttaactaaacttgcttctcatcatcatgctgattttgaaaatctgatctctttcctgttctccaattctgtcagcctcacccaaacctgctgcttttatttccctgcttagccagaagccctgtgatatggtttgggtgtttgtccccccaagtctcatgttgaagtgtggttcctcgtgttgaaggtggggcctggtaggggtggttggattgtgggggtggatttcttatggttgatttgatgctgtcctcttggtgctgtcctcatgatagtgagctctcaggaaatctggttgtttaaaggtgtgtggtgcctccctcgacccccacctcttgctcccactcctgccatgtgacaggcctgctccctgctagccttctgccatgattgtaagcttcctgagacctcaccagaaacagatgccagtgccatgcttcctgtacagcctgcagaactgtgagccaattaaacctcttttcttataaattacccaaactcagatatttctttatagcaatgcaaaaatggtctgacacaccctatgaccagtcattgaatatattctccacaggacccttgagatgcagtcccaggcacagccactctaactcggtttttctcctggcaggctgccaattgctgtgtgacagaaactgctatagccctgttggctggctttgatactgattaattacttacaagctctcctggctcctctgtcgtgccttaggaattctgtgtattcctcagacaactagggattgatttccttcttttctcctacagctgttaaagttttttttttttttttttttgctcttaaccacaaccacacttctcctttcttactctcagatatgacctcatgaactccttcacttagaaactagagatgggaattcttgcacttttactctccttcaagtgtttctgtatattgttacctatctctctccttccttattcccaaggttaattggttacctctactcttcccgttcccttctgaacttttttctctgttatcttcacttcctcttatatcttcttctgtctttccttcttcgttgactcaagtatcttctattctgaaaaataccttctctgctctatttccctgccattgcacatttgactcttccttctctttactgatggactttctaaaagagatgtacatagaaagttctacctccactttttttagccaactgcaactgggtcattagttggactctactacctcagctcaactaattttatatgcatccacttcttttcagcccgcatcctgtctgccaagttatgatactactgatcatttttcctttggcttccataatacgctatcctaatttttcttctaatttttgggttgctcttcttctgtttcctccactggcttcttttccatcactgattcttttttttattttttattattttttttagagacagggtctcactgcagtgcccaggttgacctcaaactcctgggctcaactgattctcccacctcagcttcccaaagtgctgggattacaggcgtgagccaccacacccagccgtcagtctggttttttaagtattaccagtctctcagtgttccatgcttggcctttttctctttttctgtcttggggagtgaattcatctattcccatgacttgcttcctttgaatactcattagttcaacatatacacagctagcaccaggcactaacagttcagagatgagcaagaccaactcattcagcaaatattaaagaacacctagtatgtgtaagacattgctctgatgagccagacaaaattcttgccttcatggaacttacattcgagtagagaagacctacaattagcaaataagtaaatgaaagaatgtcagatggtggtaagggctctggtgattaataaggcagtgagaaaaaagagtgtatgggatgggagtcagagaaatttatttccctgtaagggaagaagctataggagtaagccatgcagacagtggagggaagtcctttctaggcagaggagacagtattgcaaaggccctgaatcagagcaaccttggttagtaagtgaacagccaggaggccaactatggttgcaggagagtgagtccgagaaagagaagatggagataggtaaggttggaggtggggtgggataggatggtgaagagagatggtcttgttggtcatggtaagagatagttttgttggtttgactttgattctgagtgagacaaccctcatgacctctcaaaacccagttatttcccaaatgctccatcttcagaaaccatcactctgggggttggagcttcaacatatacatttggggggagatacaatttagttcatagcaggttactagaagccctccatttttgatggtgtattaagaatctggtctttaccatcagctttcttccctttattgttcttaatttttttttaatcaaatatgccctcatgtttcagagacccacttccaaagctaggaatttttgtcttcgtgctgtaaaaaagctccatcatctttttctccttcacattcaccagctctccccattcatggaagttcctctgctgttgttaggtttttattatttcattttattttatttatttttttctgtgatttgaggttttcatttttataactgcccaacctgacaagcatttgtccataaattagtatgttatattgagtaaggatgttctatacacatcaaaaatacgttgctaatgtgatatttgtttctctcatagactcacctgttccatttttcagattttgaaggggaatttttagctgaatttaaaaaatatgaaaggactcttaatgttatctcacaatgtgcctttgtttctaaacgtgttcgggttttttttttttttttctcttcctttcctcccattctttgtgttttggagtttgaaaacagggctttgcagaggaaatgggacagtgacatttgttttttgttttgaagttgttgagtttagcagagtatgcgttcatagggtgtgaattgcaggatgtagttctggggtcctccctaccagccgaccccacatcaaggttattctgggaagccttatccaaagccgactataaaatatggggctgaacattgtcaaaaggctaaacaggaaacagacataaataactattcaatcttaattcagtcctagctactttctcacacatattttataatgtgttttaaaaaacaatttccttaaaaaaaaaaaacaaaactttaactccttaatttctaggttacttttaataggaaattattcatcttcatgactatccagtggcatcatccctttggcagagggcaaattacattcaataatatccaagatacaaaagaaatttttggagaaaacaaaaatgcaaattattttaatttgaattatttatcttagagattttatcatgtacatttatacagtctttgctgataaggagctataaatccaataactgtagcatttctcaaccttttcatcattatgcttccccgaccatcctgggctttttagacatttttttcttaatcaccctctcccttatgacattttaataccacagagatactgtgtatatgttttatgtactctgtgtgtgtgtgtgtgtgtgtgtgtgtgtgtgtgtgtgtgtgtgtgtgtatgcatgctttgtatataaaaagaggttttgcctcttaagcaggaggtggtgagaacctaagcttgatgaaaacatgtgaataaaagaaaagttacttgaacttggtgatggtcgcaggaatagagagaagggggcagtttcaaaacacatgtaagagataaaagccttgtctgtgtatcatgtgtgttgagtcagggagatgaaggagtggtgaggtagattccccgtctctggctgggtgcctgggatggtggtgggcatgaggtgctgtgaagtgggatagagaatttgggaggaggaacatgtttgggggaggttagttttggacatgttgagtttgaggcatccatgggatgtccatgtggctttgtacaacacatagtttctgtgagagtctgaagcttgggggataggtcggggctacagagcaagagctttgagagtgtcttctgaaatgtagggagtgggcaagttgtcggagggatcgtgtagatgagaatagcttcatgttagtgaaaagaaaacccagaataagggcgcatagaggagtttgtagacccttatttgtgaagtttaccttaagggaaatattttaatttgacagagaaaaagaacaggaggaagaagggaaggcagttttgtttcaaaaaaaaaaaaagtgagtgaagatctttatagactttctaggacacacctaatatttctgggatattgttatgatttaagggattaaggctcagaaatctatcaatgacacttcccctgggtggatatacaatgaagaactgacaaaagggtgcagtgttgataactctttgaactattttaattaccctgtgaattggatacaatattatcagaaaggggcttaccatagaattatgatggacttcagaagtccacatcctaggccaggcacagtggctcgtgcccgtaatctcagcactttggaaggccgaggtgggtggatcacttgaggtcaggagttcaagaccagcttggccaacatggtgaaccctcggctctactataaatacaaaaattagctgggcatggtggcagatgtctgtaatcccagctacttgggaggctgaggcaggagaatcacgtgaactcaagaggcggaggttgcagtgagccaagatcgcgccagtgcactctagcctggacagcagagcaaaactccatctcaaaaaaaaaagaagtccccatcctgatttcacagagcaagagtgcttaggacccagggagcatttttgaacttgcctgaagttacatcatagccagtcagcagtagcaccagctggtacctgagtccagatcaccaagcttctgttttgttcttttgttaatacatcagattgtctcttttaagagattttaaaaattagaattctgttaattcaaaaagtgtctgctcatttaacctgaaagaagtttttaaaagttttcactgaagtctgatttctgcccagttgaataaggcaagcaaggtgtgactatttgtttgacacatactattccatagattttctttttcgtaattcctgctaagattcagtggttactaattacaaatccataattactaatttcttgtgattattataaaacattcttaaagatttctttgagagattattttaaagaagtaggataaaggaatagaacattatcatgaagttaaatttataaagatgtcaggagggaagattgaagttaatgcaggcagccccaaacataattatacccagacagaagaatattcctctcccgctgaattgattctggttacataaagaaaatttacttgggatcattattagagtattttcttcattttagaaatagcacacattgaaaattaatattgatattaatattaaaattatacttttaattttaaaattttcaaatttaaaaatgctgaaaacaccagtagtgctattaatttttaataaatgctgatgattaaccttctgatgttttttttttttatggctacctttttctttgtttacgtaatgtgtggaattagggaaatcattaatggtgataatgatggggagggacagtgctggagagaggcagatagtgtccaccttggactcaatttccagagcctggtagaatggcctttctatcaaattgcatttctgatttgaaagcccattactttatatttataacaggaagttatggtattgctgccagtctagatgattctttagcttgacctttattgtgtttgattttgtgatttcacctttttttcccgttttagaaaaacttttgggtgtatacaggagagaattccttcccgtgttttagggagtggtattaaaatacattcattttgttcagtagttctgttccatacttcctacagataaagaccctttctgtgtgattgtgagacttttgaggttgagcgtggtttctctaatggtatttgacatgaaaaacttcataaaattcatgaagctacttaatacacaggtctgtgaattacattagtttgtcagttatttttacacactcatttactaatatgaatagtacaggtagtgggtgtttctcttttgtaaactattttgtacattattagttatgggtgaaatctagaattttcacttatagggatgctattttagggacttcttatagaatgataaaattgtattgctgaaggaaacgttcatattattacttaatctagttttgtcattttatggaaacaggcccagagagggaagatgacttgtctaaaatctaagaattagagatttgtgcataactgctgggatacttgctctttgatcgttgctcaaattccagcccatacttgctcagtcctaactttgagcttctttagagattggtccgaatctctcacccttacatcttggacaaggtggcaacagtcactgcaaaattttgtgtgaaatctctagatcttaaatgtctgtgacaaatgttaagaaattgtgtgtcaagcaaaatactttagaggccaatgggccacatgtttttgatatcaagagattacacacaaaatttgttttctagcttcttttgaaaaatcagaattgggaagatgtattcatgagtgactgctgccccctttggttgggactcgttccttcaggttcattacatggtcatcaataaccatttccttggtccctgcttttgtcttgtctggactctaagcatttgaatttttagtattataagaaaacttaatactttactatcagtcaccacatacatgtgtttctatctgtactacgacttattaaaagccttttatcaatagcctccattttggagggggggatttcaactggtgcctagactagcaaggatttgtttataacacagtctgtgcttatgaggagaatacaaagggcggataatttcagcttgtcagcttgaatatgttatatttatacaaataacaggcttttgagttttcctagattacatctatttacagaaggctgtaatcaaggtttagcagcatattttcaggaattctttggtgcatattttctcaaaagatactaccaggacagtttcatgacactaataatagttttatagaaatgatttgtcatgttgtttttaatggcctgccacctccttttaaaatctttttgaatctgtctattcctaagcaggtaataatattctattattgttgatacttggagatgtaatcttcaaataattaaatgattcaaaaattgttgtagcaatgtttacaggaggatgtttttcatactgggacaggcaatcacatttttatgttggtaagattgtctacatctagggattggtattcagatcttgatttatattctctatattgaaaaggtatgagcaaagagattttttttcctttgtgcattttgcaattttaatttcatttggaatgctctaaggaggtgtgttcgttataatttttgtttgcagccccaaactgtaaactgacctaggaaaaaaaggggtaagtgcaactttaggcagttctgtattcagaggcacgagcgacatcattcagttgacttgcttacctaaccccgttttcaggtccgcctcattctatgctgtctccatcttcagaagaggcttcccttcctggtggcaagatggctgccgggagctctgcgtttgcattctggcctctcagcaacccttccaagaaaatatttgttcccagtagtttcaacagaagtcttattctagagtctcatttcctctgattgtcttggcttaggttatgtgtcctattcatgaacagaccctgtgaccaggagggtgtatgagactatgattggccaggcctacatccatgcttatcttcggagtttgaggttgctcatcccggcccaaatcacgtggactgagtgggagtaagtggtcccctaggaccaatcaaggcactgttgaagaagaaaagtatagaaggcctttccctatgcaggattgtaaaaatacttccctatatattccctaaatatttgttattattgctgttatcattattactttaccatttagcccttcaaaccatctggatttaacatgtaacttataacttaattgtgtgtgtgtgtgtgtgcgtgtgtgtacgtgtacaggttaaaagtgatgcaggagaagaagaggggcacataggtccctcaggaggcattgctgggccatcttgctaatcgaggcaggtaaggacaccgtgaattgggtgtttacccaggctgtgtgcagtgtttgactaggtcattcagcccgatttctgcctttgtatgtgtctcaggctatacgtgaggctattcctttatacttctgtcaagtcctttatgacttagatattaagattagccttaaaagaaatacagattcaaaattattgctctagttggtcctcaaactcagtggatgacagagcccccagaagttatggcattctttctgcaacatcctgaaatcttgaaaaaggagaacatttaatatgactttttgtccatttcaagatgtgctcatgttttttaaaccttaggtgcttgctacatatcttgtctacacatgcctattatataaggaatcggattcaacacggaattatataattagttatttttaagatgacctactctcatgagtcataacaaaaagttgaattatgttgaatgtattctacttaagaaggtagcaaattatataataaacactattattttacctttcattgagagagtattatttgagaagcacattaaaaatcatgtggtcttggaaaaaagaacctatgagtaactataattatctctataggtaaagaaataaaagacaaaaaggctgagtatattacattttagaaagaatattcttatgtagagtggtttatttccttatgattctgaataataatgacatacagggtgatatttttactaccacaaccattgggtgaattatatttagattactctggtaatctggattagggattttttagatgttaggtttttttaggtaatctaggttaccagggtaatctaaatataattctggtactggttgttctgctggcttattttttctttctttctttatggacagaacggtataaacataggcaggcttatttttagtaaaatagttaagaattgggactttgattaagtatcattatatagtattaagcatcattaataattcagaagtttggagactttgttaaaatgactgtttatttattgtcagattactgatgggatgtgagtaatttcagaactcatttagtaccatatctaactagtaccaattgagtactttttatctgaaatgcgtgggatcagaagtgttttggcttttggatttttgcagatactttaaccgtttgagcatccccaattcaaaaatctgaaatcccaaaaccttcaatgaacactttctttgagtgtcatgttgacgctcacaaaattttggattttggagcatttcagatttcggagctttgtggatttcggagctttgtggatttcggattagggatcctcaacttgtattttgagaggatttcaaatcatgagaagggtccttattgcgaaggccagtctttcacatgttcacccagttttttgagtgcctggcacaatgctaggcattgaggatttgatggtgaaccagaaacttcctagtctagatggcagggagtgggaatggtgttggtaaactcctaaacgaacacttgcaatacagtatgttaggcaacacaatcttttaggtgttgtgaaaaggacataagtaggtttctgtgcaagcgtggatcaacgatacttgatgtaccttacagtgggacttttgatcctttttaattctgcaagtgtccccactctacctgcatgtatactcagacatgtgcttgtggaaaatattttttaatttgaagtaaattaaaattttgatgatttaatgacaccttttgagccaactgatgacttgaatattacaaagcaaaaaaaaaaaaattattggcgatgtgttttttttttttttatttttgagatggagtctcgctctgtcgcccaggctagagtgcagtggcgcgatctcggctcactgcaagctccgcctcccgggttcatgccattctcctgcctcagcctcccgagtagctgggactacaggtgcccgccaccacacccggctaattttttgtatttttagtagagatggggtttcaccgtgttagccaggatggtctcgatctcctgacctcgtgatccgcctgcctcggcctcccaaagtgctgggattacaggcctgagccaccgcgcccggccgatgatgtgttagaattaagttctactctccagtgaacaacagttcaaacaagttagaaagttatttctgtcccagggaaacagacttgcaggtaaatagtctagggctagtatggggattcctaaccttccaggacccagcctcccatctcgttgcttcaccatctgcaatggtggcttaaacatcattgtccaaaatggttatttgagctaaagccatcactcccacgtttcagacagtagaaaggaagaagagcaaaaaatatgcccccattttttaaggaaacattctagaatttaacttctttttgtcctcatatttcagaacatagacatatggtcacacttaactacaagtgaggctggaaaacacataagcctatgtactcagttctctcactacaaaagagaggagaatatatattggggaacccctggcagcctcttctacagggacacagactcccttatgccaatccagagaaaccaaagacttactgagcatttctttgaggtgattctttactcgtgtaagtcttaagtgtatcatcttagctacactaacaattggggggtggaaaagagtcttttccaactgatacataccaatattttacttcagaagagatacctgaactgtatatttcagatggcatttttaaaatccaatgcctaggataatagggttagttacttttccaaaaaaaaaaaaaatggcattcataaaagccttttcccttgccattgcccaaagataagtcaatttcctatctattaatagttgtacagctagtctgtctttttcggatgttataaattgacctaaatgtcgtttccaccatggagggtgctagagggatggagtcaaacacctttgattgtagagtcagaggacctcatctgagtcttgattctgtcactcactaactgctgtattacttagaagagtcattaatggcttagttccccatcaatgactataaaagtggcaccttggtattttacctcaggatgattgctatggattagattagaaaactctaacttgaatgtcaaaatgagttcatttcatctcggtctttgccagtcgtcaacatcaggccccaaacctttgacagagtcagtctaccctgagtcaagcgttcctgtttctgaggatacctttttagctcatgaaatgagttgattacattctttattacaacaacctgatctgtttcctttgcgagtgatttggaaaacacttttcatttaacttttactcaaggtttttcttgttctttgaagtgacagttggtctgtgaagtcggcttaatgtcaaagtcaggttattgagtcagctgctgaagaatataaacttaagatggctttagagatagccactcattctagtgctctatgttcctaaaaaatattctctggcggagtgatacaggaagaaaggggcatcctgcgagactcaaattcacagacttgacttggagctggttttagaagtcgggaaggtttcactcaccgtcggcttcctcagggttccaacggttgctgggttctttattattcttattgttttttgtgattgttgtgtgtattagggccaggtttaggctaaagagtatttcaggctcagaagctggagctagcagtgctggggtcacgtgcagtgtttccagggcacaaagggtcaacccctgaatctgggcttataaaaaattgagtgactttggcatgaaaaattaagtgactgggttgctccctcgttttccattcccattttgttttttaactttgttaaactcaggggtggggtaaccataatgccaggaaggatgttggggagttagtgatatggaaagaatggtcagatgctttccttcatcctttgaatgctcttccctgcccctaaaaatataaagatttaaaaattattattatagtaaacgtcctctggtactcttgtggatttgttttttctatttaaaattcaaatcccagtggaattattttagagtaagtagtgaagtagggatgcaactttgcttttccccctcatatggttagttggttgcccagccccatttggtgagtcatccatctgtttcccgctttttgacatgctacattaaccgtagatacgacagtgatcatttttggctaaaaaattatttttgaaggtttggcaaattcaagacaaattctacaaaggatcacccgcatttcttctagtcagctgaagtagtgccctcaggtggtaacagtcttaaaaacacagtttgcattctctgtgccaggtttcagattgtgttattcttgatgcgtttttactgactttattaatagtcttctttccttttaaatagacaatactaatttacataaaatgctactgctttttgttattccctgtatgtacttagatgtattccccctttttggtgtctatattgatctacctgtctgatcatgcattgtcagcatgctgtttctattaagataattgtataatgttctaatacttcagggtacttctctaccaatagggaagttgtattagtccattctcatgctgctaataaagacatactagagactgggtaatttataaagaaaaagaggtttagtggactcacagttccacatggcaggtgaggcctcaggaaacttacaatcatggcagaatgggaaggggtagcaaaggcatgccttgcatggtggcaggcaagagagcatttgcaggggaactcccctttataaacccaccaaatctcttgacacttattcactatcacgagaacagctgggggaaaacccactcccatgattcaattacctcccaccaggtccctcccacaacacgtggggattatgggagctacaattcaagatgagatttgggtggggacacagccaaaccatatcagaagtgaaaagagtggaaaaggagaacaaacaattcctttgtacacatcattttcactcatgttccaatgatgtcgtacggccatacctggctgcaaaggagtctggaaactgcattctgtagttgagtggctatgtgtccagctaaattttattcacaaggaagataccaaggttcagcatgctctggtgggacacttttcactttagacaaatgtctaaatacaaatattaatggaagtaggcttaaaatagataaaagattaaagagttttaattacttgaagaaaagaaggattttgtttaaatgaatgtatgcactgggcaatatatgattagagagtgaaacactggcacattataaaggaccagtagaatttcacagaagtgttgccaatagaaatttatttttggccagtctgctccatctacctaagttgttgacttgaagacattgtgtgttcagattagaatgacagacgaagcatacatattgtttctgtctttttgcgtctgatgctcaaattaaaattggatgagtatgctccttagtggttgtagtttggtaatactactgatttgtgtgtgtgtgtgtgtgtgtgtgtgtgtgtgtgtgtgtctgtgtttagtttcagttcaactcggccacttccagttgagattaataaagccagttattcacttaaagtacctgtacccaccaggctgtatggctgaggctagatctataaaaactcaaagctagaaaatgcttccataactatgacagtatctcagcacttcagaaattatagaatttgagagtttaaaaaggaacatagttatccgatcagacactatcagttggaaggagtagctatctctgccagagtttaaaagtggcagagaggattttatataccacttcagcttgcattatcatcagaggaatcagacattgtgttctggtgataaagccatttaaaaaattttcttttccagtctaatgatttaaaaaccaaatagctatatcaaatttcttattgttactcaaaccttttaatgtcctagttgatgaaataacaattcccatttcatacagttctttgaattaattataactgtaatttccttaaaaattccatatttgattattttgaattaaaaatgctcacagcatcttaacagtatagaagtatagtcaaatgcccttccattatttttgctactaatgcatattccttgccagaaataacaaatgttaatactttactatagcccggggtggtggctcacacctgtaatcccagcactttgggaagccaagacaggcagatcatttgaacccaggagttcgagaccagcctgggcaacatgttgaagccctgtctctacaaaaattataaaaattagctgggtgtggtggcacatgcctatattcccagctacttgggaggctgagcccaggagcaaggctgcagtgaggcatgagcgagccactgtactacagcttgggtgacagagcgagaccttgtctcaaaaaaaaaaaaaaggtttaactatagaattaacgtgcatatgtgctcataaacatgggtacacgtgcgtacattttttaaaacataaattagatcatgccacccgttattctgtgactacattttttagtttaaccatatatttcagacttctttccatgtcattacattattttatctgataaggttgagtgtatttttacactgtttttcttatgtcatcctagagaaagatgcatagaattaaatccttttaacattaacatacagagttaaaagtataccccaagcattggttcttatccttcaaaggtcctttttcagattttgtgaaggccattggaatgcccaggttgtaagttgagtgtagttttaatatttggaaattgaactaataataatcccaactttatccatgttaatgcttctatgtatttaaagttataagtagttaataagacataatttgaacagattattttggatagccgatgtataatcaattcataggaatttaagaaagaagttttttgtgtgtgacctcaggtttacttttgcatttagttatgaactacattcaaactagatttggtttcacattttcttagctcttttaaaaacatattatcaaaaaattaaaattaatttccctatgctcatatattattattttataatctgaattttctgggacggagttgtaattcttctgacaatccaataaatttattttgtgttctgtgagcttacaagtccactagagggtgcattttactcttttttgacacagacagaaatttaagtccataattttgtttcactttcacagagctagttgggttaacagctttggaaagcaaagtcccttaaattcttaaacatggacactaggagactgttgtacaaaaacataattcattagtataaagcaaccatatcattattaaaatagtggccttaccagtggatgctattgtaggatgcagaagggagcacggtggggtggggatgtctagggaagcttcatgggcaagatgggatctgtagtgttcaaacacctggtgaagtcaaactttttggtctcaggacccctttacaccattgataattattaaggctcccaaatagcttttattaatgtgggtattgatatttaatgttctagcaattaaaattttttttttttttactaatgcatttaaaaataacaatagtaacgggccaggcctggtggctcaagcctgtaatcccagcactttgggaggctgaaacgggcggatcacctgatgccaggagttcgagacctggccaacatggagaaaccccatctctacaaaaataaaaaaattagccgggcttggtggcacgcgcctataatcccagctacttgggaagctgaggcaggacaattgcttgaatcagggaagcagaggttgcagtgagctgagatcttgccgttgtaccagcctggcaacagagcgagactgtctcaaaaaataaataaaaataaacccattacatgttaatatgaataacatttaaatgaaaaagaactatattttccaaaacaaaaattagtgagaaaatggcattgttttacctctttgcagatctttttaatgtctgggttaatagagggcagctagagtctcatatttgcctctgcatttaatctgttgtgtgttttggttaaagtatgtgaagaaaattcaaccccacgcagctatgaagttggaaaagaatattttaatagccttttctgataattgtgagtagtcttctgtgattctatatctaaacaatcaaatggtagttccttaggggctagttgccatgtggaacctgaaaccatatcagtgaacttattctagttagttatgttaaaagccagtagtctctcttggaccttgaaagactcttttgctcaggcatgactttgtaatattacacattggtcttggaaaatattggttcatctagttatgtaaatcttccaaatgttaacacaatatcagtcttgtaaatatgtcaagttcatgatggcagatacaagttttctaagaatttaattttcatttgaaagcttgaattttatcactggcaacaaatactaacagttgttttccttgaattgacatgcccacttcatttatttttaagaaaatatctgtgaaatacccaagttcgaataattatagtttgcctgtaagtcattttttcaagtaaaaatggtgttccatgaaaagagaagttagttaggttcacgagtacttttccttgagacaacccttagacttttacatagagcagaaatgttttgtatgtatttcatcacacagaatagtaacgtgtcaagatttaataaaattgatagtttactgcttcatcaaggccatttttatgtaaaacacaatggcagctggtagagtttggtgccaccagcatgatttgtgctaaagggccagcagtttcactcactcactctctccatcaatgttaatgcaaacacaatgcaagaggtaaataatgtcttagtatgatgacattagttttgatcctgcagatcctctgaaagggtcttggggaccctcaggagtccatgcacacattgaaaacggctggactaggagaagcatagaactgggtgttgtgaagccattgcaaacaaggatggtgtatgagggcaggggtgaacatgagtgtcagccgaacaaggggctgagggtagactccaattgatggctcttgtgggaatagaggaaatcagaggagaaaagaatgtgtcttgaaggcagagcagaccggagaggtccctgaacacaagttctgagaagcaattttgtggctttcctggtaggtgggcatgcgtctttaattaagcacccctgcccttcccactctgccctgtttctcccatatttctacctgttggttctatttttacccccaaatgcagcataaggctctgctttctcctgtgcagcctttcaaatatgaacttagggtcttgaggcccagtggaagggagcttcgaatgtcagaacaactggaaacttttttccatagatagtaaggagccattgcttactctggtctctccttcccttcctgtttttctgcctacctttttgagaatggcatttgacaatgatatttattgaaagagcactatgtattaatagtgctcttgggttatgttagggttgcagccgtgaacagacagcctcagtacctgctgtcaaagagccaagaatctagtaaaggatacaggcaaatgtggtcaggatcatgggaacatttggtgagggcctctaatcccagaggggaaagggcttgcaggtcagattgcaggactttttggaagaactaagactatggaggctgagacttaaagagtgaggggttagttaagcaaaaggtatagggagcctaaggaaaaggagagggttctggagagggctccacaaggatttggatttagagacagcacatgagcagtcagtgtggccgcagcgtagactgctaagtggtcaggccttcacttgagattggagagggagtatggactgaattgtgtctccccaagttcatatgttgaggctctgtcccccagtgactacgtttggagatagggtctatatggagggaattagggttaaatgaggtcttaaaagtggggccctaatctgatactactagtgtccttattttaaaaacaccagaaagctccctcactctccacactcatgcaccaaggaaaggccatgtgaggacaaagtaatggtttgctagccagaaatagagccctcatcagaaactgaaccctctcaaactttgatcttggactttccgacctgcagaactgtgagaaaatacatttctgttgtttaagccacccagggtcttggtattttgtcatggtagcctaagctaagataaggagttaccacccagagaagctgatgagctctgccagccttgttaaggagcttggtttttattttgagggttttggtgagacatcaaaatgttgtaagaagcagagtgaaagattattcaaggtgaagtgtgagggatggattgactggggctgtgcagataagagtgttatgagagagacagagaagtggatgttataggctggatgagggtggcagaagtgggcagtggggattgagagaaacttggtttcgagaaacagtttaatagttttgtagacttgaaaattggtgactggatgggtcagtgaaggagaatgaggagtcaggacttccaggtttctaggtgggtgatccttgttcactgaactagagaacagcagagcagcaagttgagaggagccaagggtgcatttggttttcatcatgatgagtttaatgtgtttgtgggatatccacgtggaaacattccccaagcaactggcttatacagtgctggagaccagaaagagcaggggaaagagggagagagagaaagaggaacagagagcaggagagagaaatgggctactgatctaggtaaaaatgctattagtgagattctgtagtggcaatggccaaatcacttaattcctctcaatatttctttcatctcctgtaaaatagaaatagtattttttttgcttacctaccaagctgttatatactcaaaaataaaactaaaatagaaaatatggcaaaagcacattgtaactacaaaggactgcacatatttgagtaatttattatactgggatctctaagggaaaatgctggatgcataggaacaagaaaaaggccctagggagtgagaacctggatgagggcgcacagagggagaggacaggattacagggaagacttgctcatacctcacagaggaggagagggtccagatgacaccttttccaagtccagctggctgggaaagtgatcatttctttgagagaaataggaaaatcaagagcaggagctggttcattggaaagatatatatatatttttgacgtagtcccatggcatttgaggagaccgtattgaggcatctgggtgcatgtctttggtggttgggaaaggccattcaggacattctcttcttccttctttgtgcttttttggttcaccttttcttttcttttcattctttctttttctttttcttttcttttcttttttttttttttttctgagatggaatctcactctgtctccaggctggagtgcagtggcgcgatctgggctcactgcaacctccgcctgccggttcaagcgattctcctgcctcagcctcccaagtagctgggactacaggcacctgccaccatgcccagctaatttttgtatttttggtagagacgggatttcatattggccaggctggtcttgaactcctgaccttgtgatccacctgcctcagcctcccgaagtgctgggattacaggggtgagcagagcactgctctaaaaatgttttttgggcaatgtagagttaattttaaacaatggagtttgaatgcctgtaggaagccatgttcctagtcaccacaggtctctcctcagtctcctttactccccgtattgctgcctcacaggcttagatttttccctgtcctgaaggcatctatgaatccaggtttaaagtcaccatggacaatttggcctcaaaggggagaacgggaagtgagattgccggtggggatcagaatcggccagagccagttgagaccatgtcccagagggagcccctatggtgtggagcaatgaccacaattaaaatgtgtttcagtttccaagctcttagcttgagatatgctaacctagactccttcttccgaataacaataatcttaagattataatttaattggaagaagctaggacaacaacaggtgcacatagatacttagcacaataattgctcataatttggcaggaggagcctgggttagtgtatctcaagctaagatcttggtgacttgtctctaaaactgtttgttagtaatgttttccttttttaaactctattttatttcattttataccagatcttcgtaatactccactacagcaaattctgatttgtgtgcttgctttcatatctctcgtgtctgattctgatgcaggtacccgaaggatttctacagtgtgtccttcaccccaccagccaccagggggcaggcacattcagtcaatactttgactattaccatctcaaggtgcatgttgtaactgctagagaagaaaacaaaaattaaaaagaaagacaaactttgagatcttattataacttgatgtcgttagctgacccaacaggcttttgctactgtccaagcattgttttctaggaaggctatagttggatgatctagtgtaaaggaaatgtcaccatggttgaagtcttgccaatagctcagagaatgtttaatgaattgagacgactcagtcaagcagtgagtagtaagaaaatctgtgtgactagtgacaaccaaagtggaaagaggggcccttgtgttcctagagtgtcccagatgccccccagaaacatggattagaataaaccccagaaatctctcacagacaccttaacatgcttctcccgacaggaaacatgttattttcagggatgctatgtttggtgcttttaaagtaatactatgatatccttttaaaaatgctcagcttctttaaaggagattgaggaataaggaaaacagatctcttaagtaaagaattcttagaatccttaacatgagatccatgagactagcgcagttttcttcctgattcctgaaattcattaaagggaatatttttcttaccatgaaagtgaaggttgtgttttatttacatgggctagaggaaaaggatgaacaaataagcaaactacttgtggaagaggttagaactatttcagatagctataaatttttattgcaaaacctcataaaaactccaagaaacagtaatgggggaggtgagaataaccttatatcataattattaattgactttctcttttgttgtctgggtgggtgggggtgggggggtcagtcctcgtggtaataaggactttagaagatgagatttcatcagttatctgagtaaattcacctgtttgagctagtcctgaatattgaacctattctaccccctgggtttatgcagaatttggtgatttagttacaattttggttcaacacttctttagattagcagtatgtatctcagggaaccttttcagattgtagtattctgtgataaaatgtggcttgtcatagaatatattgccaggcttagtggacaccaggctttctgaagataatttttgtcccctttgcctctatttttagggatgtgagatgtgtgaggcagagactgaaattgtaatgtgtttggcaccaggtgaccttagaaattagccatctgataatttgcatttctgataattttcatgtaaggtgcccagggtcctctggcgttacagacatacaagtcccaagtttccttctctacttctatcttgtctttctcttggtttgagaagatgttgtggttttttccaacccatcctcttatctcctgcttctgccagtccagtctcttctcagaaaaggtgttactctgtagaaaatgttaactccttctgcacacccagagaccacttactgttttgtacctacagctctgaaatgatgattctgtcacttttgatttctgtagactctgggttttcttgtcttctcatgaattgtgagcacactgacaattgttcaatgtgctcaaatgtggaaaagttatcttttctttcagttgtaagtgaagtatccctaaggaatacctgctgatgctgcttatcttgctttatgttttagctgccctgtgtgactttgagaatgacccagaagtattcaggcctttctgaactgcgctgtctcctgtgcatctggcccttgcagtcattcagttggtgggatttagtggaaagggctaaattctggagtgggagggccttggtttctgccagactcagcgtttgagcaagtcttctggcccacaagtctctattttttcactgataaaaagccgctcatagtaatacctgcctcccagagagcctgtgaggattaagagaggtaatggatatgaaagagctgtgtaaaggcaatgaggttaggtcttgtgttagtcatgccaccttgcttgctgcaggaggatgtgctgtggctcacctgtgcttgagcaagctgtgtagggatcctgtcatcaggcctcctccttccccagtgtgtgaagggagaaggtgagctcagacaacttggcctcagtgcttacagaagcagcgttatttccttcagttgttaccagttactttgccatcttgtttgaaatagtgtattagtctgttctcatgctactaataaagatatacctgaggctgggtgatttataaaggaaaaagttttaattgactcacagttccacatggctagggaggccacacaatcatgggggaaaagcaagggatgtcttacatagcggcaggcaagagagaattgagagacaagtgaaaggggaaatcccttataagaccatcagatctcatgagacttattcactaccatgagaacagaatgggagaaccacccccatgattcagttatctcccactgggcccctcccacaacacttgggaattatgggagctacaattattcaagatgagatttggctggagacatagccacaccgtatcagatgtgttgagttgaagaacaaagagtcaggtccttgatttttgcttcagttgaagacatataaatggtgaaatggctttttctgctgtggattttaaaggttttactcattttttttaataacttagactaaaagcaaggcattatttctaaagaaagattatttttaacagtctttgaaattagtctattcagaaagttatattttttctgtttcctccattttcttctcctttggatctcttcctctttgcctagcttggtcttctgatattatcatagctaaccacggcttccagtgtcatgaatggctggaggcctggcctctcgattccaggaatttctgcattccctttaatcagccagcttcaaccctttccatggcctggaattgcctcatttctaaggattcaagcttggagctgtcttccagtcacagccttctgttctttcacttactcattccttcatttcctctaaacgtgcttgttcctcatcttaaatccaattaacggccattttccacctgccgcttttcttgtcactcagtctcatccttccttccctgctcaaccttcaggccttgacctccccagtccaccgtgtcagctgttggctcactggcatccttagaatcccttgcccttttaacttctgctttgcccactattatgactgccttcccactccccccgtgtctatatcccaggccactgaaaatcactggaggaaatcacattagcccaatcacattgggctaaatgcttagtattgatgtgtgccacctccctctgctggaacctcactgctcctgggaaagtctttttagttttcgatccttcttcaccctggggtcccatttccatcagctttccttattttgctagtaatcttgcttcctttttcaatgagaaggtagatggtaatccaattgaatttcttcagctctcctttacacctgaacctttgtctgtatttccagcctacttctcacacttgcttcccgatgcgatggtgtgtccttactccttcccaaggtcagcctcctcactttgggcaccctcttgtcagcttcagggccttacactgtgaatgaactctgccacctcctccctgccatcactttctccctttccacagactttcctccttttatcctatgagctacttaactttcctgaaaccttcgcttcacaagagcctctcattcccttagttacaaatttctcaaagaactgtcacttcttcctactgtcactcttcaccacccagtcattccttagccctctggccaagtagtatcttctcctgctgttctgctgggactcttcttgcaagtcggcaaggacctctttcctagttgtcaaataatctacttctcaccatctccaccacctttgacatagttatccactccagcaggtgttaatgcttagtacatttatgttgagtggatggataaaggcgctttgcttctctccgctagtccccatgacatggtgccatctttttttctgctgcggtccctctgatcacttcttttcagtctctttttaaacctgactgaaattttgagtttccccatcttggcagaaggatgaaaaatcagggaatcttaattgagtacctactgtgtgccaaatgctaccctttaggggctttaattacgttaacttgtctcatctttacagcaaccctatgaggtattgtttgcctcatttttagagaaaaatagttgaacttgagggaatttaagaattcacctatgtaactattagtgggagaggagtttgaatcctgtttgactccagtgcctttattttcccattagattcacacaggacttgggttgaaatcacctttgtgtttctcagttcccacctgagtgcttgtgtacattaactgcacatatttgagaagtcaatttgtgatactgcctgttcctatggcttcagtctttttgctttattttttttaaaacattggcttttaaaagaccacaaaaagtagtatgtgctgttgataaaaattcaaacaataaaagtttgttataaagtaaaaaaatgaatattctctcccttcccttcccaccactcccactctcaaggggtggtgacaactatcatttttacactgatgatgtccaggttttcagtttcagtccctagatccctcttgagtttcacaatccagtatctgaatgttgagcccagatgctgatttatagttatttatatttttccgtataattttctggactcccatagttgagtcattgaaagtctgttggatagtggatgtgaaatcaattaatcagtcaactgattaatctctaattccgcctattgcacgtgtctgtcctgctggcctcgtatacttggattcttcaagattaaatccttctccttcttccctccatcagttccatttcctcatttcctgtgccttatctcagttgtgatgccatctgccttgtcatccttgtctcatcccccttcttcacattgccatgcagtcagatggtatctcctttcagttgcgtgcagggtcaccacaatgcgttcccactgccgcctttggagttcagcccacatatcctctggcttggacggttaccccggcctccttgtgattgccttcgctcctcctcactccactctgctgagtcttaactttctaaaacctaactttcattgtgtccctgcgttgtatggccacaagcacacaacatcctaatatgatgtaagctctggcatgtctgtttgtggatgatgccctgaatttttattctcctgcttgtactgatgcgtactttttgctctgaatgcagccaacattcaaggtgctgctcaagtgccacagcattcttataacctgctcctgacatgcctccagtactcaagtcaaggaagctcttcccaaccccggcgctctcataattgccatttattctcagtattcagtccattctgccttgtgttaagtttgttgttcagacagaccgtggaggtagattgtaaatttttcaagatgaccatgttgcaagtatttttatgccatttgattgatacatagtaagttcttagtcatatgctatttggatctattttcttaaagctctgatttgagaatcataaaattgattgttattttattgttattttcatatttagataatgctgttaccaaggttatctgtgaaagccccaataatctatctaatagaagtttatgcctagtgggccaaatagtttgtcaattgtcaatcaacctgtagacccttttctatctctaaaatgacctatttaaagaaactctgggatcgcattcaactttagctcctaaaccacagcctactgtgtgcgaactctaaaacgccacaagaaagctaccattaaattattgaaaatattctttaataaagaattttagttctttaaatctctgcattttaacaaatctgaacacaaacatatcctaggtggtcttttttaaccaagccgttttggacataatttttttacatgatgtaaattttaataaaaaatataagtagttttttttttacatggtgggaggatggtttagtgttctcatgaaaggaggagggaggacatttacccttccatggtcactgccttttaataacatgatgcgtgataattttaaggcccagtttgactatcaagtaacttgtctccttgccgaggctggcggatcatgaggtcaggagttctagactagcctggccaatatggtgaaaccctgtctcttaaaaaaaaaaaaaaaaaaaaaatccaggcatagtgacgcgtgcctgtagtcctggctgctcgggaggctgaggcagaagaatcactagaacccgggaggcggaggttgcagtcagccgagattgtgccactgcactcttgggcgacagagtgagactccgtctcaaaaaaaataaaaaataaaaagtattataccttaagccaaggcttgagataaaggtgtggggaagagttttcccatttttcactagagccctccagttttttcccacagtaactgggtgggtgaacagtttcctactgctcctccaccctgggaagatcaagagaacccgagagtggaatgggaaagaaggaatccttatccttgctcctcccctcaccccattccctaccttctaacagcacaaatactttcataccatttaaggtgatgattttacgtgcttgtatgacgagcatagctttgatttattgctgaccagcagtgtcagtgttaacctagacgagaagctcctagaacactctgatgacttctgtggaacaagtactacaatatccaaacaggctgctcaagtgtgtttgcttgtttgttttttgttgtgttgtgttttttatgtggtgagtcctagccaaatcattgactaaatagaatcttagctttgaaggttttggggggctccttttgaaacacagtgccactttattgccacactattcctagatgttttggggaaaataatcagtatcactttttgaataaaatcccaggtagctgacttaattatattcttaaatatattctttaagtttaaatttttgttcaaaggacagctcaagtaactgaattgtgcttcttagaaatgcaagattcattggggttcaagagaaacttgctttctgattctttcaggattgatatttccactccagcttggctcatttttactttccatcctctagtatttaaaatttgcttttagaatttattttgtttatgcttatttggcacaggaagagtatttcccaagacgcttaaatttctcttgccttttcattgttcaaaaatgttccaaacgaaaaactgtgtatgtgtgcgcacacactgtgcatgcacacatgtgcatgagggttttgtgtgtgtgtgtgtgtgtgtgtgtgtgtgtgtgtgtgtgtgtgtgcatgtttcttgccaaataacctaaaaattacttctctggcccccatgacttttttttggtcctgttgtaagcttgacagagattttatttatccttattaaatgtggcttgtttatatctagttatttgtgtgaagtttatgcttaagaagagtgggattcgttttggatatattatctcagagccaactggactcttattagcgcttgtttgaaaatggatgtgtgtgtacatgtacagatgtatgtatgaagtgtgtgtgtgtgtatacacaccccatcttcttgagtggtttctcaaattgtaggatttgaaagaaataaaggaaagaaaggaaaaagaaaaatcccttaagtaagaggacaaaggaatgctctcataactgggctggaattggagtttgtgtttcatttaaaatgacaaatcagcaaatccctcttcaactatgttacatcaaggtgaattttcccttcattctgggctttggacacaatttgcctggacatcttcccaggaaagcccctgtgtaaaacccctattaaagcaaagtcatcataaaatcatttcatttccataatgcttgtcttctgacctgtgtgaaatgtaccacaactcttgaggtacgtattttgagtcctaacatacaagaaagttgttagttgttcttaactagcaagaaaattaaaagtgaacacaaaattctcgtatatgcccaaactgtgatacagattgaagataaaaggtggagattctttccttccatatggtgaagcaatttggggaaagagaaattagactttcggcagaaagaaaatgtcagatttttttggcgggggttggggaagtgtttttcactccctaaattctggaattttattcagaattaaagggaaaaaaaaaagacacatgtctactgatttcactcttaggacttatctatcttagtgccaggacgagagtcggcactgcggatctcaccacggcaaagggggtgctttaggaggactgcacaatttattggtcaccatgaattagttcccagtaaattatacaacacacattgtctcttatctcttgctaggggacactgctgatttcagagataaatgggattgactgtttaatttcactagtaaacaaacttgtaggaaagtggaactagcatgcggcgtccgaaggtctcttagtaccatgaaacataggatgagtgtgaaggtgcttattatattaaaaaattaaggtgattatcatatttaaaaaatcaagcaagaagaatgtttctaacttaagaccagtaatagctgcatttaatgccagaattttccaaggaaatgaaacaggtcaaacagaaacttcggtgaagacgtgctctggggagaaaccagctgaataaagttcagtagctgactccacttagattaaaccattgactctggaaagctgtatatctctttagaagtttctatttttccttctttcatccacaggaaaagcaaacaaaacagaggtgggggaggggagtggagataaataaatcacgttcatatgctaggtcaatttttaagccaattttgatctttatggtaaagtattttccacatctgccaaccacaagtgtctacatatggtaacaggtaactttctttagtactatataatctgtgagacataaataactaggcattgtaattgtatggcagttaccctacagttgaaagagttacatgattattagtaacccataaaataaggtggtagtgttttttttaaataatctgttataggaatttcttgtttccatacttttcttaaagactgtaaataatcttgttatgctctgacattcagcaagtcattgcaaagaaatatgtttattccttcaagataccactagattatccatttcaagaaatgaatattaaatatggaaggacacattttgtccttttcattttagttctagattttgccatatggttgcccatggcttttaaagaacagttagtatcaggaatgaactttttagccacaacatttctgtgatttttggaagtgtgatttttggaaattcttaaaaaccacattttgaaatattggtagttactgttgtcattctgtttcttttctttttccccctttctttctccgtctctcttttttgtgaccagtgcctcttctcacagataaaccagtatgatacagactttttgtgtttaaaaacaaaacctagacttacaaaaaaagttcccaaataacttgtatttaattagtatgtaatttatttaattagttccctgtctctttctttgcagtgattgtcttgatttctagttctagttttaaaacaaggaaagttttaggcctttcttgattcaactcatgttgtccatagcacacctcactgtccctaccaaagaaaggcattgaatttgagatttgatgcattttagtcttttttttcttccaccctgatcttctatatatggctgctttgcaaaacagttttgtgcaagcagacatgacttaactccattccctacatagagaactattcaactttacttttatgtgttttgaatactgcctcatgtgagactgtgacagcaataaagtatgcatggccaaccttattttaatagcgaaagagagctgcttttaattaataagtggatctctttatgtctggggttttcagtttattttgtggttccttggagttcttcaattatgtggcctaaaagggctatgttagtgccgactaaatcctttttaaaatctgtcatttacatgttttctgtctgtaacctgttttcagattactgtcttaaaaaaaaaaaaaacagcagtagcagtttttccgtaaaacgttaaaatccatagaccaaaattatatatatattttacattattaatgggatgcagcatccatgtacaaaattagaagactagctgtgctcttcagctgctccatcacataggttaaagagtctttatattgcatatttccccactcaacatctacttttaagttacaaaactgatagaacttgtgtaaagcatctacttggtatcttgagcattatagaaggtgtgcaatggctcttcctgctggtgatgccattgccgtctttggtatgtatagaattttactgagttctgtcaaatctgggatgtcagtgtgccccacgacttccccaccaactaaaccctaaggggtttttatgctaccgcgggaatccagtgccagacttggacccacagtgaccccaaataaagtgattcctgggtggtaatatggatgctttatgattgacatacacataaatacatccaatcttgcttatgaaattttgtgatctgcttttgtcattagaggatatagtgaatctaattctgcatcggggatacgggatacagtgtattactgcattgaaggagatttgtctgtaggagcatgagcattctgtagcaataggcatagccgtcttctcggctggatgttagttactaggaagtattcattgtgtgggtcactatattttaacaactcaaaattttttaaaaaaaccatgctctttttgaatagaaagagagaaaatattaagtctttaaaagtcagaggtaaaaccgtggccaatctgaatgttacttctttctggttacttgaacagtgtctctctgaagtcttccttgggtcagacacaaataaatgggaggttgctcttggaaacactccctaggcactggtaaaagttgtcggtagatggcagtactgttctactacaacattttttaatccctgcaaatactgcctaacatttcattcccagtcttaattttgaaaatgcttgattagttacattaagcaatgtttgggtgattttttttcccccttttaaacttaacagaattatagccacagcctgaaagaaagccattactggtagacaacaaattcttagtcgtaatttagtccaacatagagaatgacataccgatttttaattatatttgtaaaatggctatataaatatataaaatggttaacaataatgattataatttctcacttaaactttgcatcagtgttttttcctctaattctaccgagggtaacatctgatcgttacggtgaatcatctgagatgtacatttctatgaacatgtttatttctttttacccctacaggtctacatgtatgccttgcaaatggaatacttttgaactctgctaagatatcttggcatatacaactaacttgtagatgaagaaagctaatatctctacagtttttatttggaaagtcagggaataacgctatccttagggaagggtggtttaccttcttatattagttttttgcaggtcccttaggaacatgcattacagaaaaataggctgctcttctgtttgtctttgtgattcagattataataattaactctctaggctaaatataactaacgatctgtgatcatcatttaaaatggaatctttcacagtaaatttgcaattggtatatttcctgaacttctcttattttaagatatttttagggaagatttcatataggatgggaggtgaaattggtagtgttttctccctttttaaaaaaaaaaaaaaagaaaagcattgtcttactaaaattccattggaaaagataaatatattttgttttacaaaatactttgggaggataaatcttccttttaaatcgaactgaattttaagaaaactgtggcttaactgtttatctcgttttcctatttctttacctaatttctatctagaattgtaaaatgattgattagagacttaatctggcttttgtttttaccttaaactatttaaaaaactaaaatgtaatgttaatgttttttgttctctattgtctttaaaggcattagcaggtagaatagaaagagataaaacatctgggtagtctaagtagatgggttctgtttcagttatcattttatgcttaacttgtacgggtctaaggtatatacattctcttaactactgtataaactagaaatttgcagcataagccacaacctgtgctagctgaagcacttagttacagcatgtaattcccaacagatttttctgttatatttttttactcaccctccatggaatgattagtacattttggggatttaattaggtgtgtgtgtgtgtgtgtgtacacatacatatacatatacccataatatagagacaactattataactgctataaaataaaatgtgctggtgggaatttgcgcatagcttatgctgagtatgtggaaatttgggatataacatatgcagtgtctcccagcaaacagagataagtatagtaataacaaatttataagatatttgttagttatgttcttccatcagatactgatagacaatataagccagccaagaagcacatgagtcaaagttactttagaagtacacagtggaataacacccccgtgtagtaagaactttgtttccttgagaagtttggatcacagggtggtgaggatgaaaccactgcctctatgatttgcaattgaagtgatgctgttgagtgatactttttgaaagagtagcttaaagttttgaaggagtaacatatttactgaaaaatttctgtcaaagtgaaattctagagactagtattcatttatgcctgttaaatatttgcgagaagtaaagtttcttcgtgtttgacttacaatagatttctcaagcaatgtttctctccagccagctataggatgagggtggacaaaaaaaattggctttgtttctattttatgcacagccagacttgctcttatgtttgtaatatttaaaggagttcaataggaggcccttgattctttgatctaatgccacagtgcagtttaatgagaaaggtttttaatattgtatgcaatattgaaaatttgtgccagctcagaccaatataatgtaatgttagatttacaccttggatccattcttttatttcttgtcatgaatccactcccccagccccccacccctgactgaaacaggtaattacaaaggtcttcagatcaatttttgtaaaggggcaccctgacgggtaccatgactgaagtgtgacatgagccttttccaatacaatgggtggcctaacattcctctggaagcccaagctcattaaatattcagttcctttttccccccctccccccttcgcgcacttagcttgagtcgcactaagtctggggtttcttcgctgaagacttaggaaaattgcttcgagttctcagattgaattttttatgtgtatgacttcatgatagcattagcatgtgctttgatccatgtgtgaatggcgctgggtcggcgcttattgccatatccagatggtgttacagggaacaaacagttgtgttttaggatttctcaatagactgtctagactggccgtgcagcagacagatacagccacccatcaaattagcgtttgtcagatttatggtaatggttcaccaaagccttcctgtcattgacattaagatttacgcctccaaagttattttgtcttccacagaatatagcttgtgattgcttggatttaaaaaaaaaaaactttaagacagaaaagtcttgttgaatgtgagctgtttctgaatgaaaagaaaaatataaaaggcattaaacagtggctgcggcttaggagcagtattgattagggaaaggcctcctccccacccccaagccccctcaagtgataagaaggatgttctgctctggctggtgtctcccatttgcccttgttggaaagaaaaacacgtatgtgggtgactatggccagattttgccctttcatgttgttactctggagtaacgtgatctgctgccccaacgcggtgggaataaccttttgacaggcagtatgtccattctcagtggaaatgttttcccaagtctggccaggctgcctttgatcatacctccttccaatgtggggtcacagctactatgctatgcaagagtcacaggttcctgcaaggaaagtgagagacatgagggtttaaaataaataaataaatatgacccaaaccttcttaagttctcaatcattgaaatgaagtcagaagaatggaaatggccacaggaagtgttcaggacgtttcgtgttaaacatggtgtgcgtctttttgtgtaagtgggtcaagcaatgcatttcacacattttcgtgtaatgcggcttagtagtgagggtgcatctcatcctggacacgctgaggcatgtcggaaaatgtgttttcctattgtatgttggtgcaaatgacaaatggtgaagaggctgggagctgatgaaaatgctgagatggccacagaggacaatatgtagggaaaaaagctttgcggaggtgaaaagctccagcatttttcaaaggaagttctttcatctgtctgagaatgggcatttggggaaactcctgctaacccctttggtatgtcaggattgagaactgctgcctgttctagtacagggcagaatctttgcagaatttttactggaaagatatctcttatctactccagtggctgtagcaaagttatatcagttagtgaataaagtattctctattaaatgtgctggagctgaaggcttcttattaacctgcagcagcccctgcatctctgggtagtggtccttctatcaagcccccttccttccttctctccttttttccccccttccatctcttcctcctttccttcctttcttttttgctcttgccatacagtaatcatttgattactctgtttgggactgctattttggcctgttttaaaagacttctctctcatatatgtgttcaaatttagtcgtaagtatatctgataagttgtagcaaaaacaattgttgctcaactaaattaaatctcaaaagattacattttttccaaacaataaactgatggattttttcagttttgtccatcttcaaatctttgaatattgggttaatggtactaagttaaaataattttctgcactaatttcttggagtgttagagctttcacttagtttgtggtatttttttggataaattatgacccatttattgaagatttttattatctctgctatatggatataaaactggaagacttctcaaaaaaatatgggaacatttttgctaaacaaaattttcctccagaacgttctctccctctcccttcctgcctctcttcttgtcttccttctttattcctgttttcctcaaactgctaaaagagttattcatttggattccttttgaaaagtctgtttcttaaggaacctcaatggtcctgactgtgttttgattaatttccagtgcattgttaaaagggcggttatttgagagagcatctcaaaagtaaatctacttcctgccaccttatcttttgcaatgcttatttggggttgtggcagtggagggggtgactcgagcatcctcagttagtcgtctagctagaacagttaccattttggacttgagaactattttaagtttgttgtaagaaacagtataatttttacaagacacatttatagtgttttaaaaaagttaactacccttcttacacgtgtgttttcttagaaattggaagggttgaatggaatgccagtgttttagcaatgtgtgaaaagttatttcaataaaatcctttttcttctttggtttaaaactttattctgcctgggaatcctccacatttgtgatttgggcattactatttttaggaggaaattttaactggatacattatgctatgtttgcttgatcagacaacatatttaaaggagatacaggatgttagtgtgtcaagggaccttagagacatctaatttaacaactttatttttccagttggagaaacagaggcatgggtaggttaagtgttttggctaaggtcataaaactgggctggcaggactgctattcagatttctcactctgcatctcccccccattaaatcactacttttaggtagctaacagtagattcactcttatttgttccccacccctaccaccaaacatgcttaatctttctcaatctccatttgactaattagttcacagctaagaaagcatattttctttgagcagattatgccaatagagaaaacagaaaaaatagtccaacaggacaaacactgttcattgtacacccaatagccatttatccttcttgctaaaataccctggtctgaggcagcaatgtgtctagccccaggcaatgaatgaaccatgattggtctaagccacttagactcctgtgttccctgttttctcagcttctcttacaactagatgtggctgtgttgctcggttctgactagtgatcttatgggggagggggtctgcttgaggttctgtggggaaagtttttgctttcctgtgaaaagggacagatgtggccttttcccttttctaccttccttttcccttttcctcttcttaaacagaaatgtgacatctggagctgatgtgcccttcttactaccttacaaaaaaggccagcttctttttaattaagtctcatttgtttaaaccagggattgacattttggttaaaccattggttggcaaattatgacccattggctgattgcctatttttgtaagtaaagtgttactgaaacacagccacgtattgactgtggctgccttcatgctatgacagagttgagtaattgtgacggagactatatggcctgcaggtcttaaatatttactctctggccctttaggtttggtgatgccgtttaaagcacctaacatgaattttctgttacttgtagccagacacattcctaatggaatcaaccaataaccaagatccttaaacaaattagtgacttggcatttcttcctactcaaattactcttttctggttaagtaggtgtgctccagataagcatattcctcattttggactttatctactcctctttatttccttcctgaactctctgattatcatattctttttaaaagtaagataagagtataaaagtatttcatttggccggtcacggtggctcgtgcctgtaatcccagcactttgggagactgaggcggtcggatcacctgaggtcaggagttcaagaccagcctgcccaacatggcaaaaccctgtctctactaaaaatacaaaaaattagccaggtatggtggcgggcacctgtattcccagctactcgcgaggctgaggcaggagaatcgcttgaacctgggaggcagaggttgccgtgagctgagattgcaccactgcactccagcctgggtgacaaaagtgaaactctgtctcaaaaaaaaaaaaaaaaaaaagtgtttcatttaagcgctgcctaaaactaatgtcagctctttgatattccaatcttttaactgcccaaggaattattttctaatgctcagataaaattgtcagggctttcactcggtgagtagggtctattcatggatcttaaaacctgaaccgatagaacagctctacagctccttgtattctgctcccaaccttcctgtcccctccaaacttgttgccctttgtggtctggtggaagcaggagaaaaccctgcaatagcccccactctgtgacattttggaatactttgtgcataccaaacaaaccactaacttgatttgggaagataaactgaaaatacatttctagttcagtaatagctataattggacagtctgtcttttgaacaataaaaataatcctagtttcgttttgtgtaaagatataacatcttatgtgtgactgcaaaaataagcaaaaactacttattaaaatatgtgtattttcattttgtttgctgacagtgtcaggtagtaattgtgctggttttgcagactctgtaatgtgttattgcagaaaaagcactagattgggttctatgagactgaattaaccatgagttgtttgtcaactgaattaacttctctgtgccacagttttgcatctcaaggaaaagagattgaactatgtggcatataaggtctctttcaattctaatatatttgtatttgtaaatattcttcagggtggctagaacctacttgaggattagtcaattcaaataatagcaacagcagcaacaactgcaacaaaacttcctttggaaaatcaacatactttagtcagaatggccctttaatttttaaggcccagatgcctcaaaggatttgtcatgtacagttatcatttgttgtcagaggactattctgggggatagaatgttatgggtgaatttgggttctgtgatggccatttgcaatgctttagcttgataatcaaatataatatatttcacaatacatttatcattttgttgaaataacgtaatgagtgaagccattgtcttgaagtacaagtttccaagagaatattcggagcaaattggctggaaagtgagtggattatagtaaaataaaatagataataggcattatttttaataaaatgttcttgccttgcttaagaaatatagttcatgaaaaagaaaattataatttgattgggaggattttatggtaatgatgcctgtgtcacagaatcttacaatatattttgaagtgggtacgtttaaaaatgtcttgctttttagaagaatacttaataacaaagaaaaagcatatttttgttaattttacttgttatgcctctttgccttttcagctttcatggaagacattaaggaaaaaaaagttggcattgtattcaagccaaatattaggacacaaagaagaaattaatgttatttctaccatttattcaccttttcttcctttttcaaagaactccttagctcttctgttttattagcattctataatcctctaagtcactgtgtatctttatattttgaagagaaagttgccatgtaagaaaaagatagctttcttacttctttgagggagaagataggctatgaataaataaaagataaaaaataagaaaggctgtcagtttcaaacactctggaagaatgttgactttgcaagtaactgttcaaaaattagtctctttatacagcatgtctggccaatgtctaggtaaaagaaatgacctgaggtgaatgattttttttttcattatatgtgctttaagctaaagacgacctcaaaatagtcctttaaaaagaatggtactacttgtgctgtaaaatacaggtatacattttctaatagtataagggagacagaaatggatattcaattctagtccatatttcttggctttttattatttagtttttatttttatcagggttgtatatgaacattttctaaaagatcaaataatcttatagaacttattatgtgaaaaccagtggtcaatggtgaacttcttcttccttccctcccttcaaatgccctctctaacttctctttctctagctttctccatttcaactactgtatttagcctctctctctctctctctctctttctctttttatatttaccaccatcattctagttaatgtacttatatagctacttcttgatttttcaggtttaggcattgtctattggcttctgctttggaaattgaggatttcgctcttttctctctccattcaccccaacacacatctttacctccccctactccttcattctgcccatatagttaatgttctcattttgggtaaatccatgtgtttacattattatgcctttataaatgccattcattgctgtcatattatgatttcttctttattaaactctactttctcttgagttagtcattgtcctattttgtcatttacttagtttgctacgtcctcatcattcagtcaatattctgtctctcttgagttgtataaatctcctcttcataatttcaaataggtgtgctataaaattgtatctagttcatcttcttggtgacattctctcagagcttctgatctacgccaatctggactggttgttgaccagccctgctgcatggctgtcgtcactggggggccccctgaattatcatgttgaggggaccctttcttctgtaagatgcttgctggcttccaggtctttgtgttctttagcttactccaaagttcatgggaagtcggtttttttgagattttgcttattggactcatgactgatggtttagttggtatagaactctagcttggaaataattgtccatcatagttttgaagtcatgatgccatttatttctaagcttctagctgttgctatccagagcagcatcattgttttgatcctgaacattttgtatctgaagtactttttctggtggtggtgatgattttgtttttaatcctgtttggcaattccagtcttctgaaatttcatggtgtgctttggtgtgtgaatatgtgtgtgtgtgcgtgtgtgtgtgcgcatgtgcatgtatatatgtattagattttcatctcattgtatagttctgcataccccaagtttaaaaaattttttcctgtgttaggtttctgtctttcatattaatgacttcttagacgcctggcagttcttgtctatttatatttaaaagtggggcatttgaagctaattcagagttctgtgtgcaagagtgagatttatctactgtgtgtttctcccgtgggtatttggctgttttatcagagagctcccaataacatatctttaggttttctctcttggggtagttagatattccaaagaagaatctttcaggctcccacctggagaatgtaagcctgggcctcagtggtgggggaagcaagggggaaaaggggccttgggctctcaatattcactatgctaaagttttacttaattctccttttctgtacaatactcctgctttaatatgtgcctagtgatcttcagtacagaaaataaaaggtgtagccttctaccagggtggcagagccagttgcccagcttgtgaaatcggagagaggatctagaactcttaagtccttctttaaagagatctgaaccaatcctcttgtttttagtccctccttcatgcccatttataagggatcttggattccagccattcctgagcttcttgggaatcccagggaacaaactgtcttgtggcccacctttctttcactgcctgtttagagtcagcttcttgtctgctggaccagttaccacttgttcttctgctttctagtttccaaaatgtagttattttttatgtccaagtgtgtttatcttttttaaaaaaatgtcttttaaaatcattttagtgcagttttaggagaaagtggaactaaatgactgtattcaacctgccactttaaagaggtcttttctcatttgtgtaactgcagattgtcttctcaataggcggtttggtcagaaagtgtaggtgcagtgtgaacaattctgtagagcaggaataagactaaatagaagcatgctctgtctgtgtttagatgcttgtaactgtcatgtttttaagaagaggtaacattgggggtgaagtaaaatatctcttctggaggagttttaagtgcagtttggcctctttttaaaattctcttagtctccctgtgcagacagatacccacatacatttgtatattgaaaggggccatgggagttagtatcgtgccacatcttgtgcacctactgtccagtggcttctgtgtcccttttgtataggatattgtcatcatgtggtgtagaagaacccttcaggaaaagcaagactcctctctgctagaggaacgtgggtgctttgagaaaggagattcagagaggatgacagcatctcacgcatgggcgtggggttccccttctcatttgaaagatgtagggttcattggactagacgagcctttccagttacaaatcttggtcacttgagaattttgaaaatgcattgtattttaattgcttacttttttacatctgggctttgtatattcattatgattttgtatcagagacattattagaagtcatttgaagacttctggtttaggtgtgttgataaggttggctgcccttacattttcttgtgtttctattctcctctttccctgacggctacttcttgaccatgctagctttttcaatttctatgacaaatcaagttctttttcccctctgggcttacacaaatatagttccttctttatgaaacgttgttctcctcattttttttgtctggctaactcctaattatttcagctaagatattttttgttttcttatcccccacagagggttttcctaactcttcatctaaataagatcacttacctcttagatttctttccctctcagctttttgaagtataacggtatacaatctggtaaacttttaagaggcaccctgttctttcccttcatagtgcttctcattgacagtatttaaacatgcatttctgactctgtttactattgactttccttctagactataacttcaatgagggctgtgggcatatcttccttgttcactataaatatctacctcttggcactggtgggcactcagtcaatatgggttgaatgaatgaagagtacaaactcagaaggttgatcctactggcacccttttcaagcttcgagaagtcctaattatggtatttgaggtgctgggattagttttttacccccttgcaactctacataaactatgtaactactagcattaaacagacatagactttgggccagatcaatataatctatttattactgccactgtttggtttgttttgtttttcctgtccagttctcttaatctggtatcattaatctagattagccaaagaaaaaatacagattctgggggtggaggagaaagggccaaaccagaagaagaataagggggaaggaggacaatttagtctgttccactagatactttttaagtattaaacagtgttcatgtctttcttctccattcaccagaaaattatgaatttgaggaaaaggacaaggaagttagagagttggtcggtcatcaggtaactttagttactgtttctggagcagtctttgttcttactgtgcctttgaccaggagttcctagaggacaggaacatggctttcacatatttagtcctccacagcagaatttaagttacttaacagttaattatggtggtgctcaaataagatttgttgaatgattaatcatgaacacgatatcaggtttcagtttctggttgggattctagcataatagtttaactaacaaagccctcagcttctgtaaggttatactctaaaggcaaagaactgctcttcggtaagtgtcagatgggccagccagtaaggagaggcaatgattctgggacgttgttattttgccaagggtggtccctaaacttttgttctgtttggaacaaactagctggaatacctttttattccctgatgggttttccctaacaggcagtgcaatgcagtggtttatattgttttgaaagcagattagactcgtgttcaaatcccagatcttgttagcagtgtcatcttgggcaagcgatctctgagcagatgcctttaccgtcatgggggcctgatgtaaagtgtatacctcccaggggagttatgaggattaaaaacaataatcctcccaaagtgcttggaaagtacttcatccaaagtgagcgctcttcatgccattgcagttgttgggatttttgaggagtgtgcaaccaaggagttggaaaagttcaagggaggccaggcgtggtggctcacacccgtaaatcccagctacttgggaggctgaggcaggagaatcgcttgaacccaggaggtggaggttgcagtgagccaagattgtgccactgcacttcagcctggacaaaaagagtcagactccatctcaaggaaaaaaaaaaaaaaggcaagggaattgatagcaaagatgattcttcgtaaatgactatacattcctccaggtacttccatgaaaaacagtgcacaagctacacaaatacctggattggattctgagcgataactactaaatgagctttgtttgctccaaaatcagcacaatgttcagaactgatcctttaattatggcctttgatccacaatacctacggtgtgcttttaagcatcaactcctttacgttttaaaatcttattcatctgcactgaaatgtaaagaggttgagaaaaaaagtgcaagacttgactggaaactttagagtgtgtacattatgtttagtttctagaaagaagtatgggcattgggtaatttgtctggattttaagaaggccacagtctggagttaatgtaattgccaaggggataatggagattcatatttaggcaatataggtacagatgagcaattcgaagcagtgtgcatctgccaaaagtcttaccttatttatgacagtttaagactggcttctcagcagaaacgtgcagagggaaggaaaagtcaaagtcctaatttctgaaaacatgggcagtgcagaattcctgcatgtctcctgtgggaattacagcaaatagaatggagtctggcgtagataatagttatatgtgatttgtttttcatcatgtgtcttcatggatggaaaagttcagtcttgtcttcaccctcactgttattaatataattatcacaaaaagatattttgtggtttggttaacattttacaaacacagacattgatttcctctctcgaaaagaaaattgtatataacttaacactatgtcctttaccactcaaattttcaaagttgtttaggtagcagcttccagatttttggattttatagaaccataatattaaaaacaaacaaaaaaaccttggcggggtgggcaaaggtgggacttagtttgccaataaggacattagaaaaacaaccctcagggactattactgagttcatttcatgaccttaataccctcctgcccctgcctgtaggaacattataatctttgaataaataagtccttttaaattgaaaaaaggtagttttatgggaaaccaaccaaccaaccctttttgttcttggttttcctcagttcactttggattactgaaaacattattgaccaacagtgagtgattccttgtatggaatagtactagctgatggttctacacatacataaaaatgttgtcatgattaaaattatcttcaagaatcttaaaaccagtgttactgaggggaggtagaagcttgtgtatgtgacatggagatctcccaaaatataattttataaaattgactttagtcattggatattttctcatactttcaaagactttatataaggaaagaaaaacaagagattattatttttgtttaatttgtgcttataaaaagacatcaaatagtgttaaatataaaatagttgattatccagaatctattccaatagatgagaaaggggagttgtgatgctgcgaagtattttgtttttaaaaaagtcgatattcttggcgatatgctatatagttaatgttaatggtaagtgaccaagagaagttaaatgttattcagtttggttttgaaatatattaaaactctttgtatctgattagggataattatattttctgttggtattaaagccgatttgtgtcctctgaggtttacaccaagaaatgtgtatttaacagtgaggggggagtggggagctgagtatagtaagggtggagtgggatgggacttactgttgattcaggagagtaaatgaggccaagttgtgaggagaaaacaagctaggattattttaaagataatttgggagctttatataagtacatggaaaatagggaaccccctgaaatcatggcatagaatggggaataattacattaactttttctatccttataatggaaaaatggtgcttccctaggacttctggtatatattgcttatgtattggatatattctggcacatcagaaatctatgaagacttttttctattgattttattcatgaaaggtgatatttcagataataatttgactttaggaaaccttgtaaataggtacaaagaaaacaaaagtacaacaccctcccctccaaatactttaaggataattgcatatgaaatgaccttttatataactgaaaagagctaggtctttattattcattttttggcatcccacttgtattagttttctattgctagtatattaccacaaactaagtagcttaaaacaacaccattttattactttgcagttctggtggtcagaagttcaaaatgggtctcaccaggatgaaactaagatgtcagccaggctgcattcctttagaggagattcccttttcttgccttttccagcttctaggggtcgcctgaattccttggctattggccccttttcattttcaaagccagcagtgattagtcagtctttcttacaatgccatctccctgattctgactcttctgacttcctcctttctgcttaaggacaattgtgattacattgagcctacctggattaattcagaataatatttgtaaggtcggctgattagtaaccttgatgccccctggccatgtaacgtaacagtcacaggttccaggggttaggatatggatatcttttggaggagccattattctgcctaccataatactgtatcacacaaatacatataatttttctgccttgattattctacaatatgagtggttgtttcttaattatacttgcctaagaaataagttaaataataaacttcttaaagggacaggagtcattattgagctaaagagagagctcattcatatgacttttaaaatgtcaaatttcgaatttatttgtgccatatactctagttggtacccatgtttttgtgctgtgagggaattccttcttgctttgaatttcctgccagttacatagcttgctctcttgatttttatccctatataattttaaatttctgacttgaggttttctaagaggccctagttactaaagttaggaggtcaaggagatggtccattgtgacttagggttacatgttaaagaaaaattattcaatgatgctcagtaaaggccaggaagactattcaggaccatcaccataggtatagggaccactgcattgggttcttgcagtgcaagaggaaagattgagttcaatttcaagtacagcatggggaggtaggaattcatagccaaagagcagggtggggatcagtagatggaaaattactaagaagaagcataaggggtaagggggactctggctaaaccaacctaacaggattcttgcggaagactggctggggtgatcagacatcacctgggggatggtggaggagaaggatgatcaaattagatatgggggttcttgctgaactgacttagccaggctctttgctaaaatgggatttcacaaagaagtgcacagatgggtttaggagaaggttcggaagcctaactgaagtttgaccaaggaaagaatcttattcatatctcagactctgaaaacacaaaagcttattcctttcatggtgatgtggtgggtatggggtagttggtaaggtgtagggtgaggagcgtgtggggtagttggtgaagtatagggtgaaggaattgagaaagatggaaagaggtgcacctgggaaaagaaactaaaagtgattcattatagagtcaggactaaggccacggagatattgcgctctggtcttctctctggtaagccatagatttgaactgagggtaaaaccaaggaaagctattgagataaatgagaatcactcaactctttttttttttcctaacccactgaatttgagggatttaattggagacaaagggcgtaggtgttgtatgtatcgtgatcatccaactgagctgcaaaaaagtggtgaaagtaaatccgattagttgagaaggtaggctttttgttactataacaagtgatgtttcaataaagtgtgagaagaagcactgcagaagaagtataattatggttcagtttattgagttgttgttttcgcctatctgtgatagagtatggaaagatgaataaaaagtttgccatcaacagctgaagtgcttattgccagggtgaaatgtattttctgtggcacctaagttaagatattccctgtattttctctcagtcataccatgaatgtgaggacagagcaacactgacctctgcctaaccctagtacaggtaacccttttagggtgttggtttatgattatatcaactaatttttgagatggtttttttttattatccttcctggtgtaacttaagtaccctcaattggtttgtaaacacttgttgtttctatagcctgtttcttattgccagtcatggcataagtttttccttctctagagttttcatatcttggctgcttctcaaagtttgaggtaagcaaatttggatgcagtgcctccgatgaggacttgtcattttgatacacaattatgctctattttctttttatttatttatttatttttaaattttttttatttatttttttcttttttttctctttttttaattattattatactttaagttttagggtacatgtgcacaacgtgcaggttacttacatatgtatacatgtgccatgctggtgcgctgcacccactaactcgtcatctagcattatgtatatctcctggtgctatccctgccccctccccccaccccacaacagtccccagagtgtgatgttccccttcctgtgtccatgtgttctcattgttcaattcccacctatgagtgagaacatgcggtgtttggttttttgttcttggaatagtttactgagagtgatgatttccaatttcatccacgttcctacaaaggacatgaactcatcattttttatggctgcatagtattccatggtgtatatgtgccacattttcttaatccagtctatcattgttggacatttgggttggttccaagtctttgctattgtgaatagtgctgccataaacatatgtgtgcatgtgtctttatagcagcatgatttatagtcctttgggtatatacccagtaatgggatggctgggtcaaatggtatttctagttctagatccctgaggaatcgccacactgacttccacaatggttgaactagtttacagtcccaccaacagtgtaagagtgttcctgtttctccacatcctctccagcacctgttgtttcctgactttttaatgactgccattctaactggtgtgagatgatatctcattgtggttttgatttgcatttctctgatggccagtgatggtgagcattttttcatgtgttttttggctgcataaatatcttcttttgagaagtgtctgttcatgtccttcacccactttttgatagggttgtttttttcttgtaaatttgttagagttcattgtagattctggatattagccctttgtcagatgagtaggttgcgaaaattttctcccattttgtgggttgcctgttcactctgatggtagtttcttttgctgtgcagaagctctttagtttaattatatcccatttgtcaattctggcttttgttgccattgcttttggtgttctagacatgaagtccttgcccatgcctatgtcctgaatagtattgcctaggttttcttctagggtttttatggttttaggtctaaagtttaagtctttaatccatctggaattgatttttgtataagatgtaaggaagggatccagtttcagctttctacatatggctagccagttttcccagcaccatttattaaatagggaatcctttccccattgcttgtttttctcaggtttgtcaaagatcagatagttgtagatatgtggcattatttctgagggctctgttctgttccattgatctatatctctgttttggtaccaataccatgctgttttggttactgtagccttgtagtatagtttgaagtcagatagcgtgatgcctccagctttgttcttttggcttaggattgacttggcgatgcgggctcttttttggttccatatgaactttaaagtagttttttccaattctgtgaagaaagtctttggtagcttgatggggatggcattgaatctataaattaccttgggcagtatggctattttcatgatattgattcttcctacccatgagcatggaatgttcttccatttgtttgtatcctcttttatttcattgagcagtggtttgtagttctccttgaagaggtccttcacgtcccttgtaaggtggattcctaggtattttattctctttgaagcaattgtgaatgggagttcactgatgatttggctctctgtttgtctgttattggtgtataagaatgcttgtgatttttgtacattgattttgtatcctgagactttggtgaagttgcttatcagcttaaggagattttgggctgagacaatggggttttctagatatccaattgtgtcgtctgcaaacagggacaatttgacttcctcttttcctaattgaataccctttatttccttctcctgcctgattgccccggccagaacttccaacactatgttgaataggagcggtgagagagggcatccctgtcttgtgccagttttcaaagggaatgcttccagtttttgcccattcagtatgatattggctgtgggtttgtcatagatagctgatattattttgagataagtcccatcaatacctaatttattgagagtttttaacatgaagggttgttgaattttgtcaaaggccttttctgcatctattgagataatcatgtggtttttgtctttggttctgtttatatgctggattacatttattgatttgcgtatattgaaccagccttgcatcccagggatgaagcccacttgatcatggtggataagctttttgatatgctgctggattcggtttgccagtattttattgaggatttttgcatcaatgttcatcaaggatattggtataaattctctttttttgttgtgtctctgcccagctttggtatcaggatgatgctggcctcataaaatgagttagggaggattccctctttttctattgattggaatagtttcagaaggaatggtaccagctcctccttgtacctctggtagaattcagctgtgaatccatctggtcctggactctttttggttggtaagctattgattattgccacaatttcagctccttatgctctgttttctaagccttttaaaatagctgaatgttttaaataagtgaatgagctgttgtttggacttgcatttccccccaaaatgtggaagtactgattgaatcttggtgcaaaacatggagatcttttttatgtactgtgctgaacagagtgcttgtaagaaatgtaggcaggtaaaaggattagttttaattatcttccaagctagtgtgatcatgaagtaggggcatccccctcccaatcaggtgcttttctgtgacagtggccttaagacatttgcctgaaaggtgtgttaaaagagcagtcatttaaagttctttccctggcattcatgagatatttctcattacctggagagcacccagacaagttcatgctgcttttttacaatgaattgccagataacattgtgttcttgctgctgaaagatgttcaaacaatttggactctgctactacacttcagtctagtctgttcaagtaaaaaaataaaaaaaaaacaaactgaaaacaaataccaccaatatgaaaggaagtacaaatctatgtgttgtgaagaactgaaatgaacttatctgtttcccaaaaatatcccaggtgtttttactattgaagaatcaatatatattgactagtatattcttcagagtttaaagttttcatcctttattgtgaaactcatatgaatgaaaatgcagtggcactgatgatttttattttcttgttttcttccatttctcatttgaaggaggcttctataggtaacaaacaattctggcataactgtatgttcacatttctatttagaattctatttcagtttaatatactcaaatactttataattcaatatatcccactgcagctgtttaatcacagttttatattttaataattaaagaataatgaagaaagagcactgaatgtgtaaatgccaaaatctcaaataacaaccaaaagtttgtgttttctgttctacccacaccgagaacagaaattttaataattttttaaggtaagcttgaactagtatggcataaataataattattgttattaccacttactgctttatttgtaagtcaatactctaagtattttacattataactaatttagtcctgaccacaactgtatattagtcccattattgggatgagaaaacaggaccatatatgtaacttaggtcatttggcaaaggtggcccagttttttaggtgatttggcaaatgtggctgagtaagtgttggagtgggaatcaaactcagaaatctggctctcaaatttgagtgttcaacttctaaatagtggaaaaagctgcagcctaccttctcctgtctgctaccaagcaatcctgtgatctttttgatgaatgtgcttcaagatttggggctttagtaagttcatctatgttgagaacttttgatgtcataaaacatactctttaaggtattttctagctctaaaaatctaaattctatatagtttaaaattaaccatgtatttagccaccaaatggagactgataaattttggggtagccatacaatagaattctatgctgacattaaaaagagtcaggtagaatccttttctgctttgatgaatatgtcctagcatattcacaggtttgcttggtagcacacaggagaagatgggctacagcttttctgctatttggaaggggagcactgaaactctgcagccagatttctgggcttgattcccactccatcacttattagctgagtcacctttgccaaatcacctattctttgggtctgttttctcatcctaaaatgggactaatacatagttgtcaggaaaataatgagctagttgtataactgtatgcatactatgattccatttttgtactaaaagaaaagagaaagatgtatatatatattagtatatgcatagaaaagttgaaggattgagcactgatcatctctaggagggttgaatatgaagggacatttcttttttcctttacacatttctgattgatcaacttattcattacaggtattactttagacatgagaaaaaatagagaaaaattaagtgtgtgtcctcatatgtgcttataagtggactagagataaaagaaaaaaggtctcctgaaatcagaggttgggccaactgtcagattagtggaaggagcaaattatttccttctctagtttgtgaaatgactgtggggccttcagttgttgtagtagctatttaaaccatcaccatgttttgtaaccttttaaaattctcctgagctttttgcatgtttcttaatgaataaaggataaatacagtaaagtctgggttgatttttttctgtattttcattgatgatgtctgaatataggatctatcttgagccttgctgcccaggtatatattgaccacaggtggcttaatttggcttgtacatagtgaagtacatagtacattagcaacattaactaagtattttgagagtacagaatgtagtgtaagccttaagtggggagaagtagttatggaccttgggccttgagaaataagaatgatattgcctgttggacaaaaggaatgtagatttactttctgagtaaataaacatcctgaatgtctcgagatatctccttgtgacttccatctactagtagaggaggactgagacaccctactctttgtggcatacctcactacgcaggcctttgggatttgaaggagcatgactagaagtcctcttgggaagttggtaaagctaaaggtaaaattctcccttggtacaagttagatcaaacatggttcattttgtgcctgtgctgtatcaggtatctgaagtagattctttccaagcttaacctttcagacagtttttaatctataaatattagtgtttaaaagtcaaaaccctgtgaggtcattctaccatttctgttacctccctcctctcctcacgttaccacaaagctatatgtttctttttttgccaggtctaagatttttattagggtgagattagatttttcatattaggtggctggaaagtacagccagctgaaaactatcagccatttagactacatgcttcatttgaattgtgtttctggatgcaagtcaagtgtgacaactgagtttcataactttctctagcttgattcaaaaatgttttagggccaaaatacttctgaggtcttttctatcctttcttggtgaggccgtatggaggttattggggttaagactatgttgtgggtctcataaaaatgatggagaggtgaggagccttgcatattaggcttgaatcatcttttatccttgcctatgttcttccaggaatgacttatctcgtcttgttcaaaatgaacatcgcagtgggtccatgcctctgataataattgatgtcatgtattttgttggctttaaaaatgcttaagttctttgattgaagttatagcttttagacaatatagagctaaattatgaaggggaaacatgttttcaaagaagactgggtggataagaaggaactaaagaaagtaatagtcggaataattccaatgcatggcgattaggattttagtgttcactaccatagtctcccaggggacacccacatccaacagaacttgtatgtttttatttacagttattaaataactgtatttaatatcatccatgcccccaattatttaatatcatcctagcccccaattattcagttttttaaaaaaattcaaccaagctttttaagggaaagcattaattttataaacctagatctgagcaatttataacagagccatgtgagctatttcaggaaatcaacaaatatttattgagcacctatgatgtgctaggcagagtacataagtcgaagtagttacagttctggaaaaaaaaaaaaaaatgaaggctttattgtaaaacaataggaatagattagagcacaggtccccaagctttttgatgccagggaccagttttgtggaagacagtttttctatcgactggggtggaggggatggattcagggtgatgctgttccacctcacatcatcaggcattagattctcataagcaacctagatccttcacatgtgcagttcacagtagggttcccgcttctatgagaatctaatgctgtagctgatctgataggaagcagagctcaagccacaatgctcccttgctcacctgctgcttacctcctgctgtgaggcctggttccgaacaggccatggaccagtaccggttcactgcctgggggttgaggacccctggattagagtattacagaaatatttaagaggtgaaatcaatacaagtaagagacttgtatcaattttggacattgtgagagacacaggattgaggataagctttggatgatggattggatgatgctgcaatttactgaaataggaaatatagaaagaaggaacaagtttcttttgtgggtggtaggattgatactgaaattggatttttattagtttgagagtacttaagggagatctagatagagatgtttaacaggaagtttaaaaactctagtttggctctccagagcaggacgttgaagcagatatgggattcagaagccatcaaaatagtagaagccatgggaatggaaggaatgtcctacgtgaaacatgtcaaatgaaaagtgtcactggacctacatacatactcttgatttctgtcttcaccaccccagtaagatggtgcttgtgaagatcaccaatatcctccatatttccagatacaatggttatctgtgtgttctgatctaactactcagaagcattcatcttagttgcttacctcctccctcttgaaacacttaagttttcttactttcatgacacttacgttttctgttttttctctcaacagactgactggtttctcctcttgtgtcttcttgtaaagattagaaaactttaaaactctgtctagacccgccccccaccccaactctttgtcattagcatgaccttagtgttataattctagaggaagacaaaacacaggaggagtcacataaaagtataagatttgccaaatttaataggatgtgatttaaaaggatgcatgttccttccattcaagaaaaatgcggctagaatatagaattccatcaacctctgtccaatgataaaaggttaggaaataattcaataaaacaattgtaaaaaatcttgccgtcatgggacttatgttctagtgaggggagactggcaataaacaaataaatagtaaattactgagtaagtaagaagacagtaagttctgtgggaaaacatgtaaggtagttagaacatgttgtggtgggaaaggttgcaatttttttggcttttttttttttacttatactttaagttttagggtacatgtgcagtttttaagagtaatcagggcaggtcttactgaaaggtgatatgtgagcaaagacccaaacaacataaaggagtgactatgaaccatatgtatatctagggcaagagatttctaagcagagggaatggcaagtgcaaaggtcctgaagttggatgttaccaagcgtgggccaggaactgcaagaaggccaggttgcttggagtaactgactgagtgaagaaatagtagtagatgttgtcatagaaataattaggagtgggggaggaaggaggaaggaggcagattttataggaccttttagtctgctataagggctttaatttttagcctgagtgagatgggagcctttggagtattttgagtggaaaagagacttgatctgacatatgttaacaggatcactctggctactgtgctgtaaatagactatacggaggtttgagtgaaagcagggagccagtgtgaggcttttggaataatcaaagcaagagattggggtggtaagggtagaggtggtgagaagtagttggagtctgtatatatattgaagctattgctgacagaattttctgattgattggatgtgtggtttgagagaaaaaggggtgccaaggattattctagagtttttggcctgagcaactgaaaaaatggagctgttgttaactaaggaggaaagtttcaggaggaataggtttgggatgagttataaattgtgggattttttttcaaaatttttttttatttttgtaaaatacatataaaattcaccatcttaactatttttaagtatgcagctcagtggtattaaatgcatttataatgttatatccccaccatcaccagcatacatcttcataactcttattcatcttgtaacactgaaattctatacccattgaacaataactgcctgtatccccctccttatttcctggtaactaccattctacatttggtctttatgactttgactaattctatcttatataagtagagtcaaactgtgtttgtcttttttacggctggctggcttatttaacttagtcttatgtcctcagggttgaaacatgctgtaacatatgtcacaacttccttcctttttatagctaaatagtaatcgattatatgtatatatcacattttgcttatccattcatttgttgatggacatatggggtacttctatgctttagctgttatgagtgatgttgctatgaacatgagtgtacaaacaactcttccagatcctgctttcagttcttttgagtatatatccagacatggcattattggatcagatgataattctatttttaattttttgaggtactgccatattgtttttcacagtggctatatcattttacattcttcccaacagtgtacaagggttctaatttctccatatccttgccaacacttgttattttccattattctgatagtagctgttatggtttgaatgtgcatgtcctccccaaaattcatatgatggaacctaagacccaatgtgatggtattaaaaggtgaggccttcaggaggttattaagtctgggggctatggccttatgaatgggattaatacctttatccaatgcttccaggaaactagctaggcccttttcatccttctgtcttctgccatgtgaagatgtagcagaaggccctcaccagacacaaaatgccagtgctttgatcctggactttccagcctccagaactgtgagaaaatgaacttctgttctttgtaaattacgtattttgttggagcaacaggaacagtctaagacagtggccatcctaatgatatctcactgtaattttttttttttttttgagacaacgtctcattctatcacctaggctggagtgcagtggggtgatcttggctcactgcaacctccacctcctgggttcaagcaattcttctgcctcagcctcctgagtagctgagattacaggtgtataccaccacacctggctaatttttttgtatctttagtagaaacggggtttcaccgtgttggccaggctggtctcgaactcctgacctcaagtgatccacctgccttgactcccaaagtgctggaattacaggcgtgagccaccacacctagccctcactgtagttttgatttgtattttcctgatgattagtgatattgagcatcttttcatgtacttaattagccttttgtatatcttctttggaggaatgtcttttcaaattctttgtccatttttgaacagtttttttattgttcagttttaggagttgtctacatattccagacattgatctcttattagagatatgatttaaaaatattttttcccattctatggactaactttttacactattgacattttcttttgttgtaccaaatgttttagttttgataaagttcaatttgcctattgtttcttttttcatctgtgtctgtggtatcatgtccaacaaattattgccaaattcaatgtcatgaagcatttgccctgtgtttttttctaagaaaaaactttctatgtttctatgttttttatacttttaggtcttacatttaaagcttttattcatttggagttaacttttgtatatggcattaggtaagggtacaactttattcttttgtgtgtgcatatccagttttcctagcaccatctgttgaaaagactgttctttcccactgaatgatcttttcacccttgcccaaaatcatttgaccacatatgcaaaggtttattttggggatctctattctatttcattggtctatatgtctgtgtttatgctaataacatgttcttttgattaccggacgtttgttttgaaatctgtatgtgtaagtctggagctccagctttgttctttgttttcaagattgttttgtcatttgtgattctatatgaattttaggatgggcttttttatttccataaaaaaattatttagattttgataggattgcattgaatccatttgggtagtgttgacagattaacattattgtcttttgtccatgaacatgggatgtgtttccatttatttgtatcttctttaatttctttcagcaatgttttgtggcttttattgtacaagcttttcacctccttggttaagttagttcttaagtgtcttattcttttacgtgctattataaatggaattattttcataatttccttttcaggttgttaattattagtgtacagacatgcaactgatttttgcacattgactttgccagtgacatgaacctgtatgtagaaaaccctaaagattgcacaaaaaaaatggttagcttgagacgtaaaccttaggcaaagagaagtttgtgatttgtaagaaatttaaaattaataggattaaaaagagagctgtgggccttgttatgtatttgctttggaagccctctaagaaaatttcaggtcaattttttattctctgccctactggaatgcccccagattatgtgacaatgaggtcttattttaatatgtgcagaatttgttaagactgacattctttgtttcagatttttacatatcagagaattcttgcatttttctggtgatgtcttattcctcttgtgtgggtcccaagtgagccctgatcctctcagatacattttatatactctgttggtgatgaatattttatctctggcaaatactgtccatgtctaattcccttgaggaccttggtatccaatattattgtaattataaaatcaatgttaacactaaagtcaaagagtcatgagcatgccctttcttgcttgtgaagagccatggggagataagcagtctgttcaggatggagtcataattccttgtatagaatatcataaattatttccacagattcaccaagcaaatgaggcctaatgtccttttctataaaatacatgcctttacctaatcctttccctcccactcccattcccccactgctttttcttaacatgatagtttactgtgagccttcaggtttttttccttttgggaaagctgagtttgttagccaaggacctttatttatttattgctaaccataaatatgattgctccattttttgttgcatgttccagatgagtagttttttttattcttgttgtaacagttgcttcacaattatggtgtgatatgcaaattggaaaagggagacttgagggattgtaccttacttagacaaacatgtcaaaaaccagaatgtttttatttaaaaaagaaagaaagaaaagaatggctagtcacacatccttaaggagtttctgtctatctacactgctagtgacaaacaatagcccagactgtcccatggagtttttgtgtttaacaaaagctaggtgctacacatggcttcaagtatgtcctgtcccattttctccccataagacattgaaggtgaaaggaaagcaaaaatatgcaagtatgaacataagaactgccaggcatttgcttcctctacattcacagccagcctcatcttcttacatgtaataatgtatcagtaggaaaatagaaagggagaagggaatacatgtagaataggagagctgagtattaaataacaagtgggacactaagagggcaaaacatgtttgctcaggaaaattcactccagggtttctaccagccctcatcctgtcacctgccttggttcagactgactcttagccattcccaagactctggcacattcagtcagaatcagtctgtggaattggaagatgaataaatatgttctgttttatgtccttcaattgtagtactagataagttctgctgtctgttgggccagtggaccaaatgtatagttgatactggttttggctgccctgcttaggagaaaatcccacaagaacttggagacagggttccctccttccattgctgatggtagggggcagcaattttttcctcaacaacctggtagccagggccccagcatgagagccagcaaggtttggctggttagattctccagctcagtggcacaatgcccggggttggagccttctgatgtcattctcgtggctgcagtggagtttggtgcagggtggcaagcagttagcataagtggcaactcctaaacttataatagtgttaccttgggctgccttagttcttgctgttctttagccttctcatcaattctgtgaattatcagtatccttccaatgaattgcttttctgttatttgcaatctgaaccctgttttgtacaaaaggaaaatgaggacatccctttttaagaaacacttgggatgttcaagaatcttattttcctggtagtttaagaactcctttgatagagtgagtgctttgtttgacaaaaaaaaaaaaaaaaagtcgatgctactgagactttattctagtaaagctctagttaaatgtataaggcccatggagcctctctaatatcttcatgaatctgtatatggtacttgtataatctatgtaatttgggctataaattcaagaaacataatttaaggcatttgtgcctgtactaatttcagggaataatataaagcaaatactaaaaggattagtaatataaattaagtccacatgctacatttaatcttgaaggaaaattttttttggtatttaattttcaataagtgatttgtgggtgctgaaagagatcagctgacatctgataggtgaccccacatagatctgcctttatctgtgtgttcagcttttgctcgtgaagtttgacagtagtcagaaagtgcctctttaataaagcacacctttaaataactctcacagattcattccagcttttaaagtgagaagatggcttgaactcccactgctgccagctcagctgtggatctgaaatatccagctgtgccctctctgcctctctcatcaccaataacagactttgcagtcagaatctgtctggcacgtgtgttgatgtgtgaggcgagatagcattttgctcaccgtattggcttctccgcgctagaccatagtaaacatttgtctttgtcagcagttaaagcagtgtgatttgaggatgtacagggattacggacacttctgctctgttatgcttttgtctaggtctacatagaaatttatattcaaaaagagtcgatttaactgttagaatagaccagtaattcttgaaagtgtgtttttaggggttttcttcacctttaggggaagaaaataatccaacgattgtcccactatatgtcatactacgagcttttaattgttgttattattgcaaaccaaatggactgcctctgtgtcattagccaccattgggatttggcatatcatatcagatctttgaccaaattggtgttaaaataagcctaaaccctgaattatctttaattatctactatgagaagaatcctgatgtgtggtcataaaaataagttttctttgggaaaacactattgtaactgaaaaatctaatattagcactcatgatgataataacacctattgattattgagtactgtgctgagcattttgtatatagtaccttatttgctactcccagcaatcctgtgagatgatccctattttctagattagctatcagtgaagtaacttgtcctgattgccatagggtttgatttcaggcttgtctaaccatgcttttaatcatagccacgcacatcactggggagcacatctggccatgtggcttggtcagacactcatgttccaaagttgaattaaaagtagtgcctgcattcaagtgctctaagtccagtgggggaagatggatggcaaatcaactgtacttgacagaatgatgagtgttatgacagtgaaatagaaaagatactcagggagtttggagaaggtcatctaaatcagagtgagggtcacagaagttgtcttgaaagaaatgatcattgagctgaattttgaagggtaactaagagccagccagaggaaaatagtgaggaaggatgtgtaggcagagggtcagcccctttactgacatggagccggaaagagaatggatcagaaactgcatggaggtgcataggattgccttgagggccatgtatttggtgggaaaaataataattaatattattatcaattaagttttgtgtgtcaaaccatgttttagctgttatagacgttatttcctgtggtccccataacaactattggatgccagaaatgaaggcaaaggtcagatcataaagctccttgtctgcccagataaggagtctgtactttatcctgacagctgtgggtagctatagaaagattttaaatcacgggaaaaacatggtattctggagactgaattggagtaggataagacctgaactaatgacaccagttaggagaaaagatagtgtggttatccaaaggactgtggtgatgtcctgaacaaagaaaggcactgggatccaggaggaacagggaaatagtagaggcaaagttggacagattcataggaattggtgactagtagaatatatgggactgagctccatctttatggagcctaaaagattgttaagtgaagaatagaataggatttccacttttagggactacaagaaaaacaattttggtttgttttcctttttttttttttttttttgttataagcctttctagcttcagttccaaaagcacagtgaatggaaagaatctactttattgagatctttcctcctagggatttttgtggtgatatttaaatccatttgaaggtctacttgtggaacctagtctctctctctctctttttttttttttttttttttttttttttttaaagacagtgttactgttgcctaggctggagtgcagtggcacagtcatagctcactgcagccttgaactcctgggctcaagcaatcctcctgcctcaccctccccaggacctgggactacaggcgcacaccatcacacctggctaatttttaaatttttcttttttttttttttttttgattttttttttattatactttaagttttagggtacatgtgcacattgtgcaggttagttacatatgtatacatgtgccatgctggtgtgctgcacccattaattcgtcatttagcattaggtatatctcccaatgctatccctcccccctccccccaccccaccacagtccccagagtgtgatattccccttcctgtgtccatgtgatctcattgttaattcccacctatgagtgagaatatgcggtgtttggttttttgttcttgcgatagtttactgagaatgatggtttccaatttcatccatgtccctacaaaggacatgaactcatcattttttatggctgcatagtattccatggtgtatatgtgccatattttcttaatccagtctatcattgttggacatttgggttggttccaagtctttgctattgtgaataatgccgcaataaacatacgtgtgcatgtgtttttatagcagcatgatttatagtcatttgggtatatacccagtaatgggatggctgggtcaaatggtatttctagttctagatccctgaggtatcgccacactgacttccacaatggttgaactagtttacagtcccaccaacagtgtaagagtgttcctatttctccacaaaaacgagaattttagaccaatatccttgatgaacattgatgcaaaaatcctcaataaaatactggcaaaccgaatccagcagcacatcaaaaagcttatccaccatgatcaagtgggcttcatccctgggatgcaaggctggttcaatatacgcaaatcaataaatgtaatccagcatataaacagagccaaagacaaaaaccacatgattatctcaatagatgcagaaaaagcctttgacaaaattcaacaacccttcatgctaaagactctcaataaattaggtattgatgggacgtatttcaaaataataagagctatctatgacaaacccacagccaatatcatactgaatgggcaaaaactggaagcattccctttgaaaactggcacaagacagggataccctctctcaccgctcctattcaacatagtgttggaagttctggctggggcaataaggcaggagaaggaaataacgggtattcaattaggaaaagaggaagtcaaattgtccctgtttgcagacgacaggattgtttatctagaaaaccccatcgtctcagcccaaaatctccttaagctgataagcaacttcaccaaagtctcaggatacaaaatcaatgtacaaaaatcacaagcattcttatacaccaataacagacaaacagagagccaaatcatgagtgaactcccattcacaattgcttcaaagagaataaaatacctaggaatccaccttacaagggacgtgaaggacctcttcaaggagaactacaaaccactgctcaaggaaataaaagaagatacaaacaaatggaagaacattccatgctcatgggtaggaagaatcaatatcatgaaaatagccatactgcccaaggtaatttatagattcaatgccatccccatcaagctaccaaagactttcttcacagaattggaaaaaactactttaaagttcatatggaaccaaaaaagagcccgcatcgccaagtcaatcctaagccaaaagaacaaagctggaggcatcacactacctgacttcaaactatactacaaggctacagtaaccaaaacagcatggtactggtaccaaaacagagatatagatcaatggaacagaacaaagccctcagaaataacgccgcatacctacaactatctgatctttgacaaacctgagaaaaacaggcaatggggaaaggattccctatttaataaatggtgctgggaaaactggctagccatatgtagaaagctgaaactggatcccttccttacaccttatacaaaaatcaattcaagatggattaaagatttaaacgttagacctaaaaccataaaaaccctagaagaaaacctaggcattaccattcaggacataggcgtgggcaaggacttcatgtccaaaacaccaaaagcaatggcaacaaaagccaaaattgacaaatgggatctaattaaactaaagagcttctgcacagcaaaagaaactaccatcagagtgaacaggcaacctacaacatgggagaaaattttcgcaacctactcatctgacaaagggctaatatccagaatctacaatgaactcaaacaaatttacaagaaaaaacaaacaaccccatcaaaaagtgggcgaaggacatgaacagacacttctcaaaagaagacatttatgcagccaaaaaatacatgaaaaaatgctcatcatcactggccatcagagaaatgcaaatcaaaaccactatgagatatcatctcacaccagttagaatggcaatcattaaaaagtcaggaaacaacaggtgctggagaggatgtggagaaataaatttttcttttgaagagatggggtctcgctatgttcatcaggatggtttcaaactcctagcctcaagtgatcctcctccgttgacctcctaaagtgctgggattaccagcatgagcgactgtgcccgaccacctagctccttttaaatgttttcatgtcctgacccttcttaagtctttaaaatatagaaaatgcccttggtaaggaatgttaaaagtgtttgtgtatttttatggcctacttcctgtttagaaatgttctgttcaggtaatcagcaaaaaaagagatttgctgtaaaatgcattagtttctcattcactttcctttaaattgtattactttgctctttaggaaaaaaatagtacatggtctgaaactgacctagatgaggccctgatttggagatgtttatgaatatggcatataaaggttaggtctcgttacagacatttatgcctgggtattttattgctggttttattgcataattctgtttttataaaaattgattttttcccttcaagccattacaatgtaagaattagatttttttaaaagaaacatttatttttttacttagttttctttcctagtaaaagaaaaaaatcctattcctctgatctatttccaatgtgagaagatgtgaaattatgcatagctgggaattatatgagaatcttgaattcatttctttaaatctaatcatcagatacatgccctaacttttaaaatctcacttttggttcatcttgaattccacataccgagactcttgaaagccactgatcggggatgactgatgcagactgggagccacgtgggccccgggtctggttcagcgcagcagcactctcttccattcaaagtctcagatgtctgcccctctgcaaagccgtgaggccaatgtctatagctgctaagcatgaaatcccctgcttctgtttgtttcttttgttgccacgagttaatagggacagagacaggagacagcccagaacaaagcagaaataatggagtatttcaccccaaaaaggaatgtggattgagaaatacaaagggtaaggcaaagacagatttagtgtcctgaggcagtgtgatgtattggccagaagcctcagccctgggacaattccagtccaaagccttcatctgtgtgctcccagcagcccacatggctgaaaggtttgacccaccttctataaaaacaatttgttgtttttttcccactagggtcttaaaggatgacaggatttccacctcaaaacataggttgctcttggaacgtggagaagtcttcagctgggctgtgtctggcagccaggggcctcttcacagcactcctttgccctgtttgttatttttcttgctatagatgccattttgaacttgtttgcaagaaccactagtcaccctaagacatcgaagcatatttgatttttgtttctcttcttacaactagaaagataggattagctaagagatcgcatgctcattatagaccttctccttcacatgcctttctgcacaacccagtttattcatatatttcctcctatactctcctccaacatattttatttagtatttgcttatttattttactttattgagatataatttacatacacatatattttaaggtataatttatatatacatataatttgaggctgtttcaaaagagatttttttccttactgctgtgcttagggttggaaatctctgcagctcacatgggcttctctttttttttttttttttttctcgagacagtctcgctgtgtcacccaggctggagagcagtggcgcgatctcagctcactgcaacctcagtcccccaggtttaagcgattctcctgcctcggcctcctgagtagctgggactacgggcacacaccactacacctggctaatttttgtatttttagtagagacggggtctcaccacgttggccaggctggtctcgaactcctgacctcaaatgatccccctacctcggcctcccaaagtgcagggattacaggtgtgagtcactgcacctggctggcttctcttaatacataagttttatcctttccagaggacaaaaaagggttaaatgaaagaagcaaacagtgtgaaagagagaagccagcagcactttggtatccccttttcttccatcccagtcaatctcctctcctcctcctcccctgctctctaattcagcagggcaagaatcttaaggatgctatttctcacccaacttctctaactccaagagagctgcaggtcccttttgcctggaatgagagatactttggccataaacctgctggtacaagtaaagaagcaatacaaagacttgtatcttcgccttcctttgcccggtgtttttctcttcagttacaaaggcaaacttacttaaagcactctttcacctcctcaaaagaacagaacaccccacttctgatgctctgatccctgacttgagggcatgaactagggctctggagtggaataaccctggctcgaaccccagctctgccacttaatagctctcgggtacattttcttatctctttgttgccctctatcaacacagaatggatctaaagtttcctttgaatgacacgccctcagaaattagaggcttatcattgcagaagtttggaaaacagctcaggagccagactgccagggtttgaatcctgttccacgtaggcaagttacttaacttctttgagcctcagtttcctcctctttaaattgaaatcatatggtacttttctagggaatagatgaattaatacccataagtcacttatatctgctgttcaatacagttttatttttaatttactaggacacccgcccctcccaatgtctcctacagagctcaagcagctctgacaaatcccgtaacacattttgtaatgtgttgtattttgtactgggtttacattttcaaaagacagagccataactgactgttacagacctggaaaatattttgttctaaatcaagtcattttacatatttaagcacttcttaatgttttactcattgagcaacgcttagtgttagaaaacacttctagaaattgacttctttttagaagcttctttttttcttcattatgagagttggagaagggtcagaatgaatagctgcctctttttggtttggaagccaactatgtaagaaatatatccacttaaagttatgggtgacttttctcttccctttaggtactaactcatggatgtttcgttaatctaaaaagtatttatcgagtgtggtccttggcctcacccttgggccacatagaaaaagacctggtgagctgtcataggagaccttgtgtttctgtctggcgagaccagtattgaaatgagaagggaacagtgtggggcttgggtagtctggctgtggagaagtcccaaagccgactgaagaaaagtttccagcaactatacagagcttcaatcaaattgaaatcatgctcagaataaaatcatgtattcatgatgaaaaacagagcatcaattgaaacaaatgccatgtcccaaagggctgggaatttagcgaaacaggatggtaggaaacactggcaatgcaggggccagtgccaaagtgggaggattttgagctagattctcgtctagtaacacatatttgtaggacaactttgctgttctgttttggtgcctggccaccccttggtagctgtaagattaagctttttgaacctataataggaccaagaatggatatgtctttgtgtctgtgtgcatatttctatcagccagtgaatcttagaaaagaatacatgtgtcatagtattaactgtagtgctagtctgtacaggaccaagaagtggaagaaaggattatttctctctgagggaattgaacacttctcagaggaggtgccctttaaacagaactttgagcaggagtttgccaagtaggaaagtggggaggaacttttattctgtgtgcacaggaacagggtggcatagaaacgttaagtgctcagaccatgtgaaggaatagtggtgatttggagggtggccggagtcattaaggtagaaatatagaggaaaatgaaatgtacaattaaatgcttgattagtgctttgcaatgttgacatgaggggttattcatcaagtactgattgtgtacagtgctctgctagacctacaaaatgtctggcactgttggggaaataaataccttatttctgttccaaacagaaatgggaacattttaagataatcttgctgccttggtgctaggtcatcagactgaaatgcaagtccttattttactctagtaattttatcttttgctttcttttctttccaatatttgtagtcaccttcctttttaagcacatatttctaaggggtttgcttctgctttcaagctaatccattatttcagctgttgattatatgattacatgatttgtccaaagtctacgatatagtcagttattactggtgattctggtctttgccctctctcaagacctaggcacaccatttcctcaaatacagcactagaagtttgtgggtacacagaatggggaaacatcctgtgtcctgacataatatagtagatacactgggttcttttaaaaaagaccaagtcataacttgtcccgtgtgaaaaggcctgtgagctgaagcagtctaggcagtggagaccatgaccttggttggccccccaagagggtatacttatattcagactggctctgttctctatttgctgctaccaggggagtggggacaggttgtgtgtgtttagtgtcttgggctgaactgggatagaatggagcatgtggaggctgctgtgggctgttggaagtactacagtctgggctgtatattgggtggccaggcccttgtctaaggaagctaactgtcacttaagataccttggaaaaatgaaaatcgcaatgagcagttatttacctgtatggcgcctttcttagtagcatgatgtattgcacccaggcctcataacatcctcctgaagaaaggaagcggcagagagtgttaaaatgttactggttaatcgtggggaaactgaagcatggataggtttatgaggcttgaacagagttacacaatgccttagtgtttggcctgggaatgaggcctgagtttgccgcttgctgtcaggactgccgacagcattgtgtttcgcattgtacaacagtgaaaggggcttactcttaacaatgcaagagctgctgtaggagacacacacaatgaactttggtacagtatagtctagaggccaaaatgagtaattttaagtaaattgactataggatccaaagcttcattaagttttaaaacaaaaaacaaatgaaaactctttacagtttttaggaactgactcagaaaacatgaccattccttccccattggaagtagcatactgttgaaagttttatcttgttgactcaaaatctgacactattcctgttacccataggatgatttattcagtcagttcaaatacatgttgatttctaagagtctgtgatttatgtcaaagattttgccttgtaataactatcaatctagccattaagttccaaagaaccttatttccacagcctgtggttttgtggggaggcttttgttttattcagttttggtttgggttcttatagaacagctggaactatagagcctggacttagagaaagagcttggggagacggagggggagatgtcatgttggatgtccttatgacattcggttatatgattgaaaccatgggactggagatgatatcactggtgagaatataaaaagggaagagagaccaggctcagtggctcacgtgtgtaatctcagcactttgggcagccggggtgagtggatcacctgagctcaggagatggagaccagcctgagcaacatggtgaaaccccatctctacaaagatacaaaaattagctgggtgtggtggtgcacacttgtaatcccagctactcgggaggctgaggtgggaggattgcttgagcctgggatttggaggttgcagtgagtggagattgcaccactgcactccagcctgagtgacagagacagactgtcttaaaaaaaaaaaaaagagagaaaaagaaagagaagagaaggctgggcatggtggctcacacctgtaatcccagcactttgggaggctgaggtgagtggatcacctgaagtcgagagttcaagaccagcctggccaacatggtgaaaccccgtctctactaaaaatacaaaaattagctgggtgtggtggcgcatacctgtaatcccagctactcaggaagccgaggcacgagaatcacttgaacccgggaggtggaggttgctgtgagccgagattgtgccattgcactccagcccgggcaacaagagtgaaactctgtctgaaaaaaaaaaaagaaagaaagaaagaagagaaaagacagtggagtagaatatcactgctatcattgcaaaatcatcttttatgtcagaagtggcttaggtgacctagaataaacaggtaaaatagatattaatggagttggctacaaagtttttctactctggattttaaaaagaacatgaagatgaaattctggagtgtttggcaaaaatatgagtgataacgacatgaataatttaaaccggatgctctagcaatcattcacatacagtttcatttgatatttaaggtttatgatagtttgggccagggtagtcaggccagccctcctccaggagatagtccagaggaattctggcaaggagctgagtgagaatgaaggcctctagggcaggaatgggatctctcctccttgaaccccaaacaagaccaacgcagcccagtaaaagaaactgtgtgactagttttgttgtctgtcctaattgaatgtggaagaccacttctaagtctgaacagctgctagccatggccatctttgagggaacagacacatacacaaataaacctatctctgagaaaaactctcattctgagtctgggagacagactttataaaaaagcttgttaaagtcagacagtatcagccagccttcatatgaatccatgaagtgatgtgttggcgtttagaatgctgttagtagttatggtcattaatcttgtgggagagggtgtgctggaactaaaggaagatcagagaagaacatctcataggatgaagacagactgaaataagtaggactcctcaggcttgaaaagactgagaggaaatacaattagcatgaataaacccatgaagaatatgggtcatagaattgtttaccagaagcaggcagaacctcttgagaacagaggaaaagtgaatttaggacaaaaagaagctctaatttaccaagaaagttgatcctgtacaccaaaaccactcttttgggaactaggctaactaatggcattgaagcgaagtgaaaaagtcagcggtttcttattttgacagtattttcttgaagcgtggagggctcagagaacatagatcaagcatcctgttagtctctatgttttcttttttctttgcttaggtaaaatttaagtgtcgttcattcttcattcaacaattatctgctgagggtagattctatgccatgttctctgctagacactgggagtactgagatgaagggggacagacatggttctcacaggctggtgatgaataagaaactgcaattgtctgtgtaatgaatttataaaagcccagtagagctggacgtgaattgctaacacaatcttaggattggagcagactgccctgaggatgggatgattaagttgagacctaaaaatgatgaggtgttggctaagtccagaattgggggaagaaggaacagcatattagatgcctcagttgaggtaagagagggcatggctggaggatgtaggggagtgagggcaatgaggctggtgagcttggctggagcagatcatggagtgtggggtagaccatggtaagggtttgggctcgagagctgggcaaagtcactggggtggcttaagcacgtatggtcagattttctctttataagcaatccagtcactgcaatgtggagaatagggggcacaagagcaaatatactggaactagtgggaggatattgatgttgttcaggtgatgatggcctgggctggacagaagtggacagatcctagagctacttcagaggtcatatgaactagatttgttgattagatgtgagaaatgagggagagaaataatcaagtttgatttacgagagtatgacagccaattagtactcagattttatctgagtgagatgaatcaacacaggcttttttataggtctcttctctcgtaatctccagatgacccaaaagtgagtggatctgccttctttcctccctgtctccccctttccctctttctctcatgaatcattcagggtctaaatgtttcaggctctataagctggcacatagttggcccctatggatatgggataagtagaaagatcaaaagctgcacaaatgataccctgtctcccaaatcctcttgtttttctttctttctttcttttcttttcttttttttttttttctgagatggagtctcgctctttttgcccaggctggagtgcaatagtgtgaccttggctcactgcaacctctgccacccagattcaagtgattctcctgcctcagtcccctgagtagctggaattacaggtgcctgccaccatgcctggctaatttctttttgtatttttagtacagactgggtttcaccacattggccagactggtcccaaagtgctgggattacaggcctgagccactgtgcctggcccagatccccttgtctttaactcttgcagagcaaactatactacagttcatagtaccctggttgattgacctgaaaaagaatttagcaaaggccagaaaggcagtggtatgtatagagactctatttaatgattttaaaaatttttgtattttgaaataatatcagtggtaagaccagaacaaggagttttcctctattctctttactcagcatcactagtcattaacattttgccatgttggctttgtcactctcctcaccagataaagatggagctggagatttagatttttctgagccagttaattgtggacatcaagacccttcacctctaaatacttagaggtattataaataattagaatattttctcagaacaatgatttttcttacataaccacagtacattgattaaattcaggaaatttaaccttatacagtactcttatctaatatgcagtctatattcagtgttcacttattgtctcaataatgtcatttatggctttttttttccccttttgatctaggatccagtccaagatatattgcattttattattatgtctttttagtcttctttaacatggaacagttcctcagtctttctttgacttttaagacattgatattttggaggagaacaggccagttgccttatggaatactccttagattggctttatctggtttcctcatgcttagattcagattgtgtggttttggcaggcaagctgtgggatgatgtcatgctttttgcagtgcacctgccatagcaggaagggaggcatgaagtagaaaaacatttcataactaagaatgttaactttgatcacttggctagagtggtgtctccaggtttcactgttctaaagttaccgttttcttccttataggtaatactttattcaattacctcttaatacttactcagtcattttaaatgtgactatggtttatttccatactgtcatttaaaggaacatttttttccccttcttttggcagtgttttagagcactttgctgcaagggaccaccacctgcacgaccagaatatgacctggtttgcataggcctcacaggttctggcaaaaccagtctgttgtccaaactctgcagtgaaagccccgataacgtcgtgtcgaccacaggtgggtactgtgctggggttctgtcccttcttctttctcatcccaagatgtcctagtttcctgtgcaatttatcccctcccttctacttatagtttaatgctttaatcagtttattttaattttaaacactatctctttttcaaaaaagatttgaaatgaatttaatagcattaaattgctgtatcctatatccctctagcaggtcatttcagtggcactgaataaatgaagcttgggaaaatattaatacaaatgaatcctgaaatctggaactctgatatatgacaaaatggattcatcttgggcccatagagtactttccttccttgaagtgtcactccagcctatgtttcttggccacacactccctgaatagtaaactgatgtagtctgaatcttctttccttgtcatttttcacctggaggaaagtcagtgcaagagatcatgcatcagccttcccctattgcttcctgatggagccaagcaaagtcagtctagggcagtggttctcaatcaggggagattatgcctctgagtgggacattttggagtcatttgtggggaggggtattactggcttctggtggatagaggccagtggtgctactaaacatccttcaatgtacagggcagcccccacagcaaagagttatcaggcccaaaatgttttcagtgtcaagttattagtgagaaatcctggctagggtttttcttcacttcccaaatgtgtcctctttctcttctgacaatgaagaaggaaagaagagtataagaggaaataatggaagaacagctgtaagagatagagaacagagctgctgtgcagagagagctgagaaggaaggagaagggtgagatgttttctggaaagttgaaaagattgttcatcagccagcttattttgagcacctactatgtgctaggtccagtgttagacatgagataagcgatgatttcagcattccaggagtctcagtatactggctgcataaacattaagttcatatccagaaatagatggggcatggaaggaaggggcatgacagtgttgcctggacctggggaagggaaggatgcatgatttggtttgctacattagatttgaggttgataagtaggtctggtacaagaaataaggtgagggggtggaaaagaaagaggacttaggagcagaggggcagtgtgaaggtaaggagtgtcaaacagattggcaactcctagaaactgcatttgtgtgtggctgcagtgtatgtttaatagagtgccaggagacaaattgtattcagtggtggctgaatcttagcagacctttcatactgtgctcaggagtttgggcttttcgtgtagatagtgcagagacatcagagtattttaagcaaggaaactacatgatcagatgtccatttgagaagaatcaagctggccatgatgtggaggctaaattgtgagtagcgcagttggaggcggaggcagaagattactgtgatggtgcaactgagatgatgaaggccttggctgaggcagttacagggggaagaagaggaaggaataggtaggatatatatttgagagctagaattgacaaagcctagtgtagttgggtttggagggtgagagtgagaaagccatggctgtctcaattcctggcttacgtgatggttggatgatggaattattaactaggatttcctacaaaaagtagaaaggatattgttgatcaagaaccttacttcagttcacgtcagcttttgccggcaagtaagttttaaaaaagtgcaggttttgagagcttttcagattttagaattgagataagaaactgtggagctgttaaagggttagagacattgcttgattttaggatgagggaaaggataaggggattgtaatgagtagagaccccagagaagattagcagagctcatgtgtagcctctttgcaggaagctgtttctgactaccttcttttctccttggacagaactgagtactccctcctctccccactgggcgttgtccgtatttctcccagttagtgcctgtagcactgctttatgtatgtgcccatctccccatcttgggttagaatctcttaagggcagctagagcatcatatgtggtattgtatacccagagtctgtcacaaggtttaggcatggatacagatgtctgttaataagcaaatgaaagtaaattgaatctatatagtcttctgttagccttataacagcccttatatgacaggtaggaatctttttccatattctgtttctaaattacctgaagatcaaaggtatggtgacatggctattgttacatagctagagataggatgccagttcaggtgttcaagtgaagtttagtggtatccaaggtttaggatttctggtggaagtaggtactttattggttgtttataaaactgtgaatatcttttgagtaatgtgcaatgaagttatataaactttattagcttaagtcttttcaatcaaaatagcttctaaaatatgtgtaagagtaacacaaagtatgcttttcttcacttatcagagttatcttctagcactattgctagaggagcagttttgaattatagtgtaaaagattatctgtatataattttcttacttgtaagttatgttttgtgtttgtttttatgaaattttttaataatacgttttaccagaattgtgcactagtctattttctgatgaattagttgttaggttggctaattttttggatatcaagcttctttgagttgtcattgttctgaacctggcataatgtctttttggaggcctctttggaggaagctgccatcaagaagtttacacccaggttaggaagataagttgtgtattgataaaaacagttcacatatattgcttatttaatatactccaggctctgtgctaagacagaatgtgatatgtgttatattaatggtgtaaatatgaaagttaaaagaggagagtgatcatttctaatctggagggtcaaagaaagctcatagttaaggttacatttgagtagggtctcatatgatgggtaaggtctaagcagagaggaatggggtgaggagagttagggatagaaagcataggtatattcagagaaagattagtggtcttactgggttaaggcacagcatgcagagatttaggggatgttgggatctaaggctagagacttagagaagctgttgggggagacctgttagatgtagaggtgatccagcagggacaatacttgtggggatgttactgctactgtaaaagtgacagttatgctgggtattcaagaggaaaggaagataaaacaatcaaatatgagtcaagtttatagctttatgttttggtgaattgttaaaaaaaaaaaaagtagggagaatgtgacagagttttaagataaaaataatgagtttagtttggggcatgctgattttgaggtttgacaagacatccaacagtgatccaaatgctaaaagccaagcagactagagagatttgagagacaactcagtcatagatttggatgagcttgtccaggggtaatgggtagaaagcgggaagaaaggtgctaagcaccaattatattttgttaattcattccacattcattgaatgtctgttatgtgactgccactgatttaaggactgaggatatatcagttaacaaaatatacaaacaaccctgctctttggagcttacattacagcatctgcttttgataaggaatataggtcagacagttctatataatatcctttaagtcaaatatgggcaagaaatcaaaagaaccagtcaaataaggtaaacgtaagtctaaagtctgagaaaggccattggatgtggtgacaacgtggtaattaataactaatggtagaaacagtttcagtagagtattgaggtggaaaccaacctgagaattgaggggatgaagagcaagcaaaggaattgaggggtagaccatcgttttcactccttaactctttggaatatagacagttctttcaagaaggtggacagaaaaagagaaaatagtgctaagagaatttgtttctataagaaaaggtctcttgagcatgctagtagtcagaggtttagggtggtcatcaggggaaaaggcaagactgaatatgctcaagagagggcagtgagcacaaggatgagtgaggacttcttgttctggtaagatggaataactggaactagtttactctcccatctaaaagaagaagaacaacaacagcaaccagctcatgaaatatacaaagcaacaattttcaagccaggaaacgcagttatccctgagaaatgagaaacaaatgagatgtgctctgtgattgtcccagcttaatgccttgagagtttccaggctgtggcacagttccagagggagctgaggtggagctcagtgaactccctgcattgaggagatgaagccgagagcaaggggagaccaagatggctaatgttcatagaatagaataccagagaaaagagttgtacagagagagaacactaaagattttcagagtctcccttgagtatccagcaaaatattcaatgcatgcatgtgaggaaacttcccaaggccagggcaagaaccatcttaaaggactagagggaacagtggttggtgttcatacagggttgaaaactatgcctgtaatcaccagatggactgaaaaacttataactcacaaggaactgggtagagtacttggcaaggtcagccgtaagtggagtaccactctggactcacatgacagataatattagcaagtcccaaaacctcagatggttgtctggtaatgtaatgcatctcagcacaaagctgtataggatttaaagaaaaaatattcatcactcaacaaggtaaaattcacaatgtctgccagtcagtcaaagattatcagggatgggaagaggccagaaatcatgattcataatgagaataatcatcgaattggaactgacccagaactgatgtaaatattagaagtagcaaagggggacattaaaactgttattatcactgtattgtatctgttcatagagacaatctgagagagaaaaaaatgcaaagagcatccagcgagctatgggacaactttaaacctaagctagggtaatttgagtccatgaaggtgagtggaaagggacagaaaaatatttgaagaaataatggctgaaacattgttgaacatgaagaaaactctacacctacagatccaagaagctcactgaaccccaaacaaaaggaacatgagcaaggctgggcacagtggctcacacttgtaatcccaatactttgagaagctgaggcggaagtatcacttgaggccaggaatttgacaccagcttgggcaacatagtaagacccccatctctacaaataaataaataaataaattagctgcatgtgttggtgcttgcctgtagtcccagctacttgtgaggcagaagtaggaggattgcttgatcccaggagtttgaggctgcaatgagctgtgatcacactgctttactccaacctgggtgacagagagagagaccccatctcttgtgggggaaaaaaagagagagagagaaagaaacgtgaatataactataccaaggcacatcataataaaattgttcaaaaccggtgataaagaatatgatgtttaattttgtgtgtaactggctgggtcccagtgcccaaatatgtagtcagacattagtctggatatttctataagggtagtttgggatgaacttaatacttaaatctgcggattttgacagattgtcctccataatgtggtttggcctcatccagccagttgaaggcctgaatagaataaaagacttgcctccctggaacaagagggaattcttcagtaaatggcctttggacttgaactgcgtattgattctttcctgggtctccagcctgccagcccaaactgtagattttgggtttatagcaactgtaattgtgtgagccaatttcttaaagtatttctctgtctctatttatatatatatatataaacaaaggtatatatttatatccatacatgcacctatacatacatataaatatgcatataaacacacatccttttggttttttttttctcttgagaacaaagtagtacaaagaaaataccttaaaagcagataaaagatgttacatgagtaagaataaaaataaggatggcatcacattttttcactggaaaaatgcaagtaagaagacattggagcagcatctgaaagggaaaaaactgtcaactaatatccagcaaaagtctcttttaaaaagaaagtaaaaataaagactagactttttcagacatacaaaatctgaaggaatttattgctagcagataagcattataagaaatgttaaaagaagtccttgagtcagaaaaaaaatgataccagatggaaatctggatctatataaaatggagactgccagaaatgcaaattatgtggataattatataatatttacttcttattatttaaatatctttaagaggtatgtctttaaacaacaataataagcacatattatggggttaacaacatatgtaaaagtaaaatgcctgagaacaatagcacaaaggtcatggggaaaaagggaagtacactattggaagattcttgtactatatgtgaagtcgtataataacacttgaaggtagactgattaaagatttactgtaaaccctaaagtaaccaataaaataacaaaacaaaggatgagagcccataaagcaacaaatgagatgaaaatagaattatcaaaaataatccaaaagaaggcagaaaaagaagaaaaggggaacaagaatagatgaaacaaataggaaacaagtagaaaggtgatacagtcaaacctaaacatcaataataatattaaatataaatgatctagactccttaattaagagacagaggttgatataatagatttttttaaaaaccaagacccaaccaaatactgactttaagaatcaaactttaagtataaagacacaaatagattaaatatacaaaggtggaaaaagatacatcatgctaacactagtcaaaagaaagttggggtagctatgttaatattagacaatgtagatttcagagcaatgaataaggctggggataaagaagttcataatgatgaagggatcatttattcaggagactgtaataattctacacatttatgtacctaacagaacttaaaaatatatgaaacaaaaaaatgacagaactgcaaaaagaaatgtacaaacccacaattacaatcagcgacgtcagtttctctcaatactttatagatcatgtgggaagaaaatcagccagtacgtagcagacttcaacaacactaacagctaacttgacctgattaacattttataaaatactccacccaacaacagaagacattcttttcaagtacacatagaatatttgccaaattaggccataacctggtttatgaaagcaaatctaaataagtttaagtggcttcaagttatatccaatatgttcttagaccgtgatagaattgcattaaaaatcaataacaagaagaaaaaaaaaatctcaagtatttacaaactcacttacttctaaatgacccacgaatcaaagaaggtagcaaaagagaaattataaaggattttgcactgaatgacaatgcaacatattagaatttgtggtgcctataaaacgggactttaagaaaagtttataccactaaatgtctattcagaaaagaagggcctcaaatcaatgacctcagcttccaccttagggaactggaagaaaaatggattaaacccaaataagcagaagaaaataaagatcaaagtagaaatcaatgaaatagaagagccatagagaaaattagtaaaaccaaaagctagttctttgagaaagtcagtaaaactggtaaaactctagccaaactgatcagaaaaaataaaaaagacacaaataaccaatatcaggaataagaaaggtgacatcaatatagattctataaatagtaagaggttaataagggaatatcatgaacaaccttatgccagtaaatctgacaacttagagaaaatggacaatttccttgaaggacaaaccatcaaatctcactcaagaagaaatagaaaacctggatagacctatatctgtttaagaaattgataccttttctttctttttttaagtctagttggtttcactagtgaatcctaccaaacattttaaggaagaaatactgccaattctttagtctcttccagaaaattgaagaggagggaaaaatgccccaactcctaagaccagcatgaagctgataccaaaaccacacagagacattacaaaaaaaaaaaaaaaaaaaaaaaaaaaaaaaaaaaaaagcttcataccaatagccctcatggacacagatacaaaaattataagcaaaaatataccaaattaaattcaacaataatattttaataggataatatgtcatgaacatgtgacatttattctaggaatgcagagttggttgcacattcaaaaatcaatcagtttattcacaatatcaataaaccaaaagatgaaactatgatcctgtgaagatatgcaaaaaacaaaaacaaaaaaaactcagcatcaatttttgacaaaagctattaacaaagtaggactagaaaggaattacctcaactgttaaagggcatctgtgaaaaccctacagctgttgtcagagttaatggagaaagactgaattgtttcctgatcagatcaggaataagacatggatgtctgttctcaccacatctattcaacattgtggtagagattctagccagtaaatcaggcaagaaaaataaataaaatgctttcattttgtgaaagaataaataaaaacgtacttgctgatggcatgattgttaaagtagaaaatttaattgaatcgacaactctttgctataaactggagatggttgatatgaattagagctgatagttttagagatctgaaaaactatcagaaacttagaggatagctctggctattagttttaagaatgttgcccataagaatagaagcagatagggtgtggtggacaactgttagccaaatattgagttcattcagatagatgaacaaaatccctgaaaattggtaggtgggaatgcagaggtccatatataagtaaacgtcataactcaggtaggatgttattaacaagtggctatgatgaagtgttctaaaagcgtagaaggaagcaaagtttgtgctgagaggcgctgataagagaaggaaaagctctgtttgctagtgtatggaggaagaaaaaatgtgcagggaaatgctggagcatggagaagacttcttaagaaagataaggttcaatatgattcactgagaaggctctgtaatgataaaggtgaggctgagttggccatgggaggcaggaagtaatgatgtaggagaaaaggggtagatgcttggtgtttggacctgtgtgttcattatagtgaaaggagggcaagatgttgtagaaacaagttactgatggtagagaagggttggcgaataggcagcagaggaggtcccacaggctgactttagttatcggggatccacaactgttcagtgctggagtttgaggtaggcattgctgacatcttcaaacttactgcccaggtccagaattcttttggttgttcatagcaggtgtgtatctctctctgtgtgtgtgtgtgtgtgtgtgtgtgtatgtgtgtgtgtaagtaaagaagaacaaagggggtggaaggagggtactgaaataaacagcaaactccaatagtaataaaggtaacttggaaaagaattgaggaagtcagaaatccacatgtgtatgtagacttcagtgtggaagatggcagaatagctggactaggcctccagtgaatcattcacaagggaaggatcaaggaacttaactatataaaaatttaaaaccattggaaatctaaaattaagataaatataaaaaaatactgttggaagtatttgcatcagatattacagataagcatatggctgtccctcttagagaattcaaccacacttacaaataacatctagaatctaacagataaactgtgccaagtctataaagagataattcataaaaagaataaatggcaaacaaattaatggaaaagtttcaactttaccagaagtttaactttactagagaatagataagtaaacgttagttttatacttaaatttaccaaaatctgtttctttatgagacgagtcagtgctggtaagattgtagtggcattggtatgcacatgtattacaggtgacattatgattgttacattatgactgttatgatatcccttttttttggaaagcatttttcttagaaagcagttgttcatataaatcaaaagttatgaaaatgttcacagacctagtaattatgccactggcaatttattttaagtaagtaacttaagggaaactatatgcataaagcaatttcttgcaacattttgtattgcaactaaaactttaaggtagtttaaatgccatacaacaagggagtttgttaattacattatggtaacttgatcaaaatgattatagattagaagaatatatacagtcttctatttaaaaattaaaaattagatttacatttattttttgaatttaaaccatggaaaactatgcatttgaattaaaaaactagagaaaaactataagaataacagtgtactttattgatgtgattgaattatgggtaaaacctttattcttttaaattatttctctataatgtcttgaaaatataaagccaattaaaaatgcaatatttattgaagagttttgaacattcgaaaagagaatctaccttcagagttggtttcttaaaatgaaaacatatgagaaggatgtgttcgtttaatttcagcaaggcgagaatgtctgccttttcttcagaaagagaattcaaactttattggtttattaacttcagcaatttttcacctctgacataatttttaaaagatacttaaattgtcaaaactcaaagagccaagaaatcctccagagagcaggacctgttggtgaggagagaaaatttgagtaatttgcaccttagtctagaaataaaagtgaactctatccagactgaattcctttactgtatatgtatgaggaatttgttgataagaggggttgttaaactgtagattacataaatgttcacttttttttttgaagcagaggaatggaatctaaaggcttaggagaatatattgatggtacatggagaataacctagagaaaactgaacactttgaattgaaaaaggttgaaaacatcttctagggatatataccatatttgaaaaagattgaaaatgttcatgaaaatttgaagaagacatttaaataacttcagtattagcttcaaatgtgttaagccaacaagagaaacaagttagaaagtcagattttgatatcttttaaaggattgtgttttataaatgccagtacattaaatttccttttatgatgttgaaatcatagttagaagaatttcgttagtctgttgtccaaacatcacaaaactgctgtggcataaatcatgcccttggtgcaggtcaaagccaccagatctgtagaatgtctttcccttcagcaattcttagagtgacccaggaatttcagaagcacacaagtatctgtgtgcgtgcactcagacttgagggaaggggaggagggtttagtctgtaggtccaagtgaaatacttgtgtgttccacacaatgaataaaaatagactaaccttcctcccaaaactaattttgttacaattccaggaatgctttcagtgcatgaaaaacttcaaattcatctttcttgtctcacaggttttgttggatttaaggactgcaaaacaaagactgaaaggctatgcaaacaattatttccccaaagagttactaagtcatatatttattaaaaatttgtggggttaaatcttaggggaggtttcagtcttactaatgtagcttagataggccaggaaaaaatgactgcgtaacttaggcttcagccatcaaattgtttgaatggagcctggggagacttaaccgtgaagccttcagccaaatactacaggccattgatgattgactcagtggttacttttatttccttctccttgtttaatataaataatggaatgctaattttagaggacatctcaaagagctaatttagtcctcattttgcacatgaggaattcaaggccaaggcaagacaaaaatgtggctggtgagtctaagagctgtgcttcggactcctaggatagtcccttgtcacgttagcacactgacaccctgaagatggcatcagaggacacttcctgtttgaagaagcaagagagtagttacactgtcatggatgagtcagttgaacactttttccctcccctcctaagttcctgattttattaattatttctacaaaatgtaccttctaaactcatgctattatttttatttcattaataagaaagcaatggcatatagacctgaaaacccttatttgggtttcttgtgttgggttatttataaacaggaggacaatgaattagtgggtttattaggtgttgggttatttataaacagggaggacagtaaattagtgcatttattaggcacgtgtgtattttggtcagttgactttaccagtatttaggctcaaaattggacaaaatgctgtgaatccctcagtttgttggtatatggaggagacactacagtgtagtgtagggctctggtgatgagacctggttttaagtttcgaatatagcacttagtactttttttgagacagagtcttgctctgtcacctaagctaaagtgcagtggcctgatctcggctcactgtaacctctgcctcccgggttcaagcgattctcctgcctcagcctcccaagtagctgggattacaggcatctgccaccacgcccagctaatttttgtatttttagtagagacggggtttcaccatcttggccaggctggtctcaaactcctgacctcgtgatccacccgcctcggcctcccaaagtgctgggattacaggcgtgagccaccgtgcctggcacttcactttcttcttgggacagtagtactgataccaactttaggattgttatagcagctaaattaggaaatagatattaatacttagcatattgagatcctattgtatgccaagcactgacctacagaatacagtgtagcttgtttcttcattatggatccttgcagtctagccagagaacaaatataaaacaaatcaaccgatatgtagttacaattgtgaaaatcacctaggaggggtactgaatactggaaaaacatggactcagaaaaatcagtctagttcgaggacaccagagaatgcttccctaacaaagttagcttgctcaaagtcaaacagttaataaatggaataggaagagtttgaacctagactttctttctctagagcaaatgctgtctggtagcttttattcctcaaagcaaccctttgagaaaggtattttgatggtttgacctttggtatccctcctaaatattatattaattctcccccttggcctcatccaacctgatgtaaagggaaaaaaaagtctaataatttcccttcttggttgtccttctggtgaactgaaagtatgactttagatttttagttccatttaatcctttcaaatgtttagaatgactaaaatagaaaaaacattgtttctcttctgtaaatagtacattttcttattttctggactaatcagtctatctagactttgtcttttgaacattaattactgaagctaaaccgtaaaaataatatggagacagcaacatggatgactgtgtatacctttgcagtataaatctaaccacacaagttctatttggagaaaacatttacgactattttgtcgggacatttatatgcctataaataatattgttagggggctgggtgcggaggctcgtgcctgtaatcccagcactttgggaggccgaggcgggtagatcacgaggtcaggagatcgagaccatgctggctaacatggtgaaaccccatctctactaaaaatacaaaacattagctgggcgtggtggtgggtgcctgtagtcccggctactcaggaggctgaggcaggagaatggcgtgaacccgggagatggaggttgcagtgagccgagaccacgccactgtaccccagcctgggtgacagagcgagactccatctcaaaaaaaataaaataataaaataacattgctaggatactttgcttagtgtgaacttttgaagacgttttagtagtcaacttatgaagactttgcaagaatttaaagacaataacagtgacataatctgcctgttgggttaataaatttcaaaagttgtattttgcacataggtgcagcaatttctggaaggatattacttccctttgagagcctgcgtattgtcagcttttaagaatcaaagcagattaaacattggtgatgtgctccataaccatttccttttcaaagttgaggcctgtgcctgtcttacttctctagaaaatctacacttgagttgtcctgagcataaccactaatagactgcttaatatttgcagagagcttttcattttcaggatttcaccatcattgctttttaatccatataacacccgtgtgaggtaggtagatacattcaggcatccaagtctcctgcaggtgaatttctgtgccagcaggaatattatgattggcactgactttccttaatttcccagaggccagacacctggagaggctttcctgcaggctcaggtacatgccagtgtttcagccacatgggactgcctcctctttcctcctgctcatttactaggattcagtgacttcatgcaccattaaccataatgctgtgctgactgtgtcaatctgcattaagcccacaaaggaaggggtatgttttagaagattgttagagggcccaatgaacattttccatcctttctgtgcagcagacttcagctgttgacatcttcgtcactccaacaaaagtacttttcattcaatggtaacttttacatctccaactacatacttagattaataagtgagcacccagaatcaagtttgtaattatattcaggcaggcagaaaatatgtatacctaatgattgaatcatcaacgaaaaagcatcaatggaaacataatgccagcaatcgtatattatatgcttatggtgtaccaggcactgtgataaacataacacatacattatcttatccttataacaaccctatgaagtagatattatcatccctgttttacagatgagaaagtcgagcaaggctagtaggttgcccacattcacagagctaataagggacagagctagaatttcaacctagttctgtctgactccaaagtcagttcttcaaacattatatactatgtactgctttaggtggaaggtaatgtacagcttattaaagtactgggataacatgcagcaaagaagtgcaaaagataggctagactaagaaggtgtgtaatgatttccttctttataaagcaaaacaaacccatttgaaagaattgtttttatccatgtaatactttatatattttttcataacttacctcaaagactcataatttgtcttctttgttgataaattcttgaaaaagaaacttttttaatcttaaaattatacatattaaataatgcttaaaaaccttaagtagaatggttgctcagaaactattgatacattaactcctagaaattcatagggcttttaattcaaaaaagaaatataagtacatggcaaaacattcaaatgaaacaaaagaatcttcctcctatttaaaatttccagattcccagttttcctgagagtcattagctctggtttcttgtggatcctttcagaaagaatctgtgtgtatatttgcatgtgtgtgtgtgcgtgtgtgtgtgtgtgtgtgtgtgaatgggtatatacacacttgcatatgtcacagttgaatttattgtcttgaatggtaatagttaagtcataaatatatagttaatcatagaactgtatactctgaatattttcttataatataaaacttgtattacatgtattataaaatgattgcctatgcataagtggataattatgattgtacttttaagaaaaatagatacatgacatattaaccatgtcctttaaagaagacactaacataaatactatgtaattctaatatgaaatggttataatttaagtaccttaatttctagggttgctgagttatatgtgagaaagaattataagacattaactttaagaattaaagttagatgcagaggtcctcatagatttaatattttctttgaaatttctctatactttcaaatgtctttcttatatctgataaaagttgcagagtgacattacatattaaattaaagaataaggcaatattttgaagtaaaggggatagtgttatatattgccgtaatacacaactatgttttttgcttgtttgtttgtttgtttttgaaatggagtctcggcgtgtcaccaggctggagtgcagtggcccgatctcagcttactgcaacctctgcctcccaggttcaagtgattctcctgcctcagcctcccgagtagctgggattacaggcgtgtgccaccacacccagctaatttttgtatttttagtagaaacggggtttcaccatgttgcccaggatggtcttgatctcttgacctcgtgatctgcccgccttggcttcccaaagtgttgggattacaggtgtgagccactgtgcccagccacaacaactatgttttgataatggcagaagataatattcagttatcagtttaccttggaaattatgtgtttctagtataaatatcagctacaaaaagtaaataaatcttaaccagcctaaaaagagacaatttgagcatcctaagtgttttaatttaaaagttgctaattctttttttatgtttttgttttctaattttaggttttagtattaaagcagtgccattccagaatgccatcttgaatgtaaaagaacttggaggtataacatttcaaatcatttctatgtctgcccttaacttttatgaatttggtaataatgtattatatgtaattcaaacataatgataacttattttagtaggtggttcatttttatcttgataatatatttcctagaaatatttccttctcttcgtatgttttaaaaattgttgaagagttctaagtaacataaactttgggggttttttgaatgaatcaaagaattacactattattggcaatttatacagctcattggttttacttgttcaaaaaattcttgaataaaacatatgaagagaattttaatatcattgaaagatcaactattcggggaaaagatttgtattttagagtagtttgtgtttatactgcaggttttattgtattagatctttttagaatgtatttgttccgataataaatctttgccaatgggttctttgctggccaagcacatttatcggataggctgtaccccaaaccatacatcactcagtctttcattacactctctgtctggcattttttggttgtgttttatgttagtcagggtcttaacccatgtaaatagattaacaaagaaatcagtcaattcagtgaacccactaaattctctaatggcgcatgaaaatactaagtgctctggagttcagtatgatatcggtgagtttaatgacttaggagagagttatcttccatctctttaatcactttgtgatattggccttaccttgttttgttttgttttgtttattttcccttaaggtcattctaactgtgacctatttttagctcgatgagattgtaacaccaactttacgccattttaatagcgtttggtaccttcttatttttatctaataaaaaactggctgatcttttcaggtgtctgttttcagttcgctatgtgtaggacaggttcgcttctgccagtcaatttcatattcacttttagctttatagcattaatatataaaacaaccatgatcaataaattccgatttttctttaagacatttggttttgtcattttgactccaaaaattataaaacatgaatgttcttataataatttttctatgcaaagtttttaaaagactgtgttctattagggtattttaaattataattgtacttttaagaaaaataaatgtatggcatattaaccatgccatatgcttaaaaccttaaatacaatggttgctcagaaactattgataaattaacgtctagaaattagtttaatttaatttaattcaaaaaagaaatacaagcagctggcagaacattcaaatgaaacaaaataatctttctcctatttaaaatttccagatgcatggtttataaaaaaatgcttttttgctttgtggcttctgctgattattccttggtgacaataatattacttatggatatttaaaaatcaaagaacacattgtaaatgcatggtttgagagttatatgggttttaaatatggctgttactaagtattttatttttaggttggacacaaagcttttattgaacaccttccaggtataagaaactattggttggttaataagacatttattacatatgatgtttacttggatgaaacaaacagtaactgtatgtggacagttttaaaaaaagtgaacaccaaggaattcgtaaggttggctctgtgccatcaaaattcagtacaatgaaagatcaagttaggggactagaggtacataaggtgggaataggtctgttctcaagcacggtttaattttgccgaaagagctgttccctgacagttgctgaaatggaaattacaatggagaggataccataggatttggtggttatgttttagttggtacctatttcgtaatgaggttaagagatgcaggtaaaaggcagagcctcagggatcagagcagatacattcgttccaggctagtgatacataagtttttggcatgtgttagtattgaagagcaaatttctagcctatgcatagattcttttactttctcaactttaatagctctgtttccagttgacacagtgtctgaaggaagaggggactttctgagtagaatccaattgtgtatcctgtgtcacatgctcgggggcaagcacttaagggagttgacttcttgacagctcattcactaagtcatttcctcaaatattttttgaggctaggtactaggttatgtctcaaccaggaacacatgaaaagctaggctaacctgtataaagtgtagctttcctaggagttaacgtgtatgctagatatgaaggggatcatcccaaaataaggtgtatgtgcacttagggggaattatgactggctgaaatcaagttgtctgagagggagttgcttgactgagaatttctgggaggagagagttatatgttttatgatcaatgtgtgaagatatgaagcttttattcaccagtggagggttgctcagaagacaggttaatcagagttcaatcacattgtcaatcagagaaaaattctgaattcaggggaggacctcaagaaaataggtggtaaatatagagattaagagccaggacagtgatgaattcttagtgaggaatgcccaggtagttctccttatcctggggttaattcaggagaacagcatggcccctgttctccctgctaatgtccttcctctacccatttcagatagttccaaggctcttcttcactctttcccagtcttaagttaaaattctcacttcttcaaaatagggaagcgcataaacctgtgctcattatctatttagaagaaatgatatggggtgaggaaacaatgaataatggagttacactcagtgaaagtcacttttggggatcttaatgacaaactatatgtttgcacacacaaacatatgtttgtgtgtgaatatatatgtgttgaatatatattacttataaaaattattatttcctcttaccaattttctgttttgtgaaagtgtttttatatctttttcctgaaaaattcttaaaattctcattcacatcaatttcttttcatgtggtgttttcttactgttcacttgatcattttaccacaattaattatgggtctagcatggtcctatgggcagagaatgaaagatctaagcacagccctcatcttcagggaactcctcattcagtgatggagacattcatgaaaagagaaataggaaattagtgaaaattttgaaaataatgaaatgaaagggaaaaaaattaagtgcagaagtacaaggtaaattatgacacagtgatagtctagcccagtggtttggtgggccatttctattttgctattttaagaatgccttgttctcaactacctgtcacaccctccaggctgcagtgattatgcctatctttttgtgaaattggagctctaaattttcttcttctgttttgcccttattcccttttctctcccctacacagtctcagtctttgcaacttcatgcctagagagtagatgctattattatctcacagataagataacaccagacatgatgatttgactgtggtcatttggagccggaggttggtatcagtctgagctcttgtgcctaaccagtgcactctacacctacagcactttacccagggcctggcacaagagaagtgctcccacctgttatttgctgctgtttgtatcattattatttgcatgatttgaagtcttcacatgttggtttggtttttttttttttttggttaacagtgtgttggtaaaacaccattttttattttttatttatttatttttgagacagagtcttgctccgttgcccaggatggaatgcagtggtgcaatctcggctcactgcaacctctgcctcatgggttcaagtaattctcctgcctcagcctcccgagtagctgggtttacaggcatgagccaccgcacgtcgctaatttttgtatgtttagtagagacaaggtttcgccatgttggccaggctggtctcgaactcctgacctcaaatgatctgccctcagcctcccaaagtgctgagattacagacataagccactgcgcccatccctaaaataccatattgacaaaacatgaataccttgctctctgctcaaagacatttataggacttaatctctaattatttctgttgcttttatcattcattttctctctcacactctcttatttagagatctttcaagtcaaactcttgctcagttatggttctgacttctggttctgtaatcctgcttccctcctttgatttcttcaagactaccttctgaatcaaagtcttacttctactttccaaactatctaaaactttccacaaacatttcactgttttattcgtttattctttgtaattcattcattcagcaaatatttactgagcatgtattacatgccaggctcagttctagaaagttgtggtggttatagtgtcaaaacaagcactgttcctgcataaaccaagtaagaggtgccagaggaaactcttccatacttgacttcttaaagtcaactattacttcttataggcctagaacagatatccatttaggccctttcacacctgaaggggttttctaataccatccaaggtattagcaagcctggatattagtcctgattcctacgcaggacattttatagtattacttcgtgaactttttgttttcctatatagtcttttatccaggaggtttttggtgaagctaatctcaattccttctcttttagttttaattagttactgtgcttgtcttgctctagattattttatttttctggatattgtacaagatacctaacaaggatgctgaatggactgatggattactctttaaagaattttccttccttctagtgacttgtttcaaagctcagaaattctgtatgattctaggcaagtctaccaccttcttgtatctctgttcccttatctgtaaagtgagataataatagttcctatgtcatataatccttgtgagggctaaattagtaaatgcaggtcaaccactgagaatttgcttggcctatagctcacattatggaagatttgcttttataatgatcatactctcactttgccgcctctcaattctgtgcaataaaggacacctttcaataaagccttttttccaaggtcagaaataatgcaaatcatgtattgattttttttttctctttgtggtcatacctctcttccacttaaacaagatattacacctgtttaaactgagaagcaactcgaaaaggccctcactggagtctctgtttagctacctagcatagttttggcactgtgcgtgcgttaatatcaaatgatcttgtcctgctccacctcatcacctttccttctgttttcacatttcacctgaaaaatctcttctatcattgcctcttaattgctttcattttgcatttgccttatgtactttaaccgcattatgaaagtaagtgaagcatctggcatttagctgagttgaaagcagttgtccacactgcagtgatgtcacggcatttagctgagttgaaagcagttgtccacactgcagtgatgtcacagctctgataatgttgcattttagaaatgtccagtacttaaatttacaaacaggtttctatgcagtcatgaatgttttcctcttgattttgaaattgtatgtgtgaattgatagaatccagagatggaaatttttagttcttaacatgtttggtgtgttattatttattgataaggacccagacatcataatactccctaactgaattctgtaaccaggactgggtgtgtcaaatgacttgttttcttcctcttaatattctaatgtgttacatctgaattgtctccccatgccccatcccagccaccatccttacccaatgttctctttgaaagtggtgtcttcgcaattgacattgagaaaggcaaagaccagctgaaaagcagctggctgtcttttatgattcagtattcattgctgcctgttgtcaatcaaaaggggaaagttcatgaagatttttgtttgcattttcattttaatttttttcttcctataaagaaaagacaacttttttagggtaatatagaaagtgcaggttgtgttcatttactcgtttgcttcggcccatgcaatagtgattgaatgatttttgtggattgtcagctaagccatttttttaaggtttcttctgtcagcagccaagctgttatatgaaacagatgttgactctgtcctgtttctttgtttgcctggaggaatacgcctcctcatagtgaaaggtgctgtttgtttgtatcctgctagttatcttcgggtgctgttaatctgcccaggttatttgcatttcttaatttctccagaaactgtacaggacacacttcttgacaggcaacccagggggcactgctgcctatttcttttagtttctgtcttttgtacacatgccatttgatgtctttcaccaaaataaagctttctttcgtcagagtctcattttattaaatcttactttagaggaaagaagacttctttaatttttatcttacgcattttcacagttccatgtatattatgcatcatccccctccagatccccactaccatctctcattttttaaaactccagccaaatacttatgaatgtaatgtaatcactggctctgagactcatgccacactgcaaagccagaggagacgtaaagacaatataaatcaataaattagttgggtattagaaaaagaaacagcataggcagacagacttgcagaggttattgtggccacattgctttgagggacaggtggagttgcaaaaatttcttgctggtataggagaaagcaacttgctattcgaaaagtgttttagacatttccagacataggtgtccatgggagggatggtgagaaaccatttccctggcaaaggaaaatgacagcacagaagaagggctcaaggaagaccatgtccatagaatgcttttgaccttactataggtaaatcacaggcagctatacacaagtaaatgtacatattctgtatttattatataattctaaggaagaagtgtggttcagcaagtagaggataccctcaagatcctctgccactctctgcaattgattttcttgttgttattttcttatacgtaaaatgtaagttttaataaatcacctctatttatttcccaagggattgggctggaagagaacattttcaattatctaaagctccttggagagatgctttaagaatagatggtggtatttccactaattctctttttatagtcatggatctagtgtgatatgtaatactgaatgaccgcaacttcttgatataatattgtttccttatcaaggaaaagaaccaggcctttttggaatgagaacagccagttaactcctggctccctgagctgtgtactttctcacttaggcttagcctatactaggggaaatgatattggtataaagccaagtcacttggatgtgagttaaaaggccacagctatctgaattggttgaataggatcccagggtggtggtgtttaagtgttttttacacttgctaagggaaaactgagccaaacagtcagcagagccaaataaatgaatctaggggcccagaagtctgttactggctgaggtagacctgaccttaatttttgttttcttctggagaagtgccttaggaaattttaaaaaatttatcttcccagtcatagtctagtatagcacttaagggtccactttttctaagactgtatatacatgtagaatgttctagaaatgatttttctggccttttgacccccctggcaatgaggatctcatgtgcctctgaaggttgctgctgcaccactgtttcctcttcaggggccatcaggtcatttcgtatcttccagctctactaaactgcctcacagaacatttgtgttgggttcttagtttaacttcctatccctcacaagggaataagtatttgtttctcccagggattgccataatagcaactaattttcactgtgtatttagtttcagtgtggtagtgcagcaacagcactggaagtcaagagaccagtattttcctctaacaaaacaagccatgggatattgggcagggcgcacttaacttttccaaggctacttatttttttttccagcagtcgaagatgctgataacaattctcttgtttaagtataacgtaactagtttatttttatcttgaaagtcatagtatctatcttgctttggcccctacaaatcgtagatcctacctctaacctctgtacaggattatgtagcattgttcactctatttttctttcatcctgggttcttcaattattgttttttgttttttttttgtacagtaaacatttggataagtctcaaagctctttgtgtgtatggtgtgaggcagggtatatacataaaataaaaaataactaatactaacttgacaaagttcctatcactctgatgttttccttgagaagcattacagtctggtgtggtaagtcctgtaacaagactgagtataagatgcagttaggatcatataggaaggagaaaggagacttcacagaggaaaagagtctacgaaaagggacagatgagacaaaagtcatggagatacactaagtttagtttacagatgaaacaagattggagatttatgaatcattgaaaaacaaaccataatcttaagggttcactgtactatagtataaaatatctcagcagtttcaagctggagggaaatttgccaaattatgacccaagatgcaagagtaatgctagacacttcacaagcaaaaggttgttttgttattgttatttaattcacttcagtgaatatttaatgaataccaactccatgccaggccctgaggatgcaatccctgccatgcccaggtgtgggtgaacacacacacacacgcacgcacacacacacacacaccatcctctgagactgtttctttgtatacttcggtgggagagtgatgttggccataatgattatggaagttctcagaaaaacataaaactagattcccataaatggaatggcaactcgacaactgttgaagaggtaatatgcttatagctatttatcacttaacagactagattgattctctgacacgttcaaagctgattaaaatagatctgagtagtgttcttttgaggaatcaaaaatttgttgcatttaatttcttgcggtccaaagtattgttgaaagattctactgaagatgcttgattattttaatcttgaaattccctggtatttatggcatcattgtgagcagcaataatgcgaagaatttatgtaaagttaattatcactgttggtacaagtgtgtgaagcccttaaatttaagcaacgtacatgattgaaaattggaagttgtttttttaaatgtcttttgttatatatgtctttatatttttcttccatagccaaaattctattttatgaaaaaaatggtaagaaaagaaacaataaattaaatctataacaaaaatagatttaaatcctcaacaaagaaaagaaagcaagacaaagctaaaggtacagacaatggaaacacgaaataaaagaggaattcgtcaggattattaatcaaagggctcatcagagttattaattggagctccacatttggagctgtgcctttatttttcttttctccttgtgttaagtagtggatagcagctgtgtttacccacaaactaaatccttgagtgtgggtgctagacccagagaggtagggcagtgcctcagtaatgtgctgactgccaggtgggttagaaagcccacccacacaggagacaagccacttgtctgtccctattaatcactggaaacagacaatggtaaacaaaagagctggcacacagagattctcaaacaaaagatgagcatataattatgacacaccgcaatatgaagtaaatcagtaccatgaaagaaagatgccaaatgaaaaatgagaagaaaaaatattcaaggacctagaggtaatagagtgatcagaagaagacattcagagagatgtattcatgaaaaagactcaagcacagaaattaagaatttaaagtttgactttaaaatttaaaatgaaaatggtcattaatacaactcacatataaattagggaaatgaaagattgaactagggaatctttttcagaatgacatacaaaaagaatacttcagaaatgtggggaaaaatttgagagacatagagaatagttacagaagttctagcatccctgtaattctcttagagaaaagagaaactggaaaggacaaaattatcaaagaaatagtaggagaaaaagcataaaatatgaaaaaaaaatatttagatgtaatgagccctctcaattccaaatataattaataagaaaataaccatacttagaaatattataaacaaaaataaactattaattacgatttctctctctttcacacatacacacacacatgcatgcacacataaaatagctttatttctgattttaacatggaagatggcagggtcaggtaaagagaaacaagcataaaagtatattatgttctttttttatttagggtatagattatgatttaaagaagaaaaaaattgaagtttatgtgtcttaaaggcaattaagaataaacatgataataaaaataggatgatatattcataaatgaatttttaagaaagttttgaaagtttacctattcagctcatataataaattatcttagggaacggagtaagagttcaccgggatcaaatacaaattttgctttatctgtagtgcatgaatttttttccataactttttttttaaagcataaagattttttaagaaaggaaatgtactgtaaggacaaaaagcaaagaatatttgatacatttagcaaagttcaagaaagaaagaaataaaacaatcaaaaaagttgtgataaatagaaaacacgtatatctgtatcaataaccacaataaatgtaagtagattaaattcccttttctaatacggatagcataaaaatattacatattcagctatatatggtgacaaaagacacttctacaaaaaaagataggttaaggtaaaaatatatataggaaatgatacccttaaaaaaggccataaaaaagaaagtacttaaagtaatatgagatgaaatagaattcaagcaaagatcattaaatagactaaagaaaaagatttcatattgatatactaagataactaagtaatcatgaacctttaaatatttaactacataatcctgaactatataaagctaaaactaagagaaatgtaaagtcaacagatcgatccacaattagtagggaaatttagctctccttatttgagcagataacagatcaaataaataaaaatatataaaggatttaaatagccaattaacagacttgatctaattgataattgtatatttttataatcaaatagaaaatatatgttctttgaattatccatataatgtttacacatgtgaccatattttatgtgttttctggttaatatccagtaaaattagaaattaatagcaaatagacaaaaataatggcacagccaacaaaatttaaaagtactccagtcttgtgtcatgaatcaaaatggatccaaggtctaaatttaaaacctaaaacaataaaacttctagtagaaaacatataagacaatctttgtgactttgggttaggcaaagatttcttagacaccaaagcatgatccataaaaggaaaattggtaaattggatttttttttcacttccagtagactcatttattgtcagatgcttgcttcctttgtttagtttttatccccacactattaacataagagcatggaacacgttggcctcctaacaactcccggaaccacagtcatttcggatggaaagtaaacagcatcttgtccttatgaggggtgatgggaggtcattggagagggaggccacaggcatgaatgggccagcaaggtgagtccaggagagcatgggctgtcactgatcaaccctcgtggctcagtttggtcctctgttctgagttgttctttctgactgatctttactttgtctctgtcgtctaggttagctcctggtaccaatgagataggaattacttagttccccaggctgtgagcatcctttatttttgtcattagacaaactcccccatgttgctccctaaattcctatctcctataatccaaattcccccatgccactctttaaatttccatctcctgtcatccaaattctggccaaagctgatgtctaatttagaaaaaaatggagcctacagaagataggatctggaatcagttagggtttgaagaccttaactcctccacttactgtagctatagagctggtgaaagtgtaaaatggcacaactgcttttgaaaacagattaacagtctctgaaaaaggtaaatgtacaccaatttgataatccagccattccactcttaggagaagtgaaaacttacatcgatgcaaaatcttgtacacagtttatttgtaataacacaatactggaaacaactcaaatgtcatcaattggtgaatggataaacaaactgtagtacatctgtataatagaatactatttagtaatcaaagtgaatgaactattgatacatgcaacaacatggatgaatctcaaaataattatgctgagtgaaagaagccaagcaaaataaaatagtgttctcctactgagataaatttgtattctatttatataaaattttagaaaatgcaaactcatatttagtgacagaaagaccagtgattgcctgggagtgggagaaggaaaatatggcaataagtgaaagagagagattaaaagggtcatgagaaaacttttgaggtgctggatatacttattatcttgattgtggtgatggtttcaccatgtatacatgtcaaaacttgtcaaattgtacatgttaaatatatgcagtttattgtgtgtcagttataccacactaaaactattaaaaatatttctataacttgcaaaattaaaagatactcttaattatctccagttaaaaatcgttgaaattgtgttttgtggagactttggcccttttcttggattgctttccaatgaaaatttattctagacagattaaggtaaaaaaagcttgaaaaaagatgaaagtgactgggaaaggactcggaaagaaaaccgtcagtttctaggtaatcgtatatagctgaattgttaagattaaatgtgtaagcacttcaaactctaagataaagaaattatcaaatcaattaacttaatgtgtagacttttaaaatctcagtgctaataagagaagacagattgatctgtctgtgtacagcagcactcagttaataaaaaaaaatgacagattcattatataaagagtgagagatttctcagtataacccagttgtggttcatgccgtagtgatactcaaaaccatagtgatataacattttcttcccaaccattttggttatatttataataattattcgtgttggtgattctgcatttggcaaagtgcagatcttatagaaaggagcaggttggggaaaaaacggtaatgacattaaggtgaaaaaatatattagaaagcatctgcttccaaaatatattagcataattcctatctagacagtttgtgttttgtgtatgggtaatgaaataccattttttgttgttcaagaatctttgcagtttcaaatcatcttcagctgatcttctataagtcttaccatatccagaccatatctttggttaaagttttccatccagaccttattttggcataaaaagtaattttattttccatttgcattttgcctcatttcatttttccacatcttggcaaaatgcctggttgagattgttctatttataatatgccaagcgggtaaaacataaatatgttttcccactctgtactttgccatcagtgatctccatggagtgggagccaccactatcatgttctttttctttaagataatggtagattttaaatgtgggctgtgtaagcatatctctatctctatctctatctatctatctatctatctatctatctatctatctatctatctatctgtctatccacacacgcatatatatatatttaaaccctttatttcaaaatcatagttggtggtacaaccagagctggtagtgggattaccatattataataaacaattcatacttcaggaactagggacagagcacatgctgccttgtttttttttttttttctttcaaaatcttctaaatgtatttagatatcaattaatcaccctttttgttccagtaagttaagagagacctactataatccaggaagttaaaaacacagaggagacttcttggacgcttagttgtcagactactgtggactttaagatggatagtagtcagatagatacattgatagattttaaatttgggctttctttgctgttactcatatatagttgtctattttgcaaacatttatcaagttgtagggcgaaattatctctactggagcagatgaaaacttgtttaaatggtgattggttaagatccaaaatgagtatgctttcaatttagaaatgtagaaaagatgcttaaagtctttaggtgtatctctgaacatacttaaaatacttttaaaagtcattttttattccttttttttgagacagggtctcattctgttgcccaggctggagtgcagtgggacgatctcagctcactgcagcctccacctcctgggctcaagtgatcctcccacctcagccttccaagtagctgacactacaagtggatatcaccatgctcagctaatttttaatttttattatttcagtagcttttgaggtacaagtggtttttggttacatggatgaattgtttactagtgaagtctgagattttagtacacccattacccaagtagtgtacattgtaaccaatatgttgttttttatcccttacccacctcccaggctcccacttctaagtctccaaagttcattgtaccactctgtatgcctttgcgtacccatagcttagttcccacttataactaagaacatatagtatttggtttgtcttttctgagttacttcacttagaataatgacctctagcttcacgcaagttgctgcaaaagtcattattctgttcttttttaatggctgagtggtattccatgtatgtatgtaccacattttctttatctactcattgattgatgggcacttatgttggttccatatctttgcagttgtggattgtgctgtgataaacatgtgtgtacaggtgtcttcctgatacaatgacttcttttcttttaggtagatacctagtagtgggactgctggatcgaatggtagatatacctttagttctttgagaaatcaccatactgttttccatagaggttgtactaatttacattcccaccagcggtgtataagcattcctttttcaccatatctacaccaacatctatttttcttgactttttaataatggccattcttgctggggtaaggtgatatcttatgagtttaatttgcatttccctgatgattactgatattgggcattttttcacatgtttgttgaccatttgtatatcttcttttgaggaatatctattcatgtcatttgcctattttttgataggattgtttttttcttgctgatttgtttgagttccttgtagattctggatattagtcctttgttggatgcatagtttgcagattttttctcccattctgtgggctgtttactctgatgattatttcttcggctgtgcagaagctttttagtttaattaggtcccatttatttatttatttttgtttttgttgcatttgcttttggggtcttagtcataaatcctttgcctagaccaatgtccagaagtgtttttcctaggttttcttctagaattcttacagattctggtcttagatttatgtctggatccatcttgggttgatttttgtgtaagtggagaggtagggatccagttttgttcttctacatctggtcatcttgttttccagcaccgtttattaaataagatgtccttttctcaatttatatttttgtgtgctttgccaaaggtcagttggttgcgtttagctttatttctgcattctctatcctgttccattggtaatttttatttttatttttttagagatggggtctcactatgttgcctaggctggcctcgaactcctggcctcaagtgattctcccaccttggcctcccgaaatgttgggacaggcatgagccactgtacctggatcgagatcctcctattttaagatgtgtggtggtactcttctggaagaaaatcctaaatataataatagagatttatacattagtaactcttattaagtaatttgtagcattacaaaagaattagtggttttataaaaggtttcaaattttctgtaaacattgaagtctcaatacatattaagttatttgatttggctgcgtattttccagaccatttctaaggcatactttgactctaaaattctcttttgtaagtgattagtcactgcatgttctcctcatattatttcctcatcctactttcctttaaaaaaaaaaaaagctttctctcttaaaatccatgttacgggattcaaagcttctgaaatccaccatgcccaactataatatacaatttaaaattcacattaaatttcattgggaatattctttataggctgtgatgaaattaaaatcttacatactcctccatttatcatctggaacaatatctctgtgaacaaggaacaaaagaacaaagaaatgatggttacaagataaggaaatctagtaggtaagagcctgcacaattttgagataaagttctgaatttttacttttcttgtttttatatattgtatcatggtgtctaccccaggtttattagagaagctgaaatattaaccttgattggcagagtggctattatcgtttttatgtgtactaggctagggctgggccaccagtttaaagaggtgtcaactgaggagtggaagaaaaggttgtggcatgtcaggttataccctaaaagtgtaaagtcccatggcaatacaatgtgagccctaatgcagaaaatactctcagaggaacatgtcctctttgcatagcatcgctgggaatctcgtccagggagttcaatggggcaggtcaccagaggaggacacaaggggcaagtgcaggacggccatgtgcatcatttggcccatgtgctgaccatatgaaacctgctttgggactggaaaatgcctgacatggctaacctagaatatatcactttgctggttcctggcaccatccttgtttttaatgtgcaatgagtggctgctgttgcactgtttgaacattactatgccttgctgacctaggggagcctgaagcaaaaaaaaaaaaaaggttatctactgcagttctaaatcaaattttaaaacaacaaaacattttaatatctgtagctggaaggagaatgtttggagctgtgcaactggcaggcaagagtgtagtgactgaagaagagatgattcttgggccagttttggacacaaactgaactaaactaaaaaaaaaaaaaaaacccaggcagactgtcctgtctagcttcccagtaaagtcagaggggacagtcctggcagtactatggatttgtatgctgggatagatataaacagcaaaactctcagccctgtggctataaaaagaattattttttatgatgtgttcgttgtttaagagcaggctgtgagttttgtttaacatttaattccaatacagttcaaaaaccagaattctatcttgtgtgcttaagctctttcagatgtttttattgtgtaacattttctccagattcttcttttaatgtatgtttttttttccctcacaatctgttaaaagatcagtttgcgtgaatcttgacactgtgatgctatttcatggttttaatttgaatgcgagctgttgcagctggaagcatatgattaatgatacagacttgtttgtcacaaaaacagatgatattttacatttagtcaagatgcattgaaaaattgacttgcttgtattttactggctgtaagtcacattttaattcacttttgaattctccttataatttgaattaatcttaaacatgcagatatatctctcatgatgtagctggctattgaaggtatttgaaggatgattagaaaatcgcatattaaatatacattatccattagttaagtagtcatttttaaaattttttttgctgataaaattgtactaaatgagtcaatgaatctgggagtcagtatacaaagagagtgggaataaagcttataaattcattgttcttgatggcttatatatttttatatacttttacagtttacctgaataacaaggtgatgtttctgatctcccttgccttctgctgtcttgaaactctgccccacatgagacaaggcagtgttttccagattttctaccatcactctggaactcagagtgggctatgggtgcatttgctgcagtgggcagtggtctaacctgtccttctcagaagcagtgtcaggaaagttgggtatgcagtctccttcagaaatgagtcttataatagcattctaccttccagcagtttttatctcataaaagaatatgaaaccatatttgttaaatcagacatttcttgctcaaacctgttacaccaaataggaatttgctgttttcaaatctctggcatgtgactgaactgaacagtcccaaactgagtacttgcatggtgaggaagtcagtctcagaaagtatgtatatatgccatgtttgaagagttttcattattatcattcattataatttactaaaatgcaactctctgtttctttgttaaaataatcttagctctgccttgtggagccacactaacaaatagtacagctcccctagatagtaattgggaaacatgaatttaggtgtcatgtattctgaaggatcacttttcaatctaattatcttccatttcttcaactatttttcctatgatgtggtctccaggtctatcacgatcctccttgtctcctggagaagtattaaattgtggggtcccttgtaaaatatgtgcctagaagcatgatgctatagatgtggtctgaccagtgatattcatctctttttaggtttgctttttcttttcatgccaacaacacgaatcatagcaccctactggcccatgttggataagctgtcaaaacatccagctgtttttagtcatgtctttcccattgtgttcttcagctgattttttttttattccaagtaccagacattacttatatctctattaaatttcattgtgtaagtgctggctcattgttccagcttgtcaagaactttttggctttttttcttttatcatccaacatattagcaattcctttcagctttgagacatctgtaaatattaaaataatttcttcaactttttaattcaattaaaatatgtaaacatgtatcagactgtctactctgtgctaatctcaggctccctgctagaaataacaagatggataaaatgtaatcattccagctgggcgcagtggctcacgcctgtaatcccagcactttgggaggccgaggtgggcagatcaccatgtcaagagattgagaccatcctgtccaacatggtgaaacctcatctctactaaaaacacaaaaattagctgggtgtggtggtgcgtgcctgtagtcccagctactctggaggctgaggcaggagaatcgcttgaacccgggaggcagaggttgcagtgagccgagattgtgccactgcactccagcctggcgagagagcaagactctgtctcagaaaaaaaaaaaaaaaaaaaaaaaaaaaaaaaaagctaatcattccttcagggagctcacaggctatagggaataatagacatgtaattataaaactgtaatggagtgtgataattgctatagtagagttacgtgtgaagtgctgtgaaaaccaagattggttgcaaatcatagaagacctagcccctttcatgttggcacaaatccacgaatttgggggtaagtcagttaaatcagctacaaagctaccgaactactgccgtctgatttctttctttctttcccaaggatactgtaagagacttgtcaaatactttcctgaaatgatcccatactatggtattccccaaatgtaccaacctagcaagtcagtccaaaaggagctgagaattatttagaaacatttattcttagtgaacccatggtggttcacaatgatcccagtttttaaatctggggcaatatttgcctatcaccaatcatctggtaaccttcccattctccagggttacataacattgctcagagcagttttgcagttacatctgagtttttctgctatcttgtatgtaatctgtctggatctggagacttgagttaacttaaagaagtttgatatactctctcctatctgcaaatttactttcctcttaactgttttcaaagttactctttttatgccctctctagttttttttcttatctgatcttaacatttttgcgagtataacttcattttagcctctaatctttccctttctgatagctttatcctcctttaactgtcttcctgttttggatgaccattcatggtctccgccttctcatcttcttccaattgttaggttgaaatcctttctacagtctagggtaaatgatcatttttggtagtgtagtctctagaataacatagtaaccatttcttctttgatggtcacaattaagtttggagacttagatttgtcattgttttcttatccttctttgctatgaaactgtcagctgaatcaggtatacatttgtcagaactgaggaccttatagcggccacatgtctaatggcatctggctctgatagtgtgtctgttaatagcgatatgcctgctaccaagactggacaaatcacgtatttggccatggataatacttgtgtggggtactgccagcacttgccactttctctctcctcggggtttgattgctgatctaccctcctccttatcaactcatttttatcagtacctctgtcagtattcctaactgaatccgacttgtgtggaacttcgactctttaatatggtttagacaatttctgatgattaatgataaaataatttaaccttcagtatctatgtccttggtaggcacttcccagatcttctatatgcctgtgttgtcctgtgtaatttggtatagatctggcacttagtatttatctgattttcttttaaaagtttatgtttgaattgagtttctaaatatttccttagattagatattaaaaacagaaaattcaggattaaaacatcgtaaggctcttgatacataatacaaaaccgcttattagaaaatttacatagatttacattcctattagaaatacattctattgtctttgttattggatctttcatattgttgcagattatcgtttagatttttttaggcagttggataagtgaaaaatggtaccataccacaagatacaggtcataaagaccttggtaataaaacaggttgcagtaaagaagccggctaaaacccagcaaaacaaagatggcaatgagagtgacctctggtcgttctcactgctacactcccaccagcaccatgacagtttacaaatgccatggcaacatcaggaagttaccctatatggtctaaaaaggggaggcatgaataatccaccccttgtttagcatatcattaagaaataaccataaaaatggcaaccagcagcccctatctatggagtagccattcttttatccctctactttcttaataaacttactttcacttaagaaaaaaaagtaccatataattttagtttatattttttaaataacaaattaaaattctttatgtttgtatctcctttgtaatttgtgtctattgattattttgctcttaaaaatatgactgtttttagtgaaattttgcatgaaagattttgggttaatgatttccaggtgaaattttgggttaaagatttccttgagattttgactggtagtgtcttaaactcaatagtaaatttggaaagattaaaatgtttattatattaaatgcataaatatatttaataaacatattcattaaatttggagagaattaaaatatttcttatactatatggtagtataagacatattttgtttctgtgcctgcatgcgtatgtgtttgtgtgttcatccatatacatattgggatatttttccatgtacatattggcatattaaaatatttgttaaaattgctggatttttaaatgttttttaatgtattatcaaagtatttgaaaacatttaaattttgtttcttatcaccttatggaaccatgttattattagttctaagttttctcattaattattttgggtttgtatctataaataatcatactttttccccctgccagttgcagtacctcttactaatttctgccttatcatattggctagaatttttttttttttttgagacggagtcttgctctgtggcccaggctggagtgcagtggcgcgatctcggctcactgcaagctccgcctcctgggttcacgccattctcctgcctcagcctcccgagtagctgggctagaattttaaaaacaatactcagtaattctggtgatagtgtagccacactaatgtggtatcctctgcacctagtatagtacttggcacataaaagtttctcagaaagtgctggagtaaatttacttgaattaagcaatcaaagaactttgactctagttggtaaactaaaaacattttacataagtaacaatggtacaaaatagaaagttacgcatgacattaaaaactgtagataactgactactctggctccttagtgggggaaaaaagattatatacaaatacagtaaaaggaagggttttgtggtacagatggcatttaatgcaggcttaggaatcgattatacttgaaaatataaagatagggaaaaagtagatccccaggaggaggagaaattcaaaccagaggcaacagcagttgagaagcatgaagggtgtaaggggaaaacacgagcagttcattttgaccagtgtaaacgtttcataaatggtgtgaaaagattcaaggttagaaaggtcatttgggtcaaatcatcaagagccttgaatgacaggctaataagctctttggactaatgctttgcaaggtttttcacattatcaaacattgaaaatgataatattttaatggtatattaggataaacagaaactgcttactgctagaggtgatgacaagagatggggagagcatgccccaggtcccactggacaccccaagggctacagggatctcagcacttctgtaatccttccaaggcacatctaagttaggaagaagataagatttgtagtttcagatttcatctagacatttctctcaaattcaatttaaagctgttttgtgttctgcccattttctcccctccacacatacatacgcatccttccttagatgtgccaaataggttcctagtttccaaatcaactacctagagtgccattcatttaagtttccttcaaaccatggcttttaattgaaagaagagatgattatgtacctgtgtccctggttctttaattttctacctaagttttggctaccaaaaatcaattctatatttcccaggtatgtatcattgtatttgtttttccctacttgtttttgattttatgatacttttgaagaataattacatctcagtactaatacaactaattttgacatgaagttttctcacgatagcctatgatctcctaataagttaataatatatcatttctgataacactttcagggaattagtctgtggccctcaaataataataaattacattgttaacttttaaatctgaaagagctattgtagactaaacaaaattaatgattttctgtaaaaggattttccttgattaaagaattaagtttcaatagcaaaatatcataatttaatgatgccacatcgtcactgggtgttgcattaggaaagagagtgcttcccagaacactttttttaaatctctcttgacagttaaccaataaaattaagaatgtaaaaatatattttgatttaatatttttaaacattttatggttttgcttgtttgtttgtttgttttgttttgagacaggctagagtacagtggtgcagtcatggctcgctgcatcctccatctcccaggctcaagcaattcttttgcttcagcctcccaattatctgggactacaggcatgtgccaccatatctggctgattttttactttttgtagagacgaggtctccctctgttgcccaggctggtcttggactcctgggctcaagcaatcttcccaccttggcctccccaagtgctgggattataggcatgagccaccacatccagccaatattttaagacattttaatgctgaaaatgggctataaactttacaattgattttaatttcttttacatatattgatggtactttggctatgttttaaaaagaattctcatcttttagatatataccaaaatatttacagatgaaagtatgtaatattaacggtttgctttaaaataatagaaaggaggaagtgaggtgaggctggattagacaggattgttggtaatggcgttcatcagactttccttgttacatttatatgttcaaatgataataaatgaaaatgccaggaatataattcatcatttatttgatggacatcagaaaccctacagtactattgggaaagtgggtggctattgcatgctacattaaatctgaactgctacgcttttaatttctgttctgtgccttattttctttcatagttattatctcttctcgtttaattttttaatttcttgatttagtctctgttgtagctatctcttcttgctactgtctctgtgcctgtttctggcagattctctctctcttccatcacccacataatgatttactacttctaatatgctctgaatagggagccaagaaattgtgatcacttttttttctatgccaggtttctgtgtggacctgagggactttttagaatgttaagcatgggagctttaggttattaatttggagacatttctgttggctgtcccatggttcttaatttttagctgtcttctggatagttgaggcatcctatcaatgttcagatttagatattagatgtttcgatttagatagtatacaaacagtcatatatgttgaaaggtatcaggaagggattggtttttttgttgtttttaatgcagtgctaatgatggtaataaaatttacttataactcactgaaaagaaatttaattttccagtttttatttaagaatcaaaatagtaaggccaggcgccgtggcccatgcctgtaatccagcactttgagaggctgaggtgggcggatcatgaggttgggaaatcgagaccgtcctggctaacatggtaaaaccccatctctactaaaaatacaaaaaattagccgggcgtggtggcactcatctgtagtcccagctactcgggaggctgaggcaggagaatcacttgaacctgggaggtggaggttgtagtgcgctgagattgcgccattgcactacagtctgggcgacagagcgagactccatctcaaaaaaaaaaaaaaaaagaatcaaaataataaatataggaaatacttgtgttgctcagagataggttgaagcctaaatgacatagtgtcataaatgtattatcaactcagtgacctgtgagactgtgagctcatgagtcaggcaggggtcatgtctatttggtttgccaccatattccttatgcctagtgttacgtctgatacatagaagctactcaatacatacttgttagttgattaagtgaatcataatataaatcagatggctattttaaattcagcacacatgaattgagtgaagattatatgttgattcctatattagctacctaaaatatccagaaaaattggtctcagaacataagtgcagaaatctgtcagcccacaacagtcataaagaactaggcatgtaaaaactgatgctttgttgtgtgtctagcttttgaaattgaagagataatcagtttgctgcaggatcacaatggatagagaaagtagtcttataaaaaataaaattaaggaaggcttcacaaggtcataatgtttgggttcaggcttgaaatctgcataagaattttctaggtaagccataagtgtagcagaggaaaaacagccagaggaacatcttagtccatttgtgctgttgtaacaaaatacctgagactgaataatttataacgaacagaagtttattagctccatcttgaattaatttttgtataaggtgtaaggaagggatccagtttcagcttgctacatatggctagccagttttcccagcaccatttattaaatagggaatcctttccccattgcttgtttttctcaggtttgtcaaagatcagatagttgtagatatgcggcattatttctgagggctctgttctgttccattgatctatatctctgttttggtaccagtaccatgctgttttggttactgtagccttgtagtatagtttgaagtcaggtagcatgatgcctccagctttgttcttttggcttaggattgacttggtgatgcgggctcttttttggttccatatgaactttaaagtagttttttccaactctgtgaagaaagtcattggtagcttgatggggatggcattgaatctataaattaccttgggcagtatggccattttcatgatattgattcttcctacccatgagcatggaatgttcttccatttgtttgtatcctcttttatttccttgagcagtggtttgtagttctccttgaagaggtccttcacatcccttgtaagttggattcctaggtattttattctctttgaagcaattgtgaatgggagttcactgatgatttggctctctgtttgtctgttattggtgtataagaatgcttgtgatttttgcgtattggttttgtatcctgagactttgctgaagttgcttatcagcttaaggagattttgggaatagcaaagacttggaaccaaaccaaatatccaacaatgatagactggattaagaaaatgtggcacatatacaccatggtatactatgcagccataaaaaatgatgagttcatgtcctttgtagggacatagatgaaattggaaatcatcattctcagtaaactatcgcaagaacaaaaacccgcatattctcactcataggtgggaattgaacaatgagaacacatggacacaggaaggggaacatcacactctggggactgttgtggggtgggggaagtggggagggatagctttaggagatatacctaatgctaaatgatgagttaatgggtgtagcacaccagcatggcacatgtatacatatgtaactaacctgcacattgtgcacatgtaccctaaaacttaaagtataataataataaaataaaataaaaataaattaaaaaaatacaaaaatttaaaaaaagaagtttattagctcaagatctggaggctgggaagttcgaaggcatggcattggcacttggcaaaggccttcttgccgtgttatcctgtggcagaaggcagaagagtaagagattgaactgacagcctgaagcctttttataatcagcattaatccatttgtgctggtgaatccctcatgacctaagcaacttctattaggccctaccccccaacactgttggattgaggaccaagttcccaatacatgctttttgggggacacattcaaatcatagcagagaagttttaaaagtttcaaagagcttggcaattacactgggttatagaggagaggtaagttgggcagttgattgagaattaggaataaaggataaggggtaaagaatgacttaagattcatagtttcaatcttggctgctaagtctgacagggaattcaagaggttgggctggaaaagagtgcatagcaagaattagtttatttggggacaaattgagtttaaaattcctggggaacatctagaagggaacatatgatagaagaagtaagagtattggtgctcaggagaaaattagatgagagcatttgaactgagtgttttcgtgatattagaggtagatgaaacaatgtgagtaaagactttcccaaagaggatgtacaacaagagaagaaataagctgatgaacagaattttggagaatatcagcagaggtaattcttaattggagatctgtgcactctgagggtggaaactgtgcctttttcttttttaaaaaaaatctctgcagtacagcacagcgcaacacatggcacccggcaaaccctcatagcaatttttttaatgttgctttttaagaagtattttgagaatgcagtaaatactattgactgggggaatcatgagtcgccagtcagaccaatggtaaattattatttttttctccctgtagttcattaatccacatttgggaatttctacctagctgcaaatttattttaaactttgcattaattatctattgctgtgtaacaattcactacaaatttggggacttaaacagcacacgttttatcagtaagttaaacatagaattaacatttgacccagcagttccacttgtagataatacatacaaaataattgaaaacagatgttcaaacaaaaacttgtgcaccaatattcatggccactctattcgcaataaccaaaagatggaagcaacgcacatgctgatcagcaggtgaacagataaacagtgtggtatatccatgcaatggaatattattcatccataaaaggatctctttctaattcctgtttttgttggcagatttcatttccttgtgggggcagcgttagactgagggtctcggttcctagcagcctccattcctaggtgagagaatacactcaattccttgccatgtgtgactctctagtgtggcagtttgcttcataaaaacttgcgtactggggctgggcgcggtggctcacgcctgtaatcccaacactttgggaggccaaggcaggcagatcacctgaggtcaggagttcgagaccagcctgaccaacatggcgaaaccccgtctctactaaaaatacaaaaattagctgggtgtggtggtgcacacctgtaatcccagctactcaggaggctgaggcaggagaattgcactccggccttggcaacagagtgagactgtgtctcaaaaaaaaaaaaaacaaaacaaaacaaaacaaaaaacttgcttaccagaaaggcaatagagagaatctgatagcaagacagaagatacctattcaaggaagtgacatcccatcaccttgccacattctcttggctagaagcaaggcactaggccagctcacactcaaggggagattacaccaggggtcaatatcaagaagtggggatcattggaggtcatcttagagtctacctaccacaaacatgaaggggtagccttcaccatgtaacatttctgtggggttttagtaattagcttggaatgactatgctcttcctaaccttctttaaatccaaaatcattgagcacctatgatgccattatggcaagtataaagaaagaaaatatgtggtttctggctttatgaaaatacaaaatatgggtcattctaaagttttttatatatctattattaacaatggtgcatgaccttagattgatttttgctaagactgtgtttgtgtatttgttgaatagaatgatctgatttttgaggtttgtagtaaaatcctcatttttctaattaagaaagagacaaaatcttgaagaatacaaaccaaagagtggaggtgtggtagataatgtgtttttttctttgctatttttttctgtggtcagtcatttgtatataagaaaaaatattcagaacagcagcaagcctatgataaatgtgtttaaaacaaatttttaaaaaatggacgttgatcctatgtcagaattacaagcttaagcagattaacatacttttatatgtgctgccctataactgtttcgacctgtctagaataagaagagcatgaaaggagtgatatcttcttatcagtcaactatgaaaataagtcctaatctaatatcagaattgtaagaaaattcagcactgtggaaccttactggatacccaataaatgtctcttctcatgtagcctattctctgtcctcaggcaaatatagtctttaactatcctaatctaaataaaatttagacagtaggtgtaacatcattcaaattacactgtctctctcccttttctcctgagtgtgttcttcgtgggaaactgtatttggaagtgaagtgcttaacctcaggcaatgtttcaaagtcatttgtcttctttttggctagtgcattgatccctactcctttaatgctgtgtcactctcttttgtataaccttctctttccaagtgctgtatgacacattaacacttatattttaaagttaattaaaattaatttcattttgagagttccacttgcctcttgagacagtaagatgcattccagagcataagatagaaggttggcaatgactgatttagtgatatgattaagtatgaagaaacctgcttgatggtatatgtgatggagtgggctagtcttgttttaatatatagtaattgtgtaaagagggaagtctgatcactttaagacatgattttaatggttcattcatccaccttcactcatagaaactattcatttcgaattgtctgaaataggatgatcatgttactagcatcctctttaaaaatggcaatttcaaaacacaaaggggaagcttgcttctgagaatagaaaaaaagggactgtaccgctttagaaagaagctcagagagaagaaacagtatttcagataagaaatataaaaggagccgggtgcgttggctcacgcctgtaatcccagcactttgggaggccgaggcaggcagatcacgaggtcaggagatcgaaaccatcctggccaacatggtgaaaccctgtctctactaaaaatacaaaaaattagctgagtgtggtggcaggtgcctgtaatcccagctagttgggaggctgaggcaggagaatcacttgaacccgggaggcagaggttgcagtgagccgagatggcaccattgcactccagcctgcgcaaaaagagcgaaactccgtctcaaaaaaaaaaaaaaggaatataaaaagaagagagggtgtgagtaagagttcttttagactatataaaaatgagacttcttgtcctcgaatcgatgggtaaatagtttacataatcactccccattcactcattaattaacttaatcaataaatatcaatggcctgctctgtgccagattctgtatagatactggagacacagtgatgaacagcacaaatgagaatcttggggtattttataaaaattatttagtagagctatggagacaggtaaccagtgaaattagaatgcttaagcaaaagctgtgaaaaggctgaaaaagtgggttataaacagttacaagaattattaagaaaaagcccattttgtgcttagatttgtgtttgcttttcttgtattcacaattcaattatattttatttaaaaatctacttgacagaaaaaaagaagagtacttgcctacaaatggcaccccctgccttaacccatgctgcctgagctcttatttgtgcaaccatgcaagccgctgaaaaaaatagtaccaatttttggttatctatgctttataacaaaagaaagagaaatgtcataaagtgtaataatagctttatatgtatgtgtatgtatactgtatgtcagccttgtaggtaacatcatctctcaaaggtatgcgtatacacgcacattgcgcacgcatgcacgtgcacatgtggacaaaaccagtttgtattagtgatcagttttggttttcataagggtgtcacctgaatgttaacacgactaatcatgctgtttgtgttcatgtctagttgaagacacctgtactgaaagaacatgcgtttttgtctgaaggggagaaatttcttatttggtgttagtcaagggaagaaatctagacagcaatgagggaggaagaaactggagattataaaatactgagtctgaaggtgatacaggacataggagaaagttagttgaacagaaaaagaaagggtctgtcccaagtaaaaactttggtttatttttttataacattggttttctcaggaattacagaaaatctattctttgcctcttttgttcagcatctggtagccttttacttccaggtactgagctaacttgagttagttcttcgttcagtagttctgtgagttataggcttaaatggtggacaaatgataatagtaacatccacaacaaaatgacagttaacacttgtgaacagttagcatattctacgtactgtgtgaaaaaagttatttaatcctcacaatcctatgaggtaattaagtattattattttcctctcttttattgagagggaaactgaggcttggaacaattaagcggagttttcatgttacttagatgatatgtggcagagccaggctttgaactcagtaagagtccatgctgttcatcactctaccatcattctgtccttcagggctgaatctcactcctgagattcactgctttgttttcaaggaaaattgtgtactgaattctcaaaaaaattagaagctttggaaagttttagaacatacttgatccctaaacttagagctgcccaaatttatttatgagttataaagtgcattgacttatctaattacataattcgatatgcacattataaaattaaacattgatgtcacctccctgaaatctagactttttctttgccattcactattttatgcttgagcctgaacatgatgctgggtggccttctgtcatcaatagggggacaacaactagatcaaagggaatgggccaggtggagaaatggaactctcattttaagagctctgataagcatttccaaaaagaatgtcatagagacagttaaaagatgaaagagcaaatgtgagtgcagtcatatattgcagagcaagcataattctcttacaattttgttatgtgagtaaatatggtaataacttgttttgaggtctgattagtcacagacgaaaaaacactcaaagtgagggacaaatttactattccacttttgaacatcaaggcttatagtatgtgactctaattatactttatgctatataggatgagacattagatggtttttaactttttccgtgagtttgtcttaatctagaacctcttgcatctttatcagttttgtcacaggattggtacgttaaagtttctgataaaaaagaaaaaatactggttggggaaattggcaagttgtgctagaaagcagtagcatttccgcattattaaaagatcttatttcatcctgggtatgcaacaaatatctttctgtcagccaggaagtctccattttggctcttcccaatttattgctttggtcaacgtcaattgcagcaaagctgttcccactagcttttctagtcttgccaccagattttctagaataccacaaaagtgttttgttttttgtgtcatgccaatggctcaagaattagctgcttaaaaaacatttggaactatgcaagttgtgatccccttggcatctgtggttcttctaaggagtcagctgttggcttttgcaggagtacggaagggaacatttctccagaactgttcccacagctttttctttctatgctttcagtttctcttgggtactgattctgttggacatcagaacagtataaaggttcataaataggatagaatcaaaaagtatcccaaggaacataggttaatgtactttgtggttttagtacagtgcttagcacgtgctgtattatggctgcatgttttcaaatactacgacaggactctgagaaaggcctatgagtagagtgaagtttcattgtaaatatgtttaaggaattcttaatatcagatgctgaatgagagattccttgcagaactgggtatgtaccagaaacataaaaattagttgctaataactttactcaagccaccaccatcaaccaaaaagatagattatttgtatagcaaagaatgatttgcttggtaaattctacattctacttttgagaaatcagaataagtattctataaaagattaattctttaaaaactattgagtttccattatgggttagatgtggtcagagtatggtgatgaatcagacacgaaaatgcacaaaactcccatatggttcttccagtgtaatcaggaagatgaactatgcatttagattactatgctacagggtagaaagtgttacatggagaaccaagagaaacagaccagaagatttttagaaattattcccagctgcaagatcaggtaaagcttggtggagtaggcaacatttgatctggcccctgaagcgcatgtagtggtttgaatttacaagaactaaggggacaactcacacggtagtaactccaggcaaaggagataacaaaaccaaatgcataagggtggaaaccttaggtctggtccaggagagcaaaacgttttgctcatttgtggagtatctaaggagatcaacagaggaacatggtaggaatggcaaagtggagccagattatggagaactataaatgctaaatcaagtcatttgagaacttcaagttataggcacttaatgtttttgagcagagtagtgatataatttgagctagttttctggacaagtattagtatatttgtgatagtttgtgctagttttctaggtaagtatcttggttcatttgagactgggtaatttataagcaataggagttttttttggctcggtacggctaggaaatccaagttcaaggggtctcatctggcaagggtcttcttgctgcatcaaaacgtgcagaaggtatcacatggtgagagaacatgcaagagagaggagaaaatggagaaaactcctcaaatgaacccatttccaaaagaacagcattaatccatttttgaaagtgaagtccttgtgacttaatcacctcttaaaggttctacctcttaatttttgaaggggcattgaacccatagtgacaagtatgagtaatttaactggagctgtgcaaagagccgttggaaggtcatcctactgatccagctggaaggtgatgaaggcatgaaccatagtgagaacataaaggaggggccaatgtcagaatgcagacatggtcctcaatgcaattgttaggaattgacatctaagataatgatgtaaaattgtgtttggagtcacatagacatccagaataagtgttgagggaggataaggtgaggagagggcaactggcatatcagtttgtatggtacgtagaactttgttttataaaatgtaggctgaggaccacctaccttggaatctcctgggaggcatgccatttaaagttcctgggcaacacacaattcagtaatctttctaggccttcaagtatctgatcactgggttagaattccgatataatggtaccaaggagattaggatgcttcctgggtagacctcttagttttgagattgccctcccaactccagctcttctatcttgggacttgagtcagccaaggttagaataaagatagtttaaagtaagacttttattcccgctagaaactagctctaaatttatgcctaaatttcagtagatcttaaatgtctttttctcacattaaagacaatgagtatccatatgtgccatgtcagaaattaaagccatgttaaaaatttttataaaagaataataagctcataacatgttaatataaataacatttttaatgaaaatcaacaattttgaaaacaaaaaaatagtgagaaaattggcaaatctttttaatctggtttaatagaagagggccggatgctcatatctgcttctacagttaatctgttgttaatatgttgtttgggttgaagtatatgaagaaagtctagtctcacatagataactcaaaaagggaggcatgatttaataacctttttaagtaactgttgattgtcttctttgatactatactgaaattcttcaacaggtggttgtttcttaatcagttgtagtgtggaatctggaaaacttatcagggaactttttgtactcagttaattaacttgcattggtctttcttgtactttgaatgtatttttttatctatgcatggttttgtaacatcatgcattcgtcatttggaaaatattggttcactgagtagtgtagagcttccaaatgtttacagattactttatgaatatctgtctattaatatcaccaccaatctcatcactgaaaagctgtcaggctcacttaaaacttagcagaaataagttttctaaaattctagcttttgcttgaaaacaaattttaccattgacaacaaatactatcatttgttttccttgaaatgacaagcttgcacatctatttttgagaaaatgtctatcaaacagtcaaatctgaataatcatagtttgtcagttgaaatttcaagtaaaaatggagttgtgtgaagtagcttacaactcaaacagttgtacaagtgcttattgtcaaatcaactgtctactttggtatgtagcaaaaatgtattttgcttacttcccatttagtcacatagaatattttaaaagtgtgtttaagagctaagttaataaaataataacttttactgccgtattaagggaattcttgggtgaaactgtagcaggagattaaagaaaaggatcttttcactattaatatattattcatacattatgtcatataagggacattttttaaagttatggtatttctctttgggtttgtgtgtgtgtgtgtgtgtgtgtgtgtgtgtgtgtgtatgtgtctcactatttgcaggtaccatatgtactcctaaatgtggccaatgaaaacatagtttctcattgaaagagttgactgcacaagttgaatttccaggtgtcctgtgtgtttccaagggacaagctctagtaaaacatgcaaccaaattctctttatacctgactcactggacaccatctaatgtgtggatgtatttgctctgcctgctatatttgcaggcctcattgtaatttgtattactttacaggatttgatggtttcagttaagaggaataatggctttctaaatatctctttaggtcctagctcagagacttgtatggatggaataggtacttaataactatccattgaattaaccagttgggaaatgtttttggacatatttccattaatgtatgtgggcattaacttaccttttgttccaatagggttccatttcttttctcctagcttatgtggtaatatagttctttatttagcctcattgcctttttagtccatgatctctatttcaatcacattagacctaaatatatttattaggtgtgtaaccttgggcaagttacataatcgttttgtgttttggtttccttgttgataaaatgagattgataacagtatttacctcatgatagtcattagactgtcatgggtaagtgatttaatatacgtaaaacactttgagcagccaccattcatgtcagaactacactagtttgtcaattgcagccattagttggctgtggatagaaactcaatgaaagcattctgtgggcattagttggctatgtggaatttacaataaagcatgctgcattgagtcttacaatgaaaactgtgcactgcacatccttcatgttagtgaaatttataacaagctagtgtacagatacacatgcacactatttttgttgttttaaacacttaccaccgagtaacactgcctccagttttgtccctccagcttatggatggttctcaagcatatggatagtgtctggatgtagcctgtagcagatgctgttggtatcctacccagatctcctttcctgggccagtgcatccatctcccagctgctgtgggtattggctgctaatgactcacacctgtactcttctccagaggcctgcccttggctgacagtaattgccccaaccaaatatgtttgggagattatgagatcatgccccaaccccctcctgctccccagggatggctaatgactatacaagggtgtaatagctcagctcccttgcctttggactagacaacttctgtggttcaatccatgctttagagttccttatcgcatcaagctgaggctagatttctgaaacaatatctttgcctagcttcttcccccattctagcttacttctttcacttctagtttctcctgacagcactccctctaaatcgggtgtacaagaaatgatgtctcaggctctgtgtctagggaaccggacctaagatgttgcttatctcagtacccctgctgtttccttagttccaccaccacctaagtaatgaattccctatattaaataatctctggcttaaatttcctctttatttttgttttgttttcttagttggaccctgcttgatatgcatcaaccctgctcatatcccatgtcttcacatacttaacattactcaacatcaaatgtccttgatcctcttattaaatatatacctagttatttttgtatagtataatggtgaaatcacagattttaggacctgaaaattagtttcaaaggcttagtcaattatacttccctccttagattgttgtaagaattgtatgagcttttctttttaaaacacttagtacctggaggataggaagtgtttaataaatgggagctgtttggctactgatattattctttcaagaaatttacccccaccgccccaagcaccatggtatgtgcctttagtcccagctacccaagaggctgatgcaggagaatcacttgagtcttgagtccagcctaggcaacatagcgagaacccatctcaaatttaaaaaatgaaattaaaaaagaattgccccactttggatgaaatgcctatctcttgatcccagaggacctaatgagtatctctatgacagcactttcttgtactctattataatctttgagttttcttttctatttctcccagaaaatataagctgctcagtgtcatcagtggtgtgttggctctctgggagatgaaaggactcgatatgtaggatttgctgatttccatagtgacagtgctttcaccctgattgatttcaagctaccaacaggatgtcactgagcacagagttgggaagagaagcaaacaggtgacccttgccagccagggcacaccaactgcagtccccactgtttccctaacacataacaatatgtcaaacataggagctagatgttcagtggatgactgaaatacagttattaactggttaggacttgatcatatgcaataaattggtgaaattccttgaaatctaattgtcgttatataaccagtagcacccctttcctacacatgcacacatattgcccctcctattcttgaatgaaagtgatgaaaacagtcaccatgatgtaatgggaagtgcctatgccttccctgggcaggttgtctgctaactcatgcaaatcccaattttgtgatttattagatacatgacaagggatcacttactttacctctgtctgcctcagtttcctcagagagttggactaaatcatctctagagtttgttctagtctcaaatttgtaaagcttaattagtatataattttactccctcattccctcaattttcattattccagtactgaactttgagttagatgttgtgctatataatggaaatacaaagaggaatactacatgacatgccttggctgatgagactctccatgtggtgttgcttttttttttttttttcttgagatggagccttgctgtgttgcccaggctggagtgcagtggcgcgatcttggctcactgcaacctccacctcccgggttcaagcgatcctcctgcctcagccttagcttcccaagtagctgggattacaggcacccgccgccacgcccggctaatttttgtatttttagtagagatggggtttcaccatgttggccaggctggtcttgaactcctgacctcaggtgattcacctgccttggcctccaaaagtactgagattacaggtgtgaaccaccgcgcccagcctctccatatgtttgtttgtttgtttatttgtttgttttaataaacatcttatctcattgagatcataagtgtacacctgttgtctgttatttttcctcatgggttatgaagccaaacagaatcatgtaattgtatcaaaggccatgattttagtttttcacaaactttagcactttgacacataaagctattgtgctaataactccctaggtgaaattaaacaaggctgtcctgatcagcaagcagttctgttaaaaaagtatcaccaagctaatgttaatggtttggaaagaagcgttggtggatgtctaggccatgcagctctctgaggcaggttcagtctcaatttttagagagtgtgtagttcatttgagatgattaaagtctgaaaatatccttttgagtttaagtctaggaagtatttatcctggttctctcacacacatttttatataaaagtcattaagaatggcttggattttgtgtcttccttcaaggccaaatctacctattggctctactgccttctttgttcccatccactgtgatttctgccttttctaaattcctgttttaatccataccacagagtttagcacttaatttttaaaaggtacattggtttccagtaggaattactgttgggaacatttttcagttgctgaaagctctttttaaaacgaaaatttgttttgtttttgacaggggctgataacatccggaaatactggagccgctactaccaaggatctcaaggggtaatatttgtattagacagtgcctcttcagaggatgatttagaagctgctagaaatgagctgcactcagctcttcagcatccacagttatgcactttaccctttttaatattggccaatcatcaagacaagccagcagctcgctcagtacaagaggtatgtctcattagcatgacaactctttgtcttccttgcttgtacttttgctgccacgttggaacctggaaaaatgcatgtaattaggaatgtgctggttatgctgctttcaacatgaaaccttagttttcataggaagcagaaagcctatatcaatctgttagcacttgtttacatacctaaccctacttggagagcacagagttttctagctatttagcaatggttaaaagatgtttctggttatatttttcatctattttgaggggctaaaggcctggttatttaatgttgttttaacctgtggacttagttcattctcttcttcagcttttctaggaacatatcgtgagtatttccatgcattactcgccttcaggtgtcatgttcttgttcctctgaagtgttcaatgttgactaggattaatggatcctattctgtaatctgctaggctgaaaattgatgtcttgcaaattccatgccatcaaatacattttaacatggaaccaatgtttatcttcctcatttaattttatttcttagcttgtatctctcctataaaagcatgagactaattctaggcaaatagagtctcagccaatagagcttgtgattcatggtactgcagtaatgagatatgtgaatagtttttaaaacttaaattatagtgaattataacgtaagtacagtgaaatcaaaactcctgatgtattcctttatacttgtaactttcaggatatgatttcccctctccttcagaaaattgcatgcttcctcaagtgattttggaatgagatgattaatatgaacaatcttgcctttcagcctgaaaaataaatgaggagccaaggacataacatgttctaactccagacctccctcacacttagtgtgtgacccacggcagatagcctattcttgtgcctggcttctcacctctaaaatgagaataatccaatttattatgataagttaataggattaatttggataatttactttgaagtttaaacacctaagtagaagaaccatataaatagagtttttattcaaattttagaaacacagtttaaaaaaaagaaaggcaaggacccattattcaacagacagagctcatgtctcactttagttgcctcattcagcattaagtacgtagcaccttttaaagaatagagtttgaaaaataccttatagataatattaagtaattaagtaaaaaacagcaataaaaatctattcagaaagtcattaatgtgaagatcttcagcattataatgatggtgtctcctaatgtgcttttaagaccttagtttgtaaatcttttaacttctcagcatcagtttttctgcctatagagtagatataatagtatgtaatgaagggtagtttatgattataaggtcgtttgctgagaatgcattgttattcagctattcattctaaaaaatcttgtaatatgtatgtgtacactactacatgtagacagtataatgtgtgtatgtaatatatacataatacatatacacattgataaaacatagatataagtgccattttaacttcagataactttattcaagttatttgcaatatctgaaaaaagattttttctttctgcttttaaagttatgaacctgtgtatctgttttccttagacatcatataattgaaagtaatgtatctttaaacctaacatatgacttatggttaccctccataggaatgaaagatgatcacattgaataaaggaagcttttagcaattaattgcttctgagtattccttgtgtgtgttgactggctgtctttcctaggtaaagagcaaatatctttttccttctttttgtgattcatctttcagtaagactgatagttataaatgtagcgttgtcatagatatggtctgaaaatgattctaaacttgtgtatactggagcatatgtggctttgagtttcctttttatttgtatccattttaaatttacttttctcaaaacttttgcttgtaatggaatttgcataataccaatatggggactgctttaagtaaagcatttttccccataattaaataaacatataccatacaggtgcatgtctacactttagactgctttaatgggatacatgggctaattccattataagtcttgaagtttatggaagcacagtgacatggttatacttactttgggtctggcctaaaaagaaaaggatatatcctagatttttcccatttcttgatgacagagaagtttctctgtgtactgtattaaaatgccttgttgaaatgctctcaggaatgttttaagaattaaatcagtaccttattgttggcataaaaatggagttgtggaattgaatcttaaacattttgtaaacaataactttaaaatcgttgggagcaggcattggtattatagaagaggcagtagaagattgaaaagtgagcaaagtcatgtgttactagaaatgtatttagataacggtcgtctttttattctctctttcctaaaggtgttgcacatcctgtgccctattgctgataagcattcttactcatttgcacctgctaatttgtgtatgttttatggaatttaccaatgctaaaaagatggtattttaatctgcaaaatacttgtgaattttaggcaaaattctgatctgtcagaatcaaggaaggtgcattcaacttaccaaaaagcactaaactttgattcagttagaaaagataatcagtcataaaggctattgattcttcttctcactccattgaaattattacattttatgtttaatgcagaaaatgtgcaataatttatcctgtcactggagtgaaactgtacaaacacactattggttgatgagtgtgtctggatactgttgactttagaagtggggagaagccagtgaaattcaaaagagaaagtcaaattatcagtgggactccaaagagaataaaaatcataaggaagttgtatatgtagtcccctcccctactatgagtgttgctatgtttgtgtggagcactgaattaagaaatgaagacaatggttaaaattactatgtaacccacagagagagggcaacatgcccaattattttcttgccctttcaaaagcaagtgtagtcttgtacattacatattttttctttctgtaatatacctggtaatgacctgggtttaacttaccagaattttaagattttatgtcttgagagctgatagtgaaaacatgtatttttaaacaagcttaaaaaaacaacaacaacagcaaaactctaggaaaaagaacaccctttacatactgtctgaaagccaagcaattcttgcaacagatgtttgttgtattcactttggggaggtgaattccagaatttactcatatcaactatttttctctatagaaagcattcgagaaaaatttattattatgtcaagtggcccacttggtacattagggaaaattctgatctaatttaaatgataaagctataaaatgagagaaatcttaagggtaaataggttggtttctcatttgtattgaattgtaattgtaactaatttgttttacaactcccataggagagcatacttcagttctgaagttatttaatagatcaggagggttttatgagaagttaagttgatatagtagccaataaatgtaatcctattttccttctacacagttgctgattgtgattcttttacctcctggtttttaaaatcttattttcattttactggacattgtgtcttataaaagaacacgttttgttaacatgaaacagtctatattttctagcaatgtcatctgatttgatgtttgtctatatccttaatccaaaagtatttaactttttcagaaatagtatatcaaaagtacagtgttaagtatttgttgaatattttctattaaagcaaatactaattgagaaatatgaagactgtgaaacagagttttgaggcagaattataaggttgaatggctctatttgttccacggctcattaacacaggaaaatacagcttctaaattagggtgtcaacattaaagttaaaatttgtgatcaggccatttctcaatttttatgcaattttaattcagtttgttattatgacatgcatagaactttgtgttatgtttgaaaaacaagatataaatgcgagaaaagtatttgcaagtatttttgtaatgatataaacattactggttttttagaccatgttttattttggttataaatattcagatttttttgaacaatgcattcattactctgtgcatgaagagtttatttaattttcgctttttagtattagacatcttctggaagagggtgctagtgtgtttctatggtatttaactatcacatttaattataactacttatttataggtgattatttctaccttgtgtactttttttcctttctacaaaggatcagacagagttttgaaagactgaaattcttgggcaatctgtgtctctagataataaactatagtttaaattattttatatttatattgcttgataacagatcatttcttttttggtagctttatgaagtactgagtatcttctctgacttcatgtgacaaatcttttattaaaaaatgcaaagcagtgtttaaatcgtgtaaaatgcttagcttaatttaatactgctttctgtatgtgtagagaaatgtgtttgtaaaataatcattggaaagtgtcatatactctaaatcttaagagttttccaagtatcttgacctgcctcttggcagcattttagaatactgatttgatttcacatggagcagtgtacatacctatggtgtgagcagcttgaaaattcccctatgggacgtatacttattctaaaatggtatgagagatacaaactgtttttcgttcattccttacagatgcactgcacgctgttacaattaaatattgaggaaacaatgagagggtttggaagtcaattttccactgaatgactcagctatctcttgaaaatatttatcaagagaaataaatatttctgaattagcaatcatttcattaggtataagaatgtcattattttaagtgtattttgaagagcaacttttaagctgtaagtactaaaacagccagaatattttatttattatacattaattcatttatttctatatgcattctttgataaaattaattttgtatacctgattttcttgattctatgtctatccaccttgatctcactgttttttcctctgtatacctgtgtttcttgcatctaccaagcaatatgattaaagtgtgccttgtccaccaaaagcaaaatttccatgagcaaatacgttatataagaaatgtccattttatcaagcaaattatttaggtgagggtaataaagttatacatctcaatatatgtcaatgtatatacaaaaagtaatttattatgttctcttttaaaacccccattcctttccactatcttccttcagtcacatacatatcttcattttatgtaaagtgaacattttgaagcctttttcaattcgtactcttttttattctccacatctagacttttcacagtctcattctcccacttctgcctctgaagtgcttctcagagtttcctaatagtttacacccctagatctcctcttttctcactatttttcaacacagagcagaacaagcaaacttcctatcgaagtttcatgatacccatattttaaaaccttctaatattaataatcttttaatcccttctggaatcgaatgtaattccacagatcttctatgttaatgtgcatcggattcctttttcttcactcacttatgcttatgtaccactcactattcctaattcactaggaaaacccctgatgtagtttggctgtgcccctacctaaatctcaacttgaattgtatctcccagaattctcacgtgttgtgggagggagccaggaggaggcaattgaatcgtgggggccagtctttcctgtgctattctcgtggtagtaagtctcacaagatctgatggatttatcacggggttccgctttagccccttcttcatttttctcttgccaccaccatggaagaagtacctttcacctcccaccgtgattctgaggcctccccagccatgtggaactgtaagttcagttaaacctctctttcttcccagtcttgagtatgtctttatcatcagtgtaaaaatggactaatacaaccccctcaagatgatgtattacatcaggaagtagtcttgaatgcccatgccaaagttgggctctctcatctgatttcccttggcaacctgcgcttatccaaatcataatattagaatttcgcctataacttctctgtctactccttaaggttgtaagtttgttgaaggacaggaattacggcttgtttatgtctctgtggtcaataaacagtcaaccctccatatctgtgagttctgcattcatgtattcaaccaacaaccaattgaaaatattcagggaaaaacaccattctctgaattcaacacgtatagtctatttgtcaatattccctaaataatacagtataacaactatatacgtagcatttacattattaggtattataagtaatctagagatgatttaaagtatatgggaggatgtgcataggttatatgataatactcctccatttgatatcagggatttatgcgtctcagattttggtatccatgggagattctggaacccatcctcaaaagataccaagggataactgtattttgtttgaaagagtgactacctccgaatcttaccatacatcctttcttactgccttcataccatcaactttatccagatttccttactctctctttactcaagccaatgcatctatttttatccttgaatataaaaatttttattttcctgaaacaccaaacctgacctgttaatattgcttacaaaccacatcttcctcgaatcctcaccactctaaccatgttaatacatagttttaaaaagattcaacttgttaattatcgtatttacaaatgtttgattttatgtttctacatttgtgtttgtctatttgtggactttttttaacaccatatcagggtactattctctttccaaaatccctcatagaaattggctggacatcttggccaaatgatattcttttaatacattttaaaataattgcttatatttatcttatagaacttatgttgtttgctagcatcaaaatctatttttttcctgtttagatttatcacatagagactggtacataatgaagctctaagggaacataatgacatggttttaaagtgatgaattcaatttattaaaaacaaatgaggccgaggcaggcaaatcacttgaggtcaggagttcgagaccagcgtgaccaacatagtgaaactccgtctctactaaaagcagaaaaattagctgggcatggtggcgcgcccctgtagtcccagctacttgggaggctgaggcaggagaattgcttgaactcgggaggtggagactgcagtgagccaagatcacacaactgcattgtagcctgggtgacagagtgcggctctgtctcaaaaaacaaacaaataaaaaaatgtagccttttaattaataaaatcatttattacgtaagtgaaacttagaaggattttaaaaaattcttatatttaatactttgtatgcatatttaaatattttataatgaatcataactagtaaagttagagactgattttatccaaacaatattatttggctactttctaatctttttgaggtagtatgtatttgtgttgttgtagtggtgatcttcacactttagatctgtatgttaatattatattttataaaaattagcatttcattaatcctcattcaacaaaggcaatggctgatttgaggcaaaagtttaaggtaccctttccttgtcccttagttcctttcatttatttttttatttgcaaaagagaactcagtcactacacattccatagcttacaaagttaataaaacatttgtcgaggtaaattaatttgaaaatagagacatagttaatgtcagtaaggtactttgaagataaaaagcacaataagcgttagttattataattatgataattattatcattattattattacatagtgtctgctttaaaatacccttggttgctctgagatggctgagactaatgagaagggttaatctgttggattttatccagaactaaggatttgagacataatgcacaaatggtttactttttttcttaatggagcaagagatatatttgtttattccttcccctgaaaaaacagaaacaaaacttcctcttgattctgtaatgcagaagcattgtcactcattttgaatagtcttaatattttcttatataatctctacaaatatgtctgaggagcaaatacaggtcttcttaaaaggttctgaaaacatagccattgatttctacttcagtatctctgagttgtgtggagcttgaaattataatttttatatgttaaaaaagaatagggcataatatgggaagaaaatatgaaatcttagttcctattataaaaatgagaaatcatatctttgggaagttataaaaataactataactaattatataaattaaccccaataagaatatcttaaggaggagtctttagattattctttagagagaagacttcagcattaagcaaacttctttgcaaggtactgcaaatattggcatcacaagtcacagagatgaaggaaatattgaaacattttaacaggcgcatgtatgaaagtcaaatgtacccccagcctcataatcagtaaggcattagtgacatgtctgaagaagacattccctaatattattgcaaattaagtaataaaagacctcaagagaatgaaaagagaaaaggtgcctgaagccaatgaattacaattgacaacctaaaggcagttgaagaaccaattgctagagtgattgcaaagctattcataatgtgcagcagacagagcacaccagaaagctggaacaatgccttcagttcagcaatattgcttcaaaagaatggaaagaggggaacgggaagagccactgaccctgagaccaatttccaggcagctgcacaaactatatactgtaattaaaggttttgaccagtaatcacagcaaagccagactacagaagtctgggggaaccagcaatgttcataatgaggcagacatccttaacttaaagcatggaaaaaacaggtaagaaagctggtccatttctggcagtgactttgaaaagttctgctgcgttagcacaaatacgaaaatcacatatttttggccttgttcctctgagaacaaaaacatgtaataagagatacctgctttcatcttttgcaatgaatagaatactctcctacttagaaacaggctttttctccttgccactttattttttccttacctatgaattgcatgtgcctttgatgaaaacaatgaactggacatgtacaacggtacatgtaatagactgaatgcaacttagaagtggccactcttccagtgtacataggcttggaaatgaactaatccaaacctgagtaatttgtttatagtacctcctttcacttttgtttattggtatctacagtctctcattctttttctttaataatatctctttatatagaattttatattcagccatgactctattatttcaatagtcacattaccacttcgaggattgataccatgaaaaaaggttatctagtagttttgagtgaagatatgaggcacaccttcaataccaataagaaggtatactacaaaggtctaatgaagaaaaatatctcattttgaaggtagcacatagctttcaactgactgggcctgttatggtctttgctgtgtttgttatcacagtatctaatagtgaagtggtaattactttctttagtagaaattccaagatctaaattggtacacatataaatatttgacaacaaaaaaaaaatttacaagttttttactaggttacaaaggagaagagtcaagtagggtttaattttgttttatttaggcttatatcttaatatgttcaagtatctggattcagttgccctaaacacagtatacatagattgagttttagttcatgctacacctgacataagattatgggctataatgtttacatggtaactagctccataaaataactgggattgttttcataaatgagaagttaaaccaatggagccttatgggaagaaggttctacatatgaactgttaagtaatttagaagtcacatagaacaatataattttagcatgtagaatttgtaatatttattttttaatactggttatgactaattatttgtcaagccaaagcagttctttattgaaaggggccagagtggaaaatctgggtaacttgtgtacagtttagacaaggagaacaaagaaataatgcaatgaaaataagagcttgtcaggggaatccttagagaacagctggttgaagaattacagttgttaactgtgctatgaaagaaagatgctctctcatcaggcgttagcatatttcattgaagagaagactgaataatcattagagggatcctgaaaaataggccaaaaaagatcttgagatggaggtacaatgtatatgcacaaaacactattgttactactgttattattattattatgggaaagcaaatcactgtgtccagataaatgtcccgattttccaaaacatggcacaaattgtttagaaagaacactttctttcttgttatacataaagatttacattttactcagttttcatatagtttcatttaaagtggtatttattaggccagacatggtgactcacacctgtaatgccagcagtttaggaggccaaggcgggtggatcacatgaagccaggagtttgagacaagcctggccgacatggtgaaacccattctctactaaaatacaaaaattagccgggcgtggtggtgcacgcctgtaattccagctacttggaaggctgaggcatgagaattacttgaacccaggaggcagaggttgcagtgagccaagatctcatcactgcactccagtctaagtgacagagtgagactctgtctcaaaaaaaaaaacaaaacaaaaaataaaatagtattggtcaaatttattggagagttaagtgtaaatatttgaattatttaaatgtttaatatgtaaattatttaaatagacagccatgaatatggaaatacatgtttctgcatattttggataccaattttgcatattaactttgatgtttttctttaagtataagttgggacatttttctgttttcttaacactggctttttaatgacttatgttaataagcaaattaagtccattttttaagtgaaaaaatgagaatagattttaaggcaaagcatgaggtcatcaggtacttgagtaatgaatggcctgttactgttaatggaaatgtttttgagcactatagctatctttttttctttaccagagaagctccttgttttcttttcatattgttaaatcttttaaactaatacagttttaagctaatacagcacagttttctgctctagggaaatacaggcttctttaattattctgaatgttgtagtagcccttcaattatttagaacattagttctagcagtgtagatgcagaaaataattttgttgaagcaatgactgacttttaggtcctagacattgcttttttataaaacactcaatatgaatctgtaattttgtaatttcatctgttaaaaatggaatacaaaaattataattctttcattatttgtttttatttatactctagttagtcaaaattttgtcatatgtttctttagcctggtaaagccgaactgaaaaatatatgttatttaaagttgtatcatatttttaagatgttaaaggaagagttgtggctgtaatttgtgggtttactttcaccacaattatttttagaataacaactcttctctcactcattttgtttacaaatatgcatacatttgtaaagaattgtagttgagattgcttgatccatcctctgtcaattaagattgtatgactaactaaggttctatagaaaatgtatttctatcattttcatttggatccccatgtgatattacataatttttaaatcttcaatcttattttaataatcagcctgaatgattaataaagccatgtggtacaattttacaaaaaggtatacagtgaaaagtagttcacttttctagtcaagtgccctgttcagctctaatttacaattctcagtctgaaaccaggctgctttattactaaactttgaatgtcaaaaggttagaaatgccaacttaatgaattttctttagcaacaaaatgaaacatagactatatattaatatagtccgtatttgaattcattaaattccttcaaatttagtgattttcttaaagatggtacttctaaaacacttttaagaaaattaattttaatagtttaatctctaacttgttaccaaggtatgaatttttagcagtttactgagtcaaatgagggagaggacttagaggaaccatgtgcagtaatttcacaatttatttgtgattgcatgaggtaaacatctaagcagtcataccgtgtttattatgaaaaatttcaaacatataggtaagtatagaaaatatcagacaaacccatccaacccattacccgtgataaaatgttaacattttatcatgtttgtttcagatcttttctttaatgaaacaaatcatgaaagctgcatttaaagccccttcctttcccttcctcatcattttcccatcctttctccttcagaagcaagaaatatcttaaagttggtgtgtatctttcccagtgtacatttctatgctttgactacatatacatgtgtctctaaataatatatgataatggtttgtgtgataaaaatttatatgtgatgccttacagctttttaaaaaatgttctggtgttttctttatatttaagttctttctagattttttgtgattataaacagagctgttgataaatatctttgtacatgtctccttgtatatgcaagcatttctcaagtgaatacatgtaaaattgcagttacgggggggtcacaggatatacccaggtttaacttgatgaatatttaacttggcactttggtttggagatgacaaacagtaagactgggaagtcagaacttttggatttaaatccttctcactgttgaccatctaaattatattgggcaaaaacttaaaagtctgttttctcatctgtaaaatggggctaattctagaacctaccttgtagtgaatggtgaggattaaaggagggcatagcacatagagagtcttactcattattaacagttgctccctgctttcttccccctcctcctgacagggttgttttgagggttgaatgagttaatgttccataaggcaattatatcagtgtctggtatagagtaagtgtcatgggagtgctttttaaatacacaaaagtcaaacaaaaaatatttaatttagtcacaaaggaatatatttatattcctttgagggtacttaaagaataaattccaaatgtaaaaaagaaaatactgcaaagctataaagcccttacacaacccttacaacttttgctaggttaaattataagcagttaacttattttactttcattcatatatgtggtattgcgggcagaaatttttttttaatcattagccgataaaatgtacttttctctctagttatgaggaaaccaggaaaaccaaatcttttggtgattttcacttgtgaaatttgataccaagtcttgttctttaagatgttccagatatatcattctgccctcatttttaatatgtcaagtttgcggtactgttatattagtagtgttattttttcaaaaagtacaaatgcaaatatagaatgttgtactttgaatagcatagaagaaatgagggagatgattaaacaaggtataggcctacctgcatatctttgcagcctcaccaaaatccagaaatctgcctttttatagtatgtcacttgtgtgtgctcctaacgtgattgacagattgttgtttcccctctttgaaggctcaagaggttactcggattattttaaagcatattaaagtgtatgtcgcaccaactcttactctcagatttaaatagaatcttctcaagcattaaagatggattactttgtattacttttattgcttttcaagtgtttttggaaacatttaggagtcctccttaaaactggatttcctagaatgggttttctttgggggaaattttaaggattagttgtagactttccaaagtctgaagtttaacaaccaacaggacctgattaaaacaaattacttagttaaaaaatgaaaacagggcagaagaggaggaaaccccatcgtatctctgtattccttataataaatcagacctgtgtgtttttaacaaaaacgagggtgtgcttttttcccccttcattctcagtttcttttgatcattgatctgggtgaccccacgctcagggtttttttcttcatttgacatggacagatttttgaagtatagctctcctttgggaaccccgggcagttccacttgactaacctgtgatctaatgagcagtgatgcagggttacagtggccattttgtgtgctttgacggaggatggctagacagaaagtgggagaaaggcgatgtctgcggagaaaagagaagcagggggatcgaacggtgtgaaaaagacttgttagcccacattagtttgcctgatttacttcacaacaggtcagaaaaggccaacagcagggttgtcgttaaattgcagcattgaaaatcctggtattagaacgctttcagatctctgaaagctattaattccaaagttggttttcacttacctttgaattgcaggaaacagaggagcatccaactttcctcagtcttacagatatttatgaaataattatatgaccctagattcttttttaatgctacaggttttaaacatcctctcatggttggcctgttttacaaggaacttagatgtgaaagagaagccaaacccagcaaggtcgttgtacttttttatgccctatgttcgacccctaatgagatgcccatgctttccatttggaaatgctgtaggagtgtgtttgtgaatttatgtcctcataatgggaggtagctcttaaatttgtccctgcacatcagcactgatgtctgtgtgtgcatgtatacactttgtgtgctctccctgtagagtacaatcagaacgttaattggtcaaaccaaattaggttttaaagttcttccttcctccaccttaagcttaaatgagtatattttacatcttattcttcttttactccttttagatgaaaaagatggcttaccaaaaaataaccaagttctggtagcatgttaccaagcttaaatgttattataggaacctaaaagtgatctacttgaatgtaaaattttcttcatattcaaaagaattttggaatttatatactacaaactattttacagttattgatcacaattatgcttgtatttgactaccatttttgtaagactagccaattaaaagccatctcactatagaattaaataacatttggtagtgccagcttcttgattttagttaagatagagagagaatctaaaactttgtgtttgaagtaaaaatggaagcctaaacaaatggcagtgttattggctggttgtggcagacataagttttttgtttgtttgtttgttttttgagatggagtctcactctgtcaccaggctgtagtgcagtgatgtgatctcagctcactgcagcctccgcctcccagcttcaagcgattctcctgcctcagcctcccgagtagctgggactacaggtgtgtgccatcaaacccagttaattgttttctatttttagtacagacgaggtttcaccatgttggccaggatggtcttgatctcttgacctcatgagccactgtgcccggcctgtgttagacataagttactccatgggtagttgttgccttagagctataaaatatatgtaacttgttttctttgtgcagtaagggtgcccaggagatggactggctactcccatagtcttgattcaggtactctggctgtgttaagaataattttgttcaacaggataaagaattttgttcaacattaaatagaccaaatttaagccttacatagtaaccagtatgtgaagacttagctgtagaaaactgtcctgtttgtagataggcctgcctatctacaaattggcaaaagcaactttttcaaagatgagaaataccttggtttagaattttaagcatacttctgtgtttttaaaatgtcattattaggccgggcacggtggctcacacctgtaatcccagcacatgggaggccaaggtggatgaatcacttgaggtcaggagtttgagaccaacctggccaacatggtgaaaccccatctctactaaaaatacaaaaattagctgggtgtggtggcgggtgcctgtaattccagctactcaggaggctgaggcaggaaaatcacttgaacccaggagttggttgcagtgagccaagatggcaccactgcactccagcctgggtgacgggacaagacttggtttctaaaaaataaaaaatgaaatgaaatgaaatgtcattgctcatttaacaaaacaacttgtgttcattctcttcaaacaatattttttgcacacttattgtgtgccaccattgtgtaaggaggtacaaaaatgaataacagaatgacaggtacaaagattaataacctacatataacagataatcacaatatattatggtaaaagccactggaaatatgtaaagagtactaaggagtgcagaggaggaactgaaattaatatgaactaacatgaacagtggtaagtatgtttcacatacattgtatcaggcacttctcctgattgttctgggaaatgtggtattatctccttatccattttataaatgaaagacttaaggtccacaaaaatgaagtaataaattatgcaagatccaacttctaatactgacctaaacctgactctttggactttgtgtgatatgctctttcattctaccacaacaatctcctgtcattaaatttttttaaaaataacaaaaacattttattatttgatttttaaaatgtaatctaattttttttttttaactttgaagtcttgattcaagtttttttctctttggatgttttttttatgttttttgctacttggacaggccccagttgccattttgcagatgggccctttttacaaatgagctcaattgaaatgagagtaatatattgaagaaactaagccaagtgtgtttttatatatttgtgagacagagtggctattgtattctagtacttggggggagaaagcctgctgatttgggcttaacttactgtcctgtctatctttgttttcagaaacaacacaggactacattacagaactaatgacacctaaagccatttctgtaaacatccagcttcctccctaagctttcctggttgtaaccagcctttagcagctctcaacctccattcattcacgtgttttttcattcatcagtttaacaaacaagagatgagaagggaaaaggacagtagaaaagggtctttggggacaaagggaagagtttaagaaaaggcacggggctataaaacgtgtcatattctggtaattgttagccattctaaaaagaactataaattttctaaatatacatcttcctatgcataaacaggaaacaactattacagagtttaaaaggcggccttgtcattagatagtagttcctttttttaatacctcttattaaattcatgccctctgtgacccaggtaacatatgatggaggaaagatgaactgagattttagatcaactcatatgacctcaaagtggcagtgaattcctaaatccttttccctgtcctatgcaagcccactgcaggcccactgaaggacagaggcattagaaaatatatcttagttctcaaaagaatttcgagtcttgatttcacactgttttcttctttcattcatatagttgtgccacatctctatgtcagaagtagttgatattcaaagaaggctgctgatctaacttttagcaagtcggcaatatccattgggcaggtatctttgttttgattattgatgtatatataggtgcctagaacagctccttaaacatagtagatgctcataaatacttgtcagatgaacaaatttattcagtgcttatgatgggacaaacagtgcattgtgtcctggatgtagagtagtgagcaatacagacccaggcctggtcactgtacagcattccaagtgggtagttttcagaactgtttgctttatagcaaagtgatagtaattctcttttagaggtaggtaaaatgaatcatgtagataatggtaatgaattattattaaggtattatagcatatcttaaaatgctttattttattagggcatttaagagaaaatggtaatagttacttaaaatacatatatgaattatataccccagtgccttttttgttgctgttattttacctttgtgtagtctctatatcattactggttttttttttttgtgctatgttatatcttagttgggaatttccatgttttattcctaatcaaaaatctttaatattgttgttttaaaacagaattcatgtacttctgacaggatttaattagcaaaattattctttttttcctctgtattttaagaaattgaagtactattaggtattgggaaaatatggcaatttttaaggcaatccaaataaaagccatatgagactctacgtggtctggtctaggaagtcacaaatttggtgagtatcaaaatgaactggtatgacatttgctaagcaggtggtaaatgtcaaaaatttgtctactagcccaggatggcctatatgcctcaagtcttgagaaccactgtgtctctagggtaatcatctgaaatgcctttcatctgtttcccgagttgtttctcagactaaaccctgtatagaaaccttcactctgagaccacactgaaaacacatctgcacttaagaatgtggattttaaacactgtgtgtgttgcatgcacataaattatatttaagagaatctgtttttatagcagatccttgatattcatcaggatgcattctaaacttcccaccaatagcaaaatcacttgaatattgtatgataatggtatttaagtaagaaaagagtaaaagtcatttttgcacatttttcagaaatcactttcatatttaaaaagtttaataacccagatcagtcttttttcttttttttttttttaactttaaatgtttatattatacttaaattattaaattacctccagcattcaatctttgcaagaaatccaagtcagtcatttaatgggtagactatgtgcaggaagcatagtgttactggagactttcacacataccttctgtctttgcattatgagaatcagaacatccactaaaagcctagctctttattagggaaaggtagcaatcaaatagagcattgctgaatgtgtgccaaagtgagtgcagggagaatgagcaggctctgtcacatccttaccctggggccaaatgctgcccaagttttctcggttcatgtcaggccaggtttggggtgctttctttggtctttcagtgaccccagcaggatccagagaacaccctggcctaggcatttggctcaatgccaggacacctttcatgtttgagttgagctatggagaattcaccttagaacagagcaaactccctaggcaagacttctgtgagcactctacattcaacaatagacaccattctcagtgattaccaagaattcaattacacatccttctcaacagtgaagcactgcatctttaacatcaaagcatggctttgtgtttgttcatcactcatcctttatgaatacttcctttatatgtctgcatgtaaatgtgcctataatatatatgtgtatgggatgtaactatggaccaataaggctctttaaaagacaccccagaaatgtatgaatgccaccttcttctaagcacagagacttttaaaatttatgatatattgttttacaggaaaaaataaggtaagttaaaatgatataatttgggtcttcttttcctatttaaaatacatctaagtttgaaaattagtatcagtgtaggatttggcagaataaagatccgcctaaagatcctctggattggagttatctctgagatctggtcagagatatcttagaaacccagcccagtaagggagagagcagcctctcgaggcttggtgccctggtgatttcaggactagaggataggagaagacaaggagcaaatggatctaaacgctttaaggaataatgcaaagattaaaaggttaatagcccctatatccaggatcaccttgagtggttctctggttatttcagtggtctcctttgttccactgaaatggtcttctgggttctaccatatgagccatacaagaaaatctctattttttattttttgtttgcttttttaaaattaaaaaattgtacattccatgcttggtcattcatttcattaggaatttgtctaagaactataggtatgtgcttgtttcacccatccatttattcttatattcaatatggattgatggagcatctaattccataagcctggtaaataaaatgtactctttagaataaaacatctttcatcacctgagggtattgacaagaatatgccaaggattctaaagccagatgccagaagaattccaaaaagattgtggacatcacttggaataaatacatagcacagagcttcaccaggagactatatttgtacgtgtattttcaacctaaacattccggaacgaacgtgtatagattccatatcctggtgatggtggtggtggtggtggtgtgtgtgtgtgtgtgtgtgtgtgttttcaatttgagcagtctattaaccacatgtaagtagctagaggcaggagagggagaggaatgtgcggaaatgcatttgacttgggatgtctcattttccagaatccctgccaagggctggcaagcccagaaaggcagaggctggcaccattccctgccactctccgccctctatggtataccccatcagacgcctgttgtaggcgtgacctagattccctagctgatgcctgggaccagcagggcccattgcattttttttttttctgtgtttcctcatctcttcatctcaagtcttgctcagccattaagttaaagaaatgctccaaaggtctgtgccaaaatgtgtctgcccttgttcttagtggcacaagcccgactgtcagttgacaggtgggcacaccacctggggaacagttagcttcccataccagatggagttttactggtccaggagaaggcccacaactgggttgctggaacagatgctctgcagacagtctctggatctgttttcttcctcctccccatgccccacctttgcttactgcatatgagcagtgccctgtaggactgctacagactacagctctgtagcattataggagacttctaagctaaaatttctttaccgaccttatgtttgagtaacattctccagcccttcaaaacctgagaaataaagtctctgaaaacagagatatgtataactatggaatttgaatagtgaccttaaaaaacataggttatgaaaacatttatattagcatttgccaaaaggttgtttggctggtcttgggagtgttgacactttaattgcgtttctcgcctctcaatagcacaatttagattaaatctaattatggtagatggtagtacataaaagtagtaccttttagatttccaaagtgtggaagaaaaagattttccccatggtctgatatatattcttgttttattgcaaataattgaagaaaagtgaaagtagattcctctggttttcaacctagtacttaaaaattttagaggaaatttaatctggagaaactcttgttttttacataagaaaataccagtgttttcagtcattcctttcagccataaaacatctgtattgtgacaaatgactcatcaattttagtgaaaggagtctaatctcagccctaagcgtgatgtcttgttatagccccttgtggttgtgttgtgcatatttcttgctaagtagtgtttgtagaagtatgtgtactttcatttaaaagagagtcccatggcaagcttcttttccttagcattccaaggattttataattatccttttttatctttccttttcctatcctcctctctccctcctcctttccttctttccctttctttcctttcttccttcttccttttctgtgatatataaaaaatgtataatgtatggaacatgtgtatgtagtttaaagagtagtattagagcaaatggcaatgtctccactacccacattaagaaatagaaatagaaaactccctgtgctgtattattctctgagcccctcattttcatgcatcctctacctcccacctagaagtaaccactgccttgaattttgtgttgcctgtttctttttttttgcttttcaatacttctgccacccatatatacatctccaaataatatatgtaatagccatcttatatttttaactttatataaattgggaatcatgctaaatgcattcttctgtggtcttctatttttgttcattattattttgagattcatccatactcatctctgaggctatggtttattcgtctttattgctgtgtaatattccatcatattgagtgtatcacaattgatttattcattctactgttgatggacatttgggttggtttcattatttggacattacaaacactgatgctgtgaatgttaatgaatgtaacatttgtatatgtacaaccatttctcaatggtatgtacctaagaatagaaagagttatagggtatatgcatatccaaccttattaggtactaccaagaagtttcccagagtagataagaatttccatttgtttatatccttatcagtatatggtattatctgggttttaaaattttgcaaatctttgtgcataaagtgacattttctaattgttgctataaaatacaagaaatatacattcgtatgttggtttttgtagccagaaaacctagacttttaatccttttgattcatttgaatataatattaatacatgcctgcacatattaaattcattagcagatgaaaatttctttcatccttttcatgtcttattttgattactttttcttgtctacctacattgactggtatctcctggacaattttgaataggattggtgacagaaagtgttcctgacttcctctggcttacaaaaggagtgctttcaacatttttcctttaagtgtgatgttttctgtgggatatttacttatttaaatagataaatgcctttaatctcgtagtaggtaaaaaacttttttataaaagatatccttttctattgtgaagtgaattttattatgaatggatgaggaagtttatcaaatgcttttccataattatggggaggattatgtgatttttttcctattaatagtaactattaatgttgtaaattacctaaatttattatctaatattaaatcacccttgtatagtattagatgtgatggctacagaagaaatgtctgaaactctttacccttaattaacgtacagtctaattggagagacaaaacatgattaaagaaaagttaatagatgccacaagggtagattgtaattattttctgcattaatggggctttgagttcagttggcaaaaaccgttatggactgcagtgggctgagccagcttcctgaggcggggggtgctggagctgagactagaatacctgtttatctttttacagcactttgaatagcattactttgcattaccaagttacttctttttgagattctaacactgatttcaagtaatcattcatatgcgacaacactccatatgactgttgttcttcagtgagatttgttgcactttgtctgacaaaaccacctttaggatctactttgttcccagccaatattttgctgcagctcaatttgtaggtcattggtcccatcctgaatttgctgctacaaaattcacttccaaaatacttggacttttttattttaataaactacttgattgccaaggctaattagaaaagagagctacttaagtagaatttaatttaataaacattcatagaacacttacagtatgaaaaggactctgctaggcctccatgtaaacaacaaattatagctgccctcaggaagctttctgtctgctaggagtttatgcttcactagggctgtgctgcctagtgttgtccttggacacaaactgaggaaaatcctcattacttttcacattgagaatgggttttgccttggttgtttcatcaggttaatctacctctgaccaagctgagtaaatcattttcatgctaacagtgggcaaggatgggaaaatgcttgttttcaatggccaaatagatgatttttttttacagttttgttttaaagtactatgtgtacatactatgtgtctttgttctgtttaatttagtcttgcaggttttcttttactcgtttacttcacattttctgccatttcagtcacatacgtatagcccagttttgacaaccccatatgacctcttcagtcagcactgcatacttcacattcctttatcttaatttatacatatctttgtcctgacaattccccaattgtagaattaattgtttttttctcttggtctttttgtgttttgctctattatttgccccttctttatcaccttcccatatgctttctggaaacagtcatgctagttggcagtatatcttgctatcttaacaggaaaatttcaatggatagttcctaggatgcatcatatttttgtaactgtacaatcaatcagctaatatccaaaatacagtaccctggttatgcttattaatatttggagccgactgggcacagtggctcacgcctataatcccagcactttgcgaggccaaggcaggcagatcacttgaggtcaggagttcaagaccagtctggccaacatggtgaagcctcatctctactaaaaatacaaaaattagtcgggcatggtgtcatgtgactgtaatcctagctactcaggaggttgaggcaggagaatcacttgaacttaagagactcaaatatatatatatatttggagccatttagtttcatttttgtttcctgtagatgtagcagtgttactggcttcttccattgtctttgtgaaagcggtgaatgccaatggaaacgagtcacatgtttatattttaacagtcacatgtttatattttaaaagagtggaatatttgtggtaagtgcagttgtggcttaatacctctgctattccttttagctatccaaaccagaggtgctacttcctgaaagtggcagaattcaaagaatctaaccatgacatgcttttgatttttgttattaaggagatctagggctagaaattgctaaagtagcataataacatggcttagtatagaaaccaggagctgcagcccaagatctcggcagtaccatgtataggttatatgactctgagttctctcttttttttttgagatggagcctcgctctgtcgcccaggctggagtgcagtggcttgatctcagttcactgcaagctccgcctcccggattcacaccattctcatgcctgagcctcccgagtagctgggactacaggcacctgccaccacgcctggctaattttttagtagcgacggggtttcactgtgttagccaggatggtcttgatcccctgacctcgtgatccgcccaccttgacctctcaaagtgctgcgattacaggcgtgagccaccacgcccagtgactctgagttcttaaacaccttacttctgcttacccaggtttaacatgaaaatcatctattaattcagctttgaacattttttaaattattaaaaccatgaaaattatttagccataaagtatgtgttgactttgcatatataaattcctcgtctctcccatgtggcttcatgttttgtttatactactgttttcaaatcattaagtcaaccgcctagaggaacttgattccagtttttgtgaaaagcaaacccagagcctagaaaaatgaaggccaaattcattgtacgtatcattaggctagttgccttgttttttttaacccattctgatttcttttgcttctagtatagcggaccagtgtgtattttttggctatagcatgtatgtttcatagagtatttgttaggattaactaatagcaggtagaggaagggttaatattctcatttttccctcctattctatctggagagatcataaaatacattacagttagagtcaacaatcaccacttgaagaaatctcttcaacacaaagcctgataaaatttacatctggtaaatgtctatttaagctactgcgaaacacatatacttaaaaaaaaaaaaaggccttttcattgtctcaatgtcttgaaggctggagattgtaaagcacttccctaaagttcctatgagcaggatgaggctatttgcctttatagagctatagaactaataagcaattaaaggggattttgaaaaaagcctataacttccaaagtgataaactgtggaaatattcattggacctgtcccagattagctgaagtatccagatgctaaagcttatgtgtagaggccaagtacggtggctcatggctgtaatcccagcactttggaaggccgaggcgggcggatcacctgaggtcgggaggtcgagaccactctgaccaacatggagaaaccccgtctctactaaaaatacaaaattagccaggcgtggtggcgcatgcctgtaatctcagctactcaggaggctgaggcaggagaattgcttgaacccaggagagggaggttgcggtgagcctagatagcaccattgcactccagcctgggcaaaaagagtgaaacgccatctaaaaaaaaaaaaaagctcatgtgtggtgcctggagccatgggacgcttaggagagaatataggtatttcagtctgcctctcctgggacccatccacctcttctcttttcttctaagccgtggttaccacctatggcgctgaccattctcctagtgaaaacctgccaaagacaatggaagcaactacagtgttccagataccaagaatatctttattctgtatctaagagtacaagttagaaagtgttagcctaataaattttgcaataatttatatattgatagctgaagggaatttaaaaatattttatgtacaattgccagatgttttaaaccaatactaataaaaatatttgtggggaaatacccatgtttcctccctaattcatcaccaactggcaattttagtctgtacgttcagtgacatgaagccactgattatatatttgggagtcacagctatgtcacactgcaacaaaaatttctaaaaaaacttattctcaatttctgcatttattacattttgtcctcggataatattttgatttgctatttcaaattgctttgctgtaaactatagcaaaggagaaggaaatgaggtcattgggagtaaaataaaggactaataaataaaataaatagacttataagacctgttaaatactgtcaagtaaagccaaagattgttctgtagtatcttttgattcacagtagtttgctaagcattctgaagctcacagggttaaacaattcatttattcttattgtcattgtttccctgttctgtacagaaaagacatggtagcagtgtcatttcagttcacctaaagggaatgactgcagccttacgcaaaatgtagtatccaagatatatttgttctataatttcagtgaagtggattctcaaatttcacggttgtttttattaaaatctgtgtatacatatactcagacattagccaaagccataatatctgaaccataaaacagcctcactaaggattcataaatatggcctctcccgcccaatcattttcatatcatgtttgtccctttagtaggttccaagatgatgtttttcaactcccattacaccctaagaatttgcttggatgagtgaaatcagttgcagtttttttcgccagaacatggtgccacacccttggcaggtaggcaatgttgtcttcatatgtttgcagaattactgaacattagcactttgtcctccagagaatacccaaccctacccctcagctttcagtgcactaatgccacagacaaatctggctctggaggggagatggcaatgtgaaggctccccacaactttgtgcatctgggggtcgtacaaaaacaatggcagtcttacagcttctcccagggagatgtcgaggggcagcgttgaggagaaagggtagacagagtgattgttctttctgttgtgctttttcccttaaaaatgaataaatttagatcactttaagttacagtctctcttttttttttttttgaagagtcagtaccactgtagtggccccaaaagtatcctactcctccacccctctgggagtctccagatctctaagactagatgagcccaagaatagtcttaccccacccagccactctatcaggaaccatctgtggactgagaatccgctcctattctgaagcatacggtgtcctgaaaggccttctagaccccttctgggtttggttacacaggctgagagtgccaagcccactggctaaggctaattgtacaagagcactccaacggcctgcagtgcccctgcccttcacccctagcctggctaatgtccagtggtcctcctggaagacttcctggtttcctctgagatgagactcctcccaaagactgggcgactcagccccttggttcccatggcaccctggctatggaataaacgctggcagtgtggggattactacccccatatagatcattcagtcatcttcttttctgtatgattaattctccagccccctccctactccatttaattttagcatatgtatgataaatcttcattgaataatgaacaactcatcagtgataaaccttttctgaggtattgttgtcctttgaaacaaaaactcccagattaaatggtactcaaaacttattagatattttgcagaactcacagttctacattattatagtcatgtattatagttatcgatttactttaggaagtttgagttgtaagtttgacagctcagagaaccaacatttacatctattattaataaagacaggtgctgcactgataatatagttaatgtattcctaaaagaacctaaatgaggagaaaatgacattttctctttgattttagttaattggtgatattttctcatgaaaaaacttttgacccaaagcaacagtatatatcacatttaagtatattcagattcatttcattgtcaatgtccagccaaagcacatttaattcttgcgcaaccatccctgcaataagttaatcaaatgagcactcaatccctattgcatagaatatttaagagaaacacttaaaaattaaagtgtaccattgcatcaatttcagttgcattagaagttctccttagttccattagcctcaattgtttaaatagccacagtggtactatgtatttgctacacactcaacagaatatatgagcttttctctttcctttattcttcttttttaattggaaggcactgctcatgaaatacaattctttgatttgttctctagacagtagaaagacgtcatggttatttcttccttggtaaattaagccccattgtcaaacataactagtgagaaaaataaatgcattgtgtgaaatcctaacctttaaacataccacatttgcttacatatttttctttctgtttcccttatttttactctaaaatatgaagattcgtaggcctcatctgtcttttcatttttcccatattttcaacaaaggtagccactcctccagagtcagaaataaaatgataaaattagttcaaatctaggtcttttactatgcccaattcttcagcagcctctatttccttaatataccatttaatggaaaaatttgacaaatttgcatataatcaaaaggtgattttgcatctaattttcccccctctaaatatgaggcttgagaaggaaaaagtaaggccttagctgaagcttcatcttccttctgagcattaaaggtgcaagagcaatatacactcagaaacaaagaggagaaaaacacagaaaaaaaggagagccaaggggctggtgtgagggcttcttcctattttatcttggtaggagttgattagattatgtgtctttagtgtatctctggaagatagaacatattcaacttgcagtcacaagagatactttttcatgatgataatttaaaatgttaccaggattttttccttccaaatgtgagtatctgtctatacacacacgtatgtatatgtagtttttgaaagggtaaaacttctaaaaccacagcgaatattatggtggttaaaaaaaagtcaacctataaggagaaaaatcataaaaagttaaaattccctttgaaaatattttagaactttcatgctgtagttttctttccaacagtggagcattctcctatttctcctgttatgcacaagatgtagtatttgatttgcattcaagggtcaggatgaaaaagaatactcgtttttaaatactagaatcacacactgtagtggaagtgttctcatcatgagaagccccagagaactgagacccattagggggatttgtatttgtctccctccctcctttccttctttccttccttcctttcttttttttttgttacccaggctggaatgcagtggctcagtcttggctcactacaacctccgcctcctgggttcaagcagttctcgtgccttagcctcccgagtagctgggattacaggtgcccgccatcactcccggctaattttgtatttttagtagagacggggtttcgctatgttggccagactggtctcaaactcctgatttcaagtggtctgcccaccttgacctaccaaagtgctgggattacaggcatgagccaccatacctagcctgttttcatactgctataaagaactgcctaagactgggtaatttataaaggaaagaggtttaattgactcacagtgcagcatagttggggaggcctcaggaaacttacatttatggcagaaggcgaagaggaagcaaggcaccttcttcacaaggcagcaggaaggggaagtgctgaacaaagggggaaaagcaatttataataccatcagatctcatgggaactcactattaccagaagagcatgggggaaaccaccttcatgatctagttaactgcacctggtctctcccttgacatgtggggattatggggattacaattcaagataagacttgggtggggacacaaagcctaaacataccaggattcatgtcttccatcttcagaacataaattcagatggagcggtggtaagggactgtttcagttctttctttctcaagtttaatatgcttatgatacaattccatcattagtagagtacccatggaaggagttatttcaaacaaatagattgaatacttttaactgctttgttaaaagttttcaaactaaggctaaatgggcatcacacaataaccaataacttgacacaaaaatcctttatataacgcatactttcatgaatgacataggacataatttttgatttaagttatggaccaacttgtgcccttcccccagttcatatgttgaagtcctaacacccaacatgactatatttggagatagggtttttaggaagtaaattaaggctaaatgaggtcataagggtaagatcctcatttgatagggttgatggccttaagaggaagaaggagtgaaagagctctctttttccctacgtgaagacacagctaggaagtggccatctgcatgccaggagaggtctcaccagaaactgaccatttggcgtcttgatcgtggacttcctggaaaactaagatgcttatagacttgaaatttagaaaacgttcaggtccccatcttcttctgatgaatgaagagaattgtcctcactcctctgttgtgacatttaaaggacagggggagtttcagagcactcagctgaatttgctgtgatgaatagacatctcagggtttttttgtactccctgtttgatatttatattttatgaattttgaactactttgaatatgaatattattagaaatttattaacgctcaaatagttggttttaacatgtttctattattatttcagatgaagttaaaatctaaaaacacaaaacgttaggcctttttcttcttggggacgatggggtttttcttggggatgatgagaacatgatacaagcaaaaatgattttatagccatacctaaatgcttatgtaaaaaataatttactggctgaaattgtccatccccaaaggcatctttgaagaaattatgcataaaaatgaaaagcttgaaaaagtaacttgaataccatatcatttgtaaccagcagcactgaatgaattatgtgcgtagcagcgatgtcttttgtttctgtctctaatcctttcaactcttcacctctctctagtgcaatatttaaaaattgttagtcttcaaaagtattcctatctaacagaatacccaaagctgtttcaactttagaattcctatgtcctgtgttttattgaaagtgattacacttccttggaagtacatggtgattcacatatacctaatatagggccttgttcatagaaagtgctcatagcattcatagaaggtcatttcctaaaggactaaatgattaaattaatatacatctgtgtctgtgtgtgtgtgtgtgtgtgtgtgtgtgtgtgtgtgtgtgtgtgtgtgtgacggagtctcactcttgtcaccgaggctggagtgcaatggcatgatctcagctcactgcaacctccgcctcccgggttcaagtgattctctggccccagcctcctgagtggctggtattacaggcatgtgccaccaggcctggctattttttgtatttttagtagagatggggtttcaccatgttggccaggctggtctggaactcctgaccgctggtgatttgcacacctcagcttcccaaagtgctgggattacaggcgtgagccaccatgcctggccttaatatgcatctttaaatttgtttttattttgaatttttggtgttctaatacagtttacatcactgcctgtactcactgcccaattttctacaggtatctatctatcttgttcatttgaaaatagcatttagaaagggaaatgatagaattttttttctcatcaatatatcttaattttcctatacttgaaaataagagggattattcaaaatcagtttcagaaaatgttgacattgtgtaggtttgcaagtgaaaagaaggcaatggaattttgcattagcacttaatattgggccctatttgcttgttacttgtttctgttaagatccatggttatatccaattttctttcaattctttactctgtggttattgggttgggtgattttgattctgttcaacaactggatgctttgagtaatgaacttcagtgcataattatccagcgaaatcatagcaaagggatgagatgacaaaaagccaacttattttcaggaactaaaaataatggtataatataggaattaatacatgtatgactattccagcatctgactttattctgatcatttatttttatataaattgtaatttaaaattgtaaaattttaaatacttgctattaatctgtaaatatcgtttactttttaaaaataacagtaaattaaatctgatgttttagtgaaatgcacaaaccactgaattcttttgaattaaataaggtattgatagtaattcatttaaataattatttcccccttttatcactttagttaagcgatactttactactaaaacaagcatgttatttataatagcacttaattgtaataaaatttaatgattattttaagctgatttttatgctatcaaggtttagtaggatagtgagttagcttatatgtgattatttttatttatgatttaatattttgcatctattaagatgtttttggtagttgagaatgatgctcataattgttttgtttaggaaatgttcagtcaatgttactttagcgagaatagtcattttagctattaatgttagggaggtcagaaattttggaggatactcctgtcttatgccatcccatgaagtaaggatagagtcagggttgaatatttgccatgggccaatgcttttaaaactaatgtgtggagtactagtatgccttctcatatgtgtctaaatagaaatttaaaataaaatttaccccgaaggagttactgagcttcctgtgtgtatcatttagtgacttgaaggttttgtgtgtggtcgttcgtgttgtttcttcactcatatggtgttggacaatgaattatatacagagagtgtggtactgctactgtctgacttgtcctgggttctacactttgcttttattcagaccagcctgtggagtaagcacaacgtatatcctaagcaaaagctattctgagggttttcagttgattacaatgtaagcatacttaggagcagatgagattcagtaatgagaaaaccccatcaatttgggtgttaggaataactcattgtgcttgctttttgttaaacttaagagcatattataagtaatagacaaattaaattcaattcagaagactcttgtggggacagttcctttaaatactggaaatgctgttatttgaaagaaataattactttagaatttacttaaatttattgtaatcaaattagcataactcaagaaagacattgtcatcacacatctttcccataacgctttattaattacatatttccaaaggaatggcgtcttaaggtcccagaatccaccagagtgttcacaaaaacattgtaaaatatcccttgaaaggtagttaaaaatcaggtcatgttagagctgccttacatacctaccctttcctgagaaaacctcacatctttgccaaatgacagacagcttacctggattaaggttcacaacttaaaatagaatattagaaaaagagactgacgcgacttacctattattaaggctagctgttgttgtacacactccagattttatgtgtgcatgttaattaagtaatgagaaccccagggcaacatttagtatacatgtttgaacatttttccccttagaacagtgagcatcatgtttccccgtataatggctgacatagacaaccaaattccttcagaccttttcaacacttgtttggaaggtagattgcttccttttgagttctttacatttatggctcagtgtctgcgttcatttttctgggggaatgcttccataaatttcatagccactgctataatctctctagtgattaatctctgaaaagtttaatgaactgtctaaagagggtgattttctacttgggcctggtaagacactttttacgttgcttctctggagccatgttttccgtgttattttcatgatattcctaccacattcattttctttctttgagtagtagatatccttaaataaacatcacagtttgagaagatatcatccttcatcctgttgcattccagccaaaaggaggtcagagtttgaagaacttgagtaaatgaatgacaatatgttaacaggcataagaaaaatttaacggtactcttaatttctccctgttaagtcttcatttatgatgatgaagcacaactaaacatctttggggttacttgaaacatcctgcgtagcatagaagatgttctcataagggaagctaataagaagtcaccactccttcagcaactgctaagaggaagaatttgcttcagacagattatgtggcaactgcagtggtccagtggttggaggcctcttgatgagcacaggagcctttttaggaattaacgctgatgtcttcctccatggatgttttctacatagtttgggggattaaaaaaaaaagcactcctacattggactctattaacactatgaattttatttttcatttagtttcatcttttaagtgttgtaattatatacctccacaatctattagaacgtagtaccattgtaacgagatgtcagctaaaaatgtaagttttggccttgagaaggtgatttttttacaggattcttacttgtgatttaattctgcagtgaagaatactttctcaaagagtttgtatatgttctttgtcactatttcaaatagtttatcagaaaggatttaatattgacgtatattatgatatgaatccataatttttcatcaaattactgctatactatcctgatttctctttttttttctttttctttttttttttcttgagacggagtctcgctctgtcgcccaggctggagtgcagtggcgcgatctcagctcactgcaagctccgcctcctgggttcacgccattctcctgcctcagcctcccgaatacctggaactacaggcgcctgccaccatgcacagctaattttttttttcatgtttttagtagagatggggtttcactgtattagccaggatggtctcgatctcctgacctcgtgatccacccgccttggcctcccaaagcgctgggattacagccgtgagccaccgcgcctggcctatattatcctgatttcttagtttgctattgagtgtctgccaagcattgtgctgggtactcatttaatcgttgtaccaactctgtggtgcgtgtgtatgtattatttacacatgcacacacacttattcagatacataatttattatgaatagatataaggtagtataatgggttaaaagacaaactgcagagtcagtgtataaatccaggtctttctaattctagatcttatcctcttacctagtccgtactcttcattttaccacatttaatatggtacttattaagggtataacttaaatacaagattaaattactacaattttaaaactccacatgaactatatgactgggtgcagtggcccacacctgtaatcccagcactttgggaagccaaggtgggcagattacctgaggccaggagttcgagaccagcctggccaacatgccaaaaccccatctctactaaaaatacaaaaattagccaggtgtggtggtgcacacctgtggtcccagctactcagaaggctgaggcatgagaatcacttgaacccaggaggcggaggaggtggaggttgcagtgagccaagatcgtggcactgactccagcctggggaacaaagtgagaccttatctcaaaaaaaaaaaggaatatatattattaacccaaagactgttttgttctagcttctgtttttgcttttcgcctttggctgccttgtgaataaaatcttaaatgaccgtgatagaaaaattatgtaaagtagtattcactaaaactttacttctgtaattcaatatgaagaagcttcacgtctacctggggaaagtatatcagttttctcaagcctaccttgtttgtctagtgacaataacagattcctagggttggaagaaccccctatatttattgtcctgaacttggcaaagatcatgaacattcatttaaccatctaaattataaattatcttataatagcttctttgggccaggagactttaacttatttaaagtaatacagtataatgataggccaggactttttttttttttttttttcctgtattctgtactaagaatcattctgtcagatctgctttgggtttttctgtgagtgtttctcttaatttatatttctagagtttttgtgtcttgtggggatataaaattcctcaggagtgtaaggagtaaaagactaaagaacattaatagtgtgtgaagattgctaccactgagacctggggaagtgaaatatgggcaaatggactcatttaatttaaaattctttttactcttttaccttcttatatgtgtcttttatttgagcatttttaatgtgatataacttaaaaattaagcttcagagtcaaatagaaaatatcaaaattaagaaggaaatagatgtatttttcactctgcctctaatactattaaagtaaaatctctctgacttgaataatagaaactgacagttctgaaaacatgtgccttttcttaataacacaggcaattgtcttttatttatttcatcagggaaagacacttaagctcacatagatttcaatagctttatgcatcaaactttacaaaagcagaaaagcagataaaaattaaaagttaaatatcttttcctcttaggatcttatcttctttattcttcttccttcttctcagttgtttattagcttactcttggatttacaacattttattgacaatctgtggtttgtggactttattagtcccagtctgtcactttaagaaggagaaaaggaacagaaatgattatagccactatttttggatgtattgtaggttttaggcatttagttctcacagccacactgtgaagtaggtgcttcataatcatcctccttctttagatgaggctcagtttgtaagcagtggacctggtgtttgaataccaatctgtatgatttagagacacaggatttcccaccacccacaccatttgaacatgttataatccagatctggtatatagtaaagatgctagtcaacagtaaaattaccaaatgggtgagctagaagaaagactgacacagagtgaatattcagctatcactctgtaaataaaatagttccactctggtttttctctgctgccagcacaaatgagactggaaggcaacacctggaatgacgggaccccacccagtctccatgacatatcttggcattcccactgaagctgttaagaagcttggaatgctagaaaaactaggaagcagcataatagtcaagaggagttttgtgcttacaggtactgctacattcccacctggctgctgcccatacatcccattgtaaagtttcttgttactgctagtttgagagccaccttcgtgtctcttggcttttcttttaatcaaggggactagaagtaggaaaacatttctttggggcttaaatgatgtcagtaattggcaatggaaaaaaggaaacttaatctgagctgatcacagagacactggtcttttccttttataaggagacaccactagactatttccatttgctttccccagagtgttatattgtttactactccatgtaagccagccatatctttaaatgaaagcattttctaaccaacttctgaagtgaaatggtaacaatctcacttgaaacctatatgtcagtacatcccacaacacatgagtttgtttcagactttgagtcctcttatatatgtggtgagaagttcaaaattaccccttatttatacagcctttggcagtttgggcaatgtgttttgtcacctgtttgctgtcttacgaagagctggaaagtttatgaagaaatagaaaatatgactttgagcccttgacattttaaaataaatgtacatattgttagtgacagattgctaaacttggctttagacacttagctatgtttcttgccaaaagtaatccagatgtgcataatttatccgactgccatatgtgcactgacatgtcgttctataatcaactgttcagtatggttacagttatatgttcttttttatcaacaatcttttgaaatatcactgacttgataacttattttaagttttaacaacttctcaaaaagtaatgcataaccaatttggctttaaacctgagtgaccagacatgttgagtgtctagaaaagacattgacaatccacattccctgagggccatatgtatttcaagggggaaaatctaggataccatcttcagcgtgattctattttgatgagtgtcttaggggtatagaatagaaggtgtacccaattaaattttgttgaaacaaaaacaaagtaaagtctctaaccaagtaatttgttttggaaagggagtgggaaaaggaaattttgatacatatgaaataaatatgtggaaagaggatatttcattttttccctaatgcagtatcttctgtgttgtgtgcaggcaatgcttgtgacattcacatggggtatggcactgtgctgattcccaagctttatctttttgtttaagaaaggcatttttttccctagagaatttgagagaatgtatgtatgataggaaatattgcttgtctattaccatttcttaaattgatacttaaatatctcggagacatttagaccacatgatgatagcatttgtaccagcgctgagagatagttaccttgaaactatgtccttgttttttgtgcttagtgacactgagccaccatcaagtctagacaggggtattgccaaccatgtgtgtccttgtttgtgtttatccacagctgcaattaggtttttcacactgtccccatctgtggaggctagctgtgcagtgaccttggccagttcaaaatctgttcaaccaagcccgtgtgtggagagaactgggagtacagatggtaggactgatgatggggaactgttttgttagtgatcgtggctgatagtaaccaacctgtcttgtacacagtatgatttttaaagacatatcctaaaacctcttatagtaaaacaaaaattggcccagtgtcagtgcaaatgtcctgaaaacaataagagtgatacagtggcaggtttgtgggtgtgggatgtctatttcattattattattatagtcaatgtgtagctcttattttctttttttttcttttttttttttttttctttttttgagacggagtctcgctctgtcaccaggctggcgtgcagtggtgcaatcttggctcactgcaacctccacctcccaggttcaagcaattcttctgcctcagccttccgagtagctgggactacaggcgcccagcaccatgcctggctaatttttttgtatcttttagtagagacggggtttcaccgtgttagccaggatggtctcgatctcctgacctcgtaatctgcccacctcagcctcccaaagtgctgggattacaggcgtgagccaccgcgcctggccggtagctcttattttctaatcagcttccactttccctgacacagttcagtaggaggttctgaacattaatgtaccaaaaagtgcttctgaacaatagtgtaccaaaaattcctttgagacttccaggtttcctacttgaatgcagaggttgggtctggctttgcgggggggggggggggaaaggcggtggaagagagagagcatctatacttgaaaaaaaaatctgatttagactgaactgtaactgttatttatcttgcctgtgattacctgtcactttgaaatcttatgggagtgatttgctcttctcctttgaaatttgagatgttcaatgtgtatattttcaggcttctcatcattttttctaattaaaaacatttatttattggtatatctaaagataccattttaagcagacatgcacacataatcatacttagtccacttgctgttgctataattgaatacctgagactgggtaatttataaacaaaagaaatgtatttctttttttttttttgagacagggtctcacgttgtcatctaggctagagtgcagcggcacgaacatggctcactgcagccctgacctccctgcctcaagagatccttgcacctcagcctcccaagtagcagggactgcaggcatgtgccaccacccctggctaatttttgtgttttttcatagagacagaatttcaccatgttgcccaggctggtctcgaattcctgagctcaggagatcctccctctttggcctcccaaagcgctgggattacagacatgagccattgcacctggccaagaaaagaaatgtatttctttttctttttttttcctttgagacaaagtctcaatctgtcacccaagctagattgcagtggctctgtgatctaggctcactgcaacctccacctcctgggttcatgtgattctcgtacctcagcctcccaagtagctgggactacaggtgctcgccaccacactcagccaatatttttttgtatttttagtatatacagggtttcaccatgttggccaggctggtgttgatctcctgacctcaggtgatctacccacctcagcctcccaaagtgctggaattacaggtatgaggcaccagacccaaccaagaaatgtatttcttatagtcctggaggctgggaagcccaaggtggaggagccacatctggtgagggccttttgctggtggggactctttacagagtcccgaggtgacccagggcatcacatggcaagggggctgaactgagagccaaaccaacttttttttttttgagacggagtctcgctctgtcgcccaggctggggtgcagtggcgcgatctcggctcactgcaagctccaccttccaggttcacaccattctcctgcctcagcctcccaagtagctgggactacaggcgcccggcaccacgcccggctaattttttgtatttttagtagagatggggtttcaccgtgttagccaggatggtcttgatctcctgacttcaggtgatccacccgcctcggcctcccaaagtgctgggattactggcgtgagccaccgcacctggcccaaaccaacttttataacagaccccttcccttgataactaaaccactcccatgataatccattaatctatgaatgggctactccattcataagggcaaaacccttcatgaccaaacacctcttaaaagccctccagccaggtgtggtggctcacgcctgtaatcccagcactttgggaggccgaggtgggtggatctcttgaggtcaggatttcgagaacagcctggccaaggtggtgaaaccctgtctccactaaaagtacaaaaaattagctagatgtggtggtgaatgcctgtaatttcagctactcgggagacggaggcaggagaattgcttgaatccaggaggcaggagaattgcttgaatccaggaggcagaggttgcagtgagccgagattgcgccactgtactccagcgtgggtgactgagtgaaactccgtctcagaaaaaataaaaaataaaaaaaagtcttccctatcttttaatgctgttatatttgggattaagttttggttttttcgtggttttttttttttttttttttttttttgagacgttttgctgttgtcacccaggctggcgtgatctggactcactgcaacctccacctcccaggttcaagtgattctcctgcctaagcctcccgagtagctgggactacagacactcgccatcactcccagctaatttttgtatttttagtagagacggggtttcgccatgttggccaggctggtctccaactcctgacctgaggtgatccaccctccttggcctgccaaagtgctaggattataggcgtgagccactgagcccagccaggattaagttttaacatgagttttggaggggacaaagattcaaaccatagtacatacaattatgttttagaagaattattactattatcatcattattaccctcatcatccatatttgtttggcttcacttcattaattttgaattaatgaaaatgttccagatttctggatttatccaaatatttaaaaaaatatattttcactttcagtaattttagaatgtcgcattgaagaagtcccatgattctttaaaaatttatatgttaatataacattttgaaaatgacaatacaattaacagcaaacatttgttaagcatgtgtatcgtattaggtactattctgctttgcatagctctcaactggcattattaagttacctaaagtcaggtagctaggaaatggcagagctgagctaagaagtcaagcagtgaagtgagctccagaactcattttcctaattacgctgccatttggtcttcaacaaataaaaccaatattaacatattgtacttactaagagcctgttcagggtatcattacattgagatggcatgaccctgataagcatttcaattttttgtacttggaaaattccaattaggataaatttactgcagaatctcttgtctgctttgttttggctaattctccagtctgacaatttgctgcctattaataggatttatctcacctcttttatctgttggtcactctacaggactgggatctctttcactagggttatgtcatacagtctttcattcttccaacaaattataagttagagataaagaaacagaaaagagattcagttcttccccctcaaaaagttcacctagattggtccaaatggttgtggtcgattttccataaatgttggatacgttgactttctagagactatttctgaggtctctgcagttgtccatatcagtttcttgaattgtgctttctgttccttggtgctggtgcaatagaacccactgattgggtcttacttagcttctaaaacttctttgttctgctttgttttgtcttaattcacagtcttctcattccacactctgccttcactctcattttctctatagtctgttaaaatgggaagaagatagtttggagtgagccatcctcagttcaaatcatggctctacgacttttaaattatgagactgtaggcaagttcttggaaccattattttcttatcctccagctctttattgaagattaaatcagagaacaaagtgtcaagacatggtctctgtctttgaagtgctgacactttagtgggagagatagacctacaaacaaataattaaaacagcagtgataagtatcataaaggtggtgtgtgtgacatgctataaaaacttacaggtgagtagtaagtttttggtgagtgaatgaatgtgtgagtgaaacttaggagaaagggaactgaaatatgacttcttgtcaagagatttggcacaactctggatagcacatggtatgattttataaatgttcattcattcacctaacatttattgagtgctcactacgtgccaggcaatgtgctgtttactggagattaccaagacgatggttcatgctgagaggaaaaaactaaattgttcattgctctggctatattcagtaaaagagcacttgcgttttctctggtcaaatgatgtagcacaagcatttcatagactgtgattaggccttccttatagcatcaataaacctatttaaataggttcttcctgtacatatttttattctgaaatcccctttttgatgtaactgaataaatgaagaaaaagatgagtatatacacagctttcagatttcctttctttcatgcctgcaagcatggcatatatacttactcttgtgaaatctttaatcaggtaatctgttagtacaaatagttaagctcacaaaatgagtagtttttacacagaatttatacaagtgtaagttttaagcttctgttttttatcataatgatgcagatactgaaaaaaattgtcagaaaaatctctcttcccatctcttcctaaatgcagtgtaaatagcagcatatattgtcaatctcagtaataataacacccgtgtgaagcactacttgctcaaaggagtgagaaaaaatattttgatgtttagcaaatgctatcccaacagtgaaaggagtgccaatttcctgttagatgttgaatcagtcattccaatggcaagtagtgattgaggaaacacggccaaattttaatctatgtataattgcatatatccttttcagatgtcgtttttagtgaatctaagaagtacttagaaggaatttgctactatattaagggaccctcttgtattacccagcacctacccccatatataaaataaccttctatgttggcgattatgctttagtttctgttacttttttagtaataatttttttatattttttaatttagtttcttgtatagtaagacaatttaacattatcgaatgtggaaagtagaggaggaaatttgtaacaccattaccctattataagatttcttaatctcagcaggttgggaagtagttttatgcgttgtaggatgtttagaagcatccctggcctcagtccactagatgccagtagtacctcctgagttgtgaccatcaaaagtatctcccaatgttaccaaatgtcccctgaggatcaaagtccccaccccacctgctcatttttgagttgcctttattcaaagatattatcaattttgaatgtccctgtcagtcttctttcatgatatatagatccttttacagagctgtagtaagtgtatggatagtgttgtattctgattgttcatgctatataacatctaagcattttctgctgttaactaggtatcagatttagcacttttatattaattctctattgaattttttatgaaaacatggcaaatggcctccttatgagtatactttttctagtttacatttttgcttttcatatatgcactatgtcgctcgtgaattcttttcctaccttttctgttggcaaatgggggcttaggcctttctagttccatgtggtctctagtataggagaaagcaccaggctttgcactcagacagatgtggattcattcctcccctgacactagtagctttgtgatttggggcaatatatactctgagaacatcttatcttataaaaggagagaaaatacagaggtattgtgatgctagaaataatgtatttaaaacatctagcagagtaagaactcaataactgttagtttgaagtagtggtaataatagtgcggtttatattccttattgatccaaatgtaatgcagaccacaaatgtgagccatgtatgtaatctaaattttctaatagctgtgttaaaataaatagaataagtgaaattatgattaacattgcattttatttaactcataacatttgtatgtaatcagtactgaaaattattaatgagaggttttacattatttttctcatactaggtctttgaaatgtaatgtacattttatgcatatagcacatctcaatttgttttttgtagttgttgttttttggttgttttgtttgtttgtttgcttgtttgtttttgagacagtctctctctgttgcccaggttgcagtgcagtggcgtgatctcggctcactgcaaccaccccacctcctgggttcaagtgattctcctgcctcagcctccggagtagctgggactacaggtgcatgccaccacacctggctaatttttgtatttttagtagagacagggtttcgctatgttggccagcctggtctcgaactcctgacctgaggtgatccgcccgcctcagcctcccaaagtgctgggattacaggcattagccactgcgcccagccaggacatctcagtttggaccagccacattttaagctgtcaatagcctgatgtagctagtggctattatatttgctagcatagctctaagcaatatgtgaaagatgccagattaatatatatgcattaatgacaaattattactaaacatggtgggaatacctactttaaagattagttttaattaatcttaaccttctcttttttaatagcagaaaactattaaaactcttttattttgcattttacttctcaaatttatttaattctgtggctgtagctagaaatagcttacagatcctgtcattttaatgtacattatatcttacttgctattcagtttaatgtttgacttagtttgtccaaacccttccattcaacaaatgtttatggagtagagttgaccctgggtatactcagagcattggttctgggactacccccaccccattccaaatctacacatgcttattcctgtggaactcaagtatacaaaaagttggctatccataaatgtgggttttgtaacccactaatactgtatttttttatctgcatataagttgactcagacagttcaaacccctgttacctgaggatcgactatacttaatatgtgccaggcactattctaagtaaatgtttttttttttttactcactagatttttagtgctcataaaacctcagggagaacagtgcaaatattatccctaccttccaaatgaagaaattaaggcacagagtggtcaaatcacatgcctgaggtcacacatccagaaaatggaagacttgggagaagtattcaggaaaactggctgtatagcttcatactctcaaagactgatgcaatgctgcctttttctcaatcctcatttctctaagcacaattcaattacttttacttgttccattgttatatgtggttagcctcaggacctattattcccaattgatggtcacatttcctctttggtcttctttagctgccctactatgctgaaagcactggtgggcttttttgtttaaggctgggggaacttacagggggagtgcagagggagtcataggccacattatttagtatggatcttgtcctttgcatcctttcttccttttaagagagaatctcatcatctgtatttcggtatcacattagaatactcgtgactctttttttacttgcccagtctaagttcaggctggagaaggggaaacagaggcggaatagtgcttggttgttacacagcagccatgcacttccgtgggagaaagtgctgcctctggatttctgaagaaaatcagagaaagaaatgtattatgtaagtctgactcactgagcagaatgggtaagataaatggtaggaaaactcaaaccaacttttctatgaccctgtgtgaaattcctctttgtgccctaagaaaaatgctaaaaatgatgtggtcagagtgggaatgctgcagctcagaatcagaaggagaatttctaagttttagaaagaagcttgctaacatcataggcgctgctaatggccatatacatattaataaagctttaaacacctcccaaattagctttatttttacatcaaaagtgcaagacatggaagtggtaatttgtgttagtccagcagacacaaaattaattgagataaaaacaagatgtagcaggcaaaccctttgggtgaaaaaaataatgagttattctaactcatttagacagtttcaagtgaaacataataacaagaaatgagttcacagtgttgaattaggagtttgtcatacatatccatgctcctcaacaccaaagtcaaagtagtagaagcaattaaattcaggtgctgtgccatcagtgtaccattgtgctgtgtgagaaagctgtacctcatttaaatctttgggtttactgctcatcttactatatcaggtaagcatgctgctttgtgtctgcccacaagctggactcagggattacagaatgagtgtggctctggtggacacagggaagcatggagataaagaagttcattggtttctctaaatctgtttttcccagaacagtttggcagcacagtgaaaaccaactgcagaatcctcatttcctaggaaacgtctatcaagccacagatccctcaacttgtcaccagcccatagtctgtcaaggcataagccagttgtactcggaagacacgctgcatccttgtgatgccttgccttgtatgggatttattatcaactgttacccattgtttaggggtttttcccccctctctcttcctgacatcctatgcctcatgtatgaagaatttctttttgaagttatgtagaatgattctactgtgaaagcattattgtgagagctaaggaaattagattgcacaatggggaatttaaatataaaagaagaaaacaagaaactccagaggaactacttcttgaaactatgattctacaagtcctggatctctctatctttagcatctgctaaaattcacatcctccactagccattttatttccttgctgtttctttttgtgggcttcctgatgaggaatgccattccccattttttcattcctgggctcagctcatgttttctgttaacctctcctgttaacttttagctttcttgccagattttcttatggtatatgtattagtccattttcatactgctgataaagacatccctgagactgggcaatttataaaagaaagaagattaattagacttacagttccacatggctggggaggccttacaatcatggcagaaggcaaggaggagtaaatcacatcttatgtggatggcagcaggcaaaaagagagtttgtgcaaggaagcttctgttgttttttttttttttttccttaaccaccaaatctcgtgagtctcattcactatcacaagaacagcgcaggaaagactggccttcataattcaatcgcctcccaccgggtctctcccacaacacatgggaattcaacatgagatttgggtggggacacagccaaaccatatcgttctgccgctggcccctcccaaatttcatgtcctcacatttcaaaacaagtcatgccttcccaacagtcctccaaagtcttaactcatttcagcattaactcaaaagtccactgtccaaagcctcatttgagacaaggcaaaccccttccacctatgagcctgtaaaatcaaaagcaagttagttacttcctacgtacaatgcgggtacaggcattgggtaaatacaaccattccaaatgggagaaattgaccaaaacaaaagggctacaggccccttgtaagtccgaaatccagtggggcagtcaaatcttaaagctccaaaattatttcctttgagtccatgtgtcatatccaggtcgcacagatgcaacaagtaggttcccatagtcttgggcagctctgcccctgtggctttgcagggtacagcctccctcctggctgctttcgtgggctggcattgagtgtctgtggcttatccgggtgcaaggtgtgagctgtcagaggatctgccattctagggtcaggaggatggtggcccttttctcatagctccactaggcggtgccctagtagggactctgtgtggggactccaagcccacatttcccttctgcactgccctagcagaggttctccatgagagccctgcccctgtagcaaacttctatctgggcattcaggcatttccatacatcctctcaaatctaggtggaggttcccaaatgtcaattcttttattttattttactttttatttttttgagtggagtttcgctcttgttgcccaggctagagttcagtggagttcactgcaacctccacctcccgggttcaagcgattctcctgcctcagcctctcaagtagctgggattacaggcatacaccaccatgcccaggtagttttgtattttttagtagtgatggggtttcactatggtagtcaggctggtctcgaactcctgacctcaggtgatccacccacctcagcttcccaaagtgctgggattacaggtgtgagccaccatgtccagccccaaacttcaattcttgacttctatgcagcctcaagctcaacaccacatggaagctgtgaaggcttggggcctgcaccatctgaagccacggcctgagatctatgttggcccttttctgcaacagctggagtggctgggacacagggcaccaagtccctaggctgcacacagctggaggaccctgggcctggcccacgaaaccactttttcttcctagacctctgggcctgtgataagaggggctatcatgaagacctctgacatgccctggggacatttttcccattgtcttggggattaacatttggctcctcattacttatgtaaatttctgcagctggcttgaatttctcctcagaaaatgggattttcttttctatcgcactgtcaggctgcaaatttttcaaacttttatgctgtttcccttttaaaactgaatgcttttaacagcatccaagtctcctcttgaatgctttgctgctcagaaatttcttctgccaaataccctaaatcatctctctcaagttcaaagttccacaaatctctagggcagaagcaaaatgctgccagtctctttgctaaaacataacaagagtcaccttccacattttcaggtatcttttcagcaatgcccaactctactggtaccaatgtactgtattattagtccattttcactctgctgataaagacacacctgagactgggtagaaaaagaggtttaattggacttacagttccacatggctggggaggcctcacaatcatggtggaaggcaagggggagcaagtcacatcttacgtggatggcagcaggcaaaaagagtttgtccagggaaactcccttgggaaactcccatgtttttttatttgttttttgtttgtttgttttgatacagtgtctcgctctgtagcccaggctgctgcgcagtggcaggatctgggctcactgcaacctccacctcctgggtcccgcttcaagcaattctcctgcctcagcctcctgagtagcggggattacaggaatgcaccaccatgcccatctaatttttgtatagtagacacagggtttcaccatgttggccaggctggtcttgaactcctgacctcatgatccacccacctcagcctcccaaagtgctgggattacaggtgtgagacaccgcacccggggtttttttttttttttttttttttagtcatcagatctcatgagactcattcactatcatgagaacagcacagaaaagaccagtccccataattcagtcaccttccactggaattcaggatgagatttgggtggggacacagccaaaccgtatcagtatagaacatgatagagggtatcagttattaagaaaatttatattcattatcaccaagggtccagtgttcctttcatgaatctaaatatcagcttggaaaggaacttttcaactatttctaatatttggttataagtagaatatgaaatacaagcattaatgttccataaaactgttttttatacacattatggaattccatctgcctcaatagtgctgaaggagccaaataactaaaatggaccctttaaaaagttaactacacaataagaataatttattctcaaaagtaggttgtacattactatcaagcaaagtgtcctttaatcatcctgctttctcatcctggttccaactgtcacttggtagaggtaaccattgaaactttagtgtatatctttccagacctttctgtattctttctcacattttctcaaatactgttttctgtctctgtggtttttgcataaatgctataataccagtgcatcctggtcttctaaccaagtgatgaacaggctcatgccattatttaaatacaactggttaagctgtcacttgaacatcgaagtccgtgcactatgttgaattaaaaatcggaaaaacaccagaggacccacaagatgagttctggttgatcactttgtattctcaaggtcgtctcacttcacagtgaagatgctgtcggaacggaggccctaatcagacaagagtgttctagactgatgagccttttaagcctgctccactgtcatttcttaggaagtagccatgttatatcacttggctgacttaattcctgtgtttctattaggctaagacagcaatgacctttagtctatagaagaaaaaaagcaatttgcgggtacagattaaggaaaaataggagggtttatataagtggcttggagaccataaggttatttaaagcctttcttggagaaggtggcttttagactgcagtttaaaaagggaacatgttgtgacaaatggaacaaggttgtgcaattaaaattatcctttcaaaatatattcagaacctaatgacgtctcaccagccccagtgcttccatcatcactcctgatgtgcaacagcaatggtctcgaaagttctccctcctcccgccttgctcctctatgtgctattctctcatggtaacccgagggagccttgaaactgtagttagatgatatcactcctctgttcaagactctcctgtggctcccatggggaaaagcaaaagctctatctgatctggattccaccacttcctggacttcatctcccagctctctccctgttgctccctcagctccagccacactgtcccgcttctgctccttgaacctgacacgggtaatcttaccttggagcttttgtgcttttccctctgcccagatttccccagagctcactcccttgctgtcttcaagactttcttcatagcacgtatttccttctcacatattacatattcatttgtttgttgctgtttatcacactgcatgagaacccaagctcctggagaggaggatctccatttattttggtcccagttgccagaacaatggcgggtataaagtaagattcaacaaatacttgtttatttaatacttaattcatgtaaaacagccaagctacaaagttgtaggaaaaaatgaagtgtgagggatcttttaaaaaatcagaattggcaaggcacggtggctcacacctgtaatcccagcactttgggaggccgaggcgggcagatcacctgaggtcaggaattcgagaccagcccgggcaacatggtgaaaccccatctctactaaaaatacaaaaattaactgagcatggtggcaggctcctataatcccagctactcgggaggctgaggcaggggaatcacttgaacctcggaggcggaggttgcagtgagccgagatcgcgctgttgcattccagcctggggaacaagagcgagactttgtcaaaaaaaataaataaataaataaataaataaataaaggcaccagtaaattagtggagacagagataaaataccactgtgtattcttcacagtttcttgagatcttcatatattatcaaattattgggattatttgtgggctcatactgtgttttactttattcattaggcagggtcagagtctcactctgttgcccagtctggagtgaagtcgagaggtgcaaccatggctccctgcagcctcaacctcccagactcaggccatcctcccatctcagcctccagagtagctggaggtagctccaggtgcatgccaccatgcctagctaatttttaaatatttttttgtagagactaggtctcactatgttgcccagactgctcttgggctcaaacgatcctcccatctcagtttcccaaactgctgacattacaggcatgagccacttatgccccatcaatagtatgctttaaatggtgctatacaatttctgtgggttattgcaatttgagtatgctactacttcatttataatgtttagtgaatggacaaacacttcctaaggaaaagaacatgatggtactttttaaacagtggcacagttgtgtgttaaaacctgccccatcacctttaaatatgttaccagtcttatggttttcatttttggaggaaaatcatgttgatggactatttttagaggcttcagaaagaacatttattttcttcagctctgctccaggaatatcagacagaaaatactagaaagtttaaaataagccagtttggagagagggcaagatgaacaatgattaattttataaacatcttttattcctaaatatcctacattattgtacccactgatatttataagatgctgttcctattgcaggctgactataaatcacttttcccaaaatttaatcttccttttaaggtgatttctatcctcttttttttttattagactatacatttttctttctaaaacttttctttcttccaatttatttgttattgcattattctatgttcgtatgtgtatgttcatgtatgtgcacatgtgtatatgtttgtgttcatgacacaaacctactacatgagtagtttctcatttaattcacaaagctgatctgtgagctaggtatttgtgctcccccgtatactcaggagggaattgatgtttggaaaacaacgatttgcccaaagataagcagttagtaaaagacagagctaggattcaaaaatcagctatgtcgtgcctcatagtatgtgattattccatcacaccatgctccctcctttagtggcctctggcatccccccaaccccacgaggtgtcagtttctttatttgtaaaatgaagaatttgaatcagacttttttttttttttttttagacagttttactctgttacccaggctggagtgcagtggcgcaatgttggctcactgcagcctctgcctcttgggttcaagcaattctcctgcctcagcctcccgagtagctgggactacaggggcacgccagcatgcccagctgattttttatttttagtaaagacaaggtttcaccgtgttggccaggctgtttcgaactcctgacctcaggtgatccgctcacctcagcctcccaaagtgctgggattacaggtgcgagccactgcacctggcctgaatcagactgcttaaaggtccccgccccttccccgacccttctgttagtggcttttattattggtcataataatggctaccactattgggttaaactctttaaaaacataacttattaaattcagtaaccatatgagtgtgatattatccccatgtttcagatggaacttagactgattaagcaacttgcccaagaccattgagttatcaaaagcagaactcgtatgtgaacccagatttgagaccatagtaaccctgcattgttgcacacactttctacagtatgcatactccttttgtataataaatgtaaaattgacaaatgtgggaaaacttactcattcaataattcaataaacatttgttgagtagatatagttggtcaaattctggtaactgccatgaacccaaagatgcacaaagctttgtccccgcgtctggggagcccacagttcactagtgggtggaggaggagaaatacacatgataattataatacaatgtgacaagtgtaataatatttcagtggaatgccatgggagttagggaagtaatctctgatctgggcattgaagggtaaataggaacttgacaagcagagagcaatgacagaagaaactggatgtacaaaggcaagtgagtataatcatacaatggcatattatttggcaatagaaaggaatgataggccaggtgcagtggctcacgcctataatcccagcactttgggaggccgagacgggtggatcacctgagttcaggagtttgagaccagcctagccaacatggtgaaacctcgtctctactaaaaatacaaaaattagctggacttgttgacatatgcctgtaatcccagctacttgggaggctgaggcaggagaatcgcttgaacccgggagatggaggttgcagtgagccaagatcacgccacagcactccagcctgggcgacagagcaagaatctatctcaaaaaaaaaaaaaaaaaaaaaaaaaaggaatgatgatgcaactaatacatgttacaacatggatgaaccttggaaacattatgctaagtgaagaaagtcatttacaaaaggccacatgtcatactatgccgtttactgtagatgaaatgtgcagaaaaggaaaatccatagacacaaaaagtaaattggtggttgcctagggccagggagagtgtagggattggcaagaaatgggatttgactgccaatgagtatgatgtttctttgtagtgtgataaaaatattctaaaattgattacggtgatggtcgcaaaactctgtatgtactaaaagccactgaactgtgttctttaagtgcataaattgtgtggtatgtgaattgtatcacaacatgcctttttaaaaaaataaaagctaagtgggtgtccaagagtgtggaatgtttaggtcgcatggagaagtttggtgtgactggaaatagattcggtgaagtgagatagatgaggtaggttgtggccatttgacaaagggccttctgcttcagattaacacctttaccttttctcatctagtattcttttatttttttgagacggagtctctctctgtaacccaggctggagtgcagtggcgcgatcttggctcactgcaagctccgccttctgggttcacgccatcctcctgcctcagcttcccaagtagctgggactacaggcgcacgctgccacgcccggctaattttttgtgtttttagtagagacggggtttcaccgtgttagccaggatggtcttgatctcctgaccttgtggtccgcccgcctcggcctcccaaagtgctgggattacaggcatgagccacagcgcccagctctagtattgtttctctaaagctcatccacattgttgaatgtagtttatatttttcacttttgtgtaatatttcattgtgcaagctataccactgtttatttatttgggacatttgctttgtttccagatttttctttcagaaagagtgccacaataaattttcttatacataatccactggtgcaagtctcagaagatagtacagtgccatttttataaagctcaaaaataagcaaactctttaaaggtatatatgcatacatgtgtaataagactgtgctaaaacgaggaaagatattaaatacaacattcaggatagtgatttatttaggtgggggcgaggtaccggaagtaaggggagagatggagcacagaggatggctgtaggttacagataatattctagtttctgattgggtggtacattcatagctagttatttattattaaataaactctattttagaatgactttagatatacagaattattacaaagatagtacatagtgttttgtgtatcccatacccattttcctctgttaagagtagggggacatttattacagttaatgaaccaatactgatacattgcttataactaaagttgatatggtattcagatttccttagtttttatgtatgcttttctctgttccaggatcccatacaggacaccacattacacttagttttcacatctccttaggccccacttagctgtgacagcttcttagactttccttgtctttgacgaccttgacagttttgaggtgtactggtcaggtattttatagagcgcctctcaataggaatttgtctgatgtttttctcatgattacacttagaaggaagatcccagaggtacagtgccacatcacatcatatcaagggtaaacactgtcaatgtgacttatcactgttgatataaacttttatcacctgcttgaggtagtgtttgtcaggtttctccactttttccactctagagccactcttttttatttttattttttttcttttttcatactctactgtttggaaacaggtcatacttagagagccatacttagagagtagttatgctttactttcttttggatagaatacctacacaaattatttggaattatttggaatttttctacatagtaggtttatctcttctaccccatttatttgttgatttattcaattatttacttatgtcagtagagactcatggatatttattttatactttgttttttgtttgttttgttgttgtttgttgttgttgttgtttttggagatgcagttttgccatattgctcctagtctccagggatcctcccgggccccagggatccttctgcctcagcctaccaagtagctaggattacaggtgtgtgccatcaagcctggttcatactttggattataattcaatactctgttattttgttgcttaaattgttccatttttggcataggatgttcttttaattagctcctacgtccctttgacatagcctcatcgttgtggggttttaggtgattttttttcttttggcacttcctaactctggcactgtaagaggctccacactcatcttgggtatttcttgccgcagacaggatcagccttttgttgaagaagccctggtcattggaaaatggaatcagaaaccaagatctgcgtgccctgtgtgccactggggtattattgcttctagacctcagctgatagagcgaactctgtgtgtgcacgtgtgcatgtgtgtgtgtgtgtgctggcccatgtatatacatataaaaacatttttatatgtaatcctctgtatattaaactaaatatgagttcatactgaggtcttcagctctaattcattcccataaggatcattctagcgtttttacccttgcttatctgtaatctctcagtaaaacagtgagaaatctggctcacgctatccaccatccatttactcaattgtttaattttagtatacatatataatggtttcaaaattaatccatacccctgtgggagacaattcttacgtacagtttcctttacctttagtcttacagacttccctttcttcaagagttacttagttctgcactttataccccaatacttttctgggaagttgttgtatgcaatgtaatatgtttagattatttataatatatttagattgcatttcatgctaggcttccccgactttctagttaattttttttaatttgcatacattgagatttattcgttgtgctataaagttctttgggttttggcaaatacttaatgtcttacatctacttttagagtaccatacataatagtttcacctccataaaaaaaatcccctatgttttacatatttgtctctcccactctgaacccatggcatccacagaccttgactgctatatttttgctttttctagaatgtcatataattggaatcataccttatatagctttttgagactggcttcttttacttagcaatatacattcaaaattcatcttttttgtggtttgatagctcattctttttatcaatgaataatattccattgtatagctatactgcagtttgtgtagtcgattcttctattggaagacatcttgattgcttctagttttttgtagctatacataaggttgctacaaacatttgcatataggctttgtgtgaacgtaagttttaaaatcaattgagtaaatacctagtagcgtgattgttgggtcgtatttgtaagaaactgccaaactgtcttccaatgtggttgtaccattttctcaccatcaatgaatgagaattccatttgctttgcacccaacagttgttggtggtactgttttgaattttagctattttagcaaacgtgtagtggtattctttgtctaaatttgtaattccctaatgtcagatgacgttgagcatcatttacttgcttacttgtctgtttggtgacttgtcatttatcttttgctcacttttaaaaactaagatacttactatttatttttaggctctgcaatttatatttgttacatgtattcttttgtatgtatcaaatagtatgttaaactattaaagcaaaggaacaggaagaaaaagtttcagctgcatgttgtaagtgtgagggtcgattaagaattcagacttaacttcaaactccagccttggtacttattagtcttgcgactttgagaaagttatatactcttaagacctcagtttcttcatacttaaaatgagactaatacctaccctatctgtttctttgtgagaaaatcattaaaacaacagtgttagctaaagatcaagcaagtgctggagacttgacgcatgtgccacaaaggagatgctcaataaatgttggcttctcataagcccaacgatggaaagcttactaatcattaagcaaatatttatcaagtgcctattctgtgccaggcactgagatacattcatgggtctctgagtagtagtattaatatcttatatctacctttacggtatcatcaaactagttatatgacttacagtttaaattactttatagtttaaaatcacatttgagccaaattgtgacattatattcataatttagaaagttaacatagggaaaggatcagaagcagaagattaaattagtaggctcttctaaaaattcagatgagacaataggatctaaaagataaaattgggaatagagagaagggaacagctgaagagatatttcagaggtagaatttcatagacacgaagattactaagcgatcacgggtaagagaatggtgttaaagattactttttctgatcatgaaattttaaaatattggtttataaagcctcatattcacttagcatgtactgataatccccagttttagacacacgcacataatatccctggccacattttcttttgcaaaattctttaattcagaagtgctccttccccagcagaaagcatctgaagagaaagtcaaacattcaagtcaagtgggaaactttcaagattaattgcctatactcactagccaccaaaaattttctgtattggttctaatagttatattgcagaacattttaaaagacagcacagtattcttgcttgtctagtaaagtaggaaggtaagtttttgctcaatggggtgattggctcagcagcaacaagaactgcacaatttcatctctaattctaatctaaacagagctgagaaataattcccttgtgtgtttataagtaagagttaaatccctcccattgtaatgtagcaccagatcgaagtaaacagactatgatttcagtgctagacacagccttaaggcagaagaaattacactgtcatgcaaaggatatgtagctgctgctattttggtgcttgaattcttcgttgtcacatagttgaaggcaatccagatgaggaagagtgttaaccaacaaaaagagaaaattccctgcacatggctaggaggatggaggggaagaggaaggctagtacagtaccatctgaacacaccaataaatgatctgctccaacaaatggtggcttaaacttgtctgcccgttcttattgaaaacaagttgtttagaacaaaatgcaagctgaagattaaaatctatatttcaggctgggagtcgtggctcatgcctgtaatcccagcactttgggaggcttaggtgggaagatcacttgagttcaggagcttgagaccagcctgggcaacatggcgaaaccccatctctacaaaaaaaaaatcagaacaattagtgaggcgtggtggtggtaggaggattgcctgagtctgggaggcagaggttgtagtgagccgagattgtgtcactgcactccagcctgggtgacagggtgagaccctatctcaaacaacaacaacaacaacaaaacctctgtgtcaccaaatggtttgcctatcattgattaatttaattggattggcttccagttgcttataaaataagtttaggaaaaattggatatttactttcttgatacctccaaaccataggatatatcctttaagatgtatatttaagataaatgtagataatatggatttaagatacctatgtatagtgctgggcatggtggctcatgcctgcagtcccagctgagggacttactgggaggctagggtggaaagattgcctgagtcacagattttgaagctgtgttgagctatgatcatgccactgcactccagcctgggtgacagagcaagatcctgtctttaaaacaaaaaataagtaatttaagaggcattataatatttgcttctctatgtccatatcttaggtatacacgtagacattataggcagttacttttgaaatcaaagtactaattctgagcacactagatatttgttttactacccagaatggaaggtagagaagattctaaagtaagaaagattctatattccccaccaatgcagggattctgccagttgctcagtagtttttttccaattatacattttggaactgaggaaataaccacaggatgggttcagggacccactgtacccactatgggactgacctgaggtaaaactccttgatcacctgacctccactaactcctgctctgactggtgggccacagtgatgttttggatctcttggaatgtgtcagttcagggccagtaatccccaaatgtcggactgttgttttttttttttttcctatagcatagtcaacctggtaataggcaaatggttcctttggggaaggctgagaaaaagaaatatatagtatcatgaaatatagaattttggctgggcccagtggctcacacctgtaatcccagcacttttgggaggttgaggtgggcagatcacttgaggtcaggagttcgagaccagcctggccaacatggtgaaacctcgtctctactaaaagtaaaaaattagccaggtgtggtggcaggtgcctgtaaatcccaactacttgggaagcctaggcaggagaatcgcttgaacccaggaggcggaggttgcagtgagctgagatcgtgccattgcattctagcctaggcaacagagtgagaccccatctcaaaaaaaaaaaaatatatatatatataatttatatatatataatttataaatatacaaaattttgatgaaaggtaattgagtatgaaagtagcatattttaaaaacaaataagccaagtgaggtggcatgcaccaatagtccagctactctggaggctgaagcaggaggattccttgagcccaggagttctgggctgtagtgcatcatgcacattgggtgtttgcatcaaacactaagtggcatcagtatggtaacctcctaggaggggcgaccaccaggttgcctaaggagaggggaactggcccaggttggaaatagagcaagttaaaacttctgtgctcaacagcagggggattactcctgtgaatagctactgcactctagcctgggcaacataactttaccccctttcaaaacaaaaacagaaatgaaacaaagggagacaaaactgaaatcatctttcctaaagtaatttctaaaaacaagacatgtgaaccagtagagaaagatatagggtaaatttggaaatcatcataccattagaatgacacgcaatgctcatataactttaacatgtctgtgaataaaaatgcaaactccgttatgtgataacgaattaactcaggataacataattaaatgcatgatccatgtcatgtttatggtcttcaaccgtggaagaatttatcctaccttggtaattcagtgtaacttcagtgcatactggttatagtgaataactgttgtctttccatccgttctttcaatgtctcctgagaagagcattctatattcttttagtctgcaactccctccacaactttttaattcagttgtgctgtcactgtcagtactctacctccgggccacagcgatgccctagcagagtcctttactgaggttttatatgaagatgttgtaataggggttgtctctttttctgctgtggctaagataattactttcttctctgcctacccccagccccacatccaccatgttgcggggagacatgaaacatgcagtaggagagaatgagaccaacacagagagagtagcatgaccaagctattgattagttggttttggtatgctagtatcagtctagctctgttgatgtcttacatgaacaagtcaatctcccttacattttgaaactttcagtggaactacttctgacttgttttgtttaatgcagtccctcagtaccagctggctagagtatacttcctggaatactaaattttttatttcactcccttactcaagaaattcccatgtccccaccagcaagagcactgactttgtgagccatagagtctgaggttgaattttggctctttcactaacgagcaagtctcttcaactcactgaccctcctgatccaaagtcccagttcccggggttactgagagattgaagcatgacagtgtaaatggaaagcccttgataaagaccgagcatgttgagcattcagtgggaatgttgagactcctgagcacagctgtccaggcattccccataaggccctggcctgccgtaccatgctaaccatccactcccttcctgaccaaactctgttgccccaatctggcttacttgctgtccccagtaagccctgcattttcccaccatgtggctccccttctgcccttcatctacttacctgaatttagccatttctttaaaaatcaataaagtcaattccattgctctacagcagttgttgacccatgattctaacatgatcatctccctctccaaatccctaggacattctgttgcctctatcattaatctggcagctaatcatagaatgtcctggtctttcctttttttcattcaaactggtttgtattttgcatgattttttaattttttcaaacactttcattctatttttattttctgtctctctctctctctgcttatgtattttgagacagagtctcgctctcgtgcccaggctggagtgcagtggcatgatctcggctcactgcaacctctgcctcctgggttcaagtgattctcccacctcagcctcccaagtagctgggattacaggcacatgccaccatgcctggctaatttttgtatttttagtagagacagggttttgccatgttggccaggctggtctcaaactcctgacctcatgtgatccatccacctcggcctcccaaagtgctgggattacaggtgtaagccaccacgcccagcccattctatttttaatccaattgtatgttccttatggtcaagaactatgaatacttttatttcttttctcctttctaggacttaatacatactagttcaatcaataagaatatataatttagtcattttttacagatctgtttataaccagtctacacggactatctgaacatttagatattttgaactattctttttattacagatataatcttattctaataagtacccttccatgaggaaagaaagcagtcataggtaatgcaggaaataccaatcaagtaggacagaaagagaaaactaagagcaattgaaggtgactactcttttattctgtttttagcatttccttcaagtgagttggctctttgtagtccactgaggaattgtacagagaaatggtgactggaattcattgccttctgttgactggggggtaaatgctaagtcatttctgaacctacaaccttggcaagctctgccccactctctctatgtctgaacctgcaaccttggcaagctctgccccactctctctatgacctaaagattagacagccaaaaatgaaatgatagccatgttaaggtggctttttttttttccttcttgatttctaacttgtttgctctaaggtaaatgattgcctgcttaccaaaaatctctatttgacacataatagaattgccgtcacatgttgtttaaacaatctgtatctgatatgacgtgcatctagtcacactttaacatctacaataaatgaataggagacagaactagaatctttaggagaattttggagttcagtttgacaaatttagccaaaggttatgaagaaaatacagttcttagccccaatgttcttgtagtctggactttcaagcaatcagcatgatttagtccagcttttaaagcagtcagctttgttatgcaactatacttagaacaaatggtggcccaattgtgtgtgtgtgtgtgtttgtcccaattattaaaggtatgctttgtgttttctgaccagggaactactttataatactggtattgggggtaggagtgccacgtttggtacaggtaaggtatagtgaaccacatttcgactgtttctcagcagttacatttctgggaacgttatataacttgtggtatagccaaatccttgagctaagaagtagtggtataactgggattactgcaattgttctgagttgaagaaacttctaaaatgtgtagtgtgaaatttggcttgctgaaatcatggccagagaggtgcattttaaaacaaaaccaatagggaaatcttaaatccaaaattgccttacacatgttaaactagtttaaaataaaattttgtcaaaaggaataaaattgtgaaattgtcaaagttttgttatgtgatatcatctaatgtttgtagagatttttaaaatgtaatggtcacaattttgcaaacaatatatagaccagtatttaaaggcacacaaaaaactgttatttaaactagctcaagaaaatgatctgaatataaaacctcctatcttgggcacattataatttaaaaatattatgtatgagagatacaatgttttttcccctaaaagttgcatatttacctttttttaaattcaaaatgtgtctttaaataaaggcctgttttggccgggtgcagtgggtcacgcctgtaatcccagcgctttgggaggccaaggcgggtggatcacctgaggtcaggagtttgagaccggcttggccaacgtggcgaaataccatctgtactaaaaatacaaaaagttagccaggcgtggtggtgagagcctgtaatcctagctacttgggaggctaaggcaggagaattgcttgaactcaggaggtagaggttgcagtgagccaagatcgcaccattgcactccagcctgggcgacagaataagactctgtctcaaaaaaaaaaaaaaaaaaaaattaaataatggcctgtttctagatttcaaagcagcttggacctggaaattaaatatttggaatctatccaagtaatgtacttacaagaaacttttgtatgttaaaggcacatctaatgtgcttaataaatttcataaacatcaataaatggagtgagtgaattaatgagcgagtgaactagtagtcatgatgcaataggagtgacgagatagaattttctgagttttttgtttgttttgagataggctctctgtctctgtcaccctgacgaacatggctcactgcagcctcagactgctgggttcaagcgatactcccacctcagcctcctgagtagctgggaccatggaccacagcataccaccacacctggctaatttttttttttttttttaagagatggggtcttgccatgttcccgaggctagaattttctcttattaagagcctgaattattttaatgtttccaagtttcatggtcattgtttataaagtagaaataatagagcaaatttgttttcggtgttgtattaaatgaaatgatatatgcaatatgcctgatggtgctcagcccgtggtggtaaatgttctctttccctatgatggaaatgtagcctgacatttggagaggcaaatctaatttccatgacttctatcatcatgtatctggagatcacttcctaaaggaaatttccagcctttacccatctcattgaccacaaacccatatttccaattcaagggttgtgaaaaatgttgctggaaaatataaggacagtattaccatggttattattacataattatctcaatcttgagcagaatcctagaatgtcaaagattacaggttgaaaaccagtgactaccattcactcagagccttattgagagcctgctacatccaaaacactgtgcaaagtgtggagataaaaatataaataaggcatacccctagctctgggaaggtaattgtatatgggaaagataagcttgtttaatactatttttaatgtataaagtactaaaaaaaaaaagaggcatgtgtagaatgggagaagagaaagagcaaataattcagccttgggaattgaagaaacagagaaggttgtgcttgttttacagccccaaaagacgaacaggcatttgccaggaagggatgaggaggtgaagatagtgtctaaaggcaggaaggcatgtagttagtacttaattgtactgttagaggtgccatgatgcctttgtgtatctgaagcagtggttttctaaagctaagccgttttaaaaacatgaacctatatataggtttatttttttttgaacctatatacatgatctatatatatgaaaaagagataaaagcaaagctgccttctccaagcaggaaagaaggcctggtgtcacagctgctagccgtgttacaccccacccccacttggtgacacccgaggcactctcagggaagttagagaagtgtggtaggagaccatgtaaattcaggtgtgtagaccagaatatgtcactttagacagattgggctttgtcctatgacgacttaaaagttatcaaatatttttaatcaagttaatagcatcagctgtattagagaaccctacgtgttatgtaaggtcagtcagagtagaaagattggggtagagacctgtcaatcagatgctccaagagtccagttattaaaggaagggcagagagctaatctgcatagatctgagttctgagtttggctccttctctgccagactccacgacctgtaattacagaagcttagatttaaagatcttccatgtatcatttcactgccttccaaatttaggtacccctctgataatgataccgacaagataggctgtcacattacctagaacattttcatgatatgaagcatactacttattaggaaaaatccctttattttatggtagccctaattacatttagaaacaacaaaatgaaagagctgggtgcggtggctcacgcctgtaatcccagcactttgggaggctgaggtgggcggatcatgaggttaggagttcaagaccagcctggccaacatggcgaaactccatctctgctaaaaacacaaaaattagccaggcgtggtggcgcttgcctgtagtcccaggtacttgggaggctgagacagaagaatcgcttgaacccaggaggcagaggttgcggtgagccgagatcgtgccactgcactccagcctgggcgacaaagcgagactccgtctcaaaaaaaaaaaaaacaaaaacgaaaacaagcgaacaaaaaaacctcttctctttcattcccaactagaataaatgatctattggaggattttttaccaaacaatcctttggatatttatacatagctacatagccctcaaatccttgctccgccttttctctgcaactcagagttccctgattcagagttcctggggcgtcaatttcagattgcttgcttttctcattgccctctatggatgctttcaattccaactatgaaatgaaagatgccatctaacgctaaaataaagttcctcagagttggagtgaagagtgtactatccagcaatggaactggtacctcctttgatttggaagtactactctttaaagaagcatgtgattgtaataatattttaatagccaggtcatacttgtggctcatgtagagcctgtagttaactcagaccctggagccttgagcaagtctattaacctatcctgtccttggtccctctagcttaaccataagggtcacacctgcctcctgttcatggtaattatggataatatgatgttaaattaaatttataggcaatgttgtacttgaaattcaaggtgacctagttgttgtgcagatgtagttttcagaaagacaaaagaaccattgtcaataaagtaatctatatcaaaggcatattaaacagcctttggaaaaaaattgtgtttcctaggattttgcattctttgaccttcactacttctgttttagcaataagagatttagcctgactactctataaatagattttcaatttatattgccagataatacacaatttgatgagactgaggatggttttcctgagaggctaagttaattggtttatgtattattgtcttgtatgtgtctcactttttcccctggcttccaagcctttgaggcgtatgttactttgtctaatagaatattctcttggctgacttcagcaaaggagtgaccaagtctgctctacacttgctggcagggatgttgcagtaatcacaataaaataaggtcctgaggagaatctggctcagacaataggagttacaaagtaaaaacaaggacagatccttaatgttagccttcttcattatgggagctgaacaatatttgataatcacatttcagtgtattttatagatgcactataaaaactacaccataaaaaatttataaaatctgttatagagcaatttccctccctctttttttattatgtcaatagcacccagaagtttttagaagatactttacttccttcacaggtagttaaaggaattactaaacttcattataacactgaaactctgttggacatggtggtaaaaactgtatttggctttgaggatttaaaaaacataatgaatgcagttagtagctctactgtgatcagtcttatttaataatgtttctcatgcctttttcatactttgtgggaacaatgaacatagaatccaagcttttaggtgctgttatttcatgataagactaagagaaatatgactttctgcaaaaattttaggtattctttctgaaaattatggttgtattttcaagatcctgttgttgctcttattaacaaatatcttgttagacttgatatttgattctctcttcccactggaactttaggtatgtgatagttcacctgtttaagtatgagctttctttcattaaaagagggacaaagtgcattgctgatatgcccttgaccacttttaaaacattattaatatctgcataatgctgttagccaggaagaatgtgccattggtgccagacaagtccaaataggattttaatgcatgacgaaatgtaaagataagaaatattgaagaacaaaaaattagaatttggtcagagctcttctgtgaattacaggagaataaatccaaagaggactaaagctgatgcttgtcaaatgagtcaaatgtctaatctgccctttcttgtttgaaattggaataaatgcattacagtttcaaccatacaattttataattttacgtacacattgtttatgatcttttgtggcttcttctccagtggaccagaaaaaagttcaaaaataaatacgtttttcaaaataaatttctatccatttctagctgcatttattaatttatttgccttgttttttttttttttttttttttttttagacagagtcttgctctgttgcccaggctggagagcagtggtgcaatctcggctcactgcaacctccacctcccgggttcaagcgattctcctgcttcagcctcccaagtagctgagattacagcatctgccaccaagcccatctaatttttgtagttttttagtagagaaggggtttcaccatgttggtcaggctggtctcgaaactcctaacctcaagtgaaccacctgcctcggcctcctaaagtgctgggattacaggcctgagccaccacacccggcactatttgcctttcaaagaactttacagttctcctgatgtcaccatattctttaatatgtcattttatattatgttctgtagaaacctcattatctaagagataagtgagtgatagaaatataataaggatgaatatcttgttttacaagatgtatataacctattctacactttttgtttttctctactttagtcttaattttctttcttttcctcttttctgtcttcattttcatctgccaatttttcaggtccttttccctttcttaaaagtgtgaacttctaaagacttggacagcctcactatacaaggtacgacaaacattgggtgtatttagttgagtaggtggatgcctacgtacatgcatggatgagtaggtgagtaggtagatatatgaatagaagagtggacaagtggcaactcttccctgtcaccatgattgctggaatcgcagagacctagtggttggtctcctgtaatctctggcaatctcagcacttcattttgatcactaagaactttattgcatcttggagtatgttttgaaattacaaagcatggaggaagagcttggcgtgtctgacaccttaaaaagaattgtaaaggcatagatcaactctgttaacttttgtgtcaatataatgaaagtctttgattttcccaagtgaatttataatttggaaatggggtatgaatatatggcaatgatgatgatttctccaaagacagcaaatgtcttagtatttgattgtcccttattttatatctgtgaatcatatatatatatatatgtttacaaataagaccagtctgttttattaagctaaaaattatatttataagtgttagtttatcacttaatcttacatgtaaattcacagagtgagatggaaacaaatggaagtcttatttatatcactctaattttggtttatttcactgttcaattattcaattacctttaaggtatttcattgttttcaatgacttacatgaggtttacacttgagttttgatgggctcttggtggaacttagttctctgttatttttggaatgcctctgtttgggattttatatatgttttaacaatttatcattataattaagtaaacttaagttcatcttgggaccatcacaagagtattggtaaagatgcactttaaaataaatctccttatatttagtctagactgctaagtactaactacatctgctctgcagagaatcagattaggccaggagagtcttatgtcttcattatgccattattgcagtgcataatgtttggataaaatataattttcctgttaactctaagcaaggtataaataagcaaaaactttttaggaattagcaatttcattacattcacttgtacatgctctcattaaaatatatgttgctataatcagctataaattactgggcattaaattaattacataggttatatacagttggcaattaaagtatgattttcaattcaaggtgttgattagacaattaaaatgattactaaataaaaaattatttctaagatatgtaatagtttggagattcggatagataatctaatactgtgatgaaaggtccataatgtttgcagaatttggaaagccttgaattaaaatcattatattgctgccaagaaacagtggaaataaatgataggtttgttttagcttgttagcatactatgatgtccccttgagttgcaaatataatatttttaatactataacgactctaatgaaatggaggtaaaaacaaatgaagttttaaaagtgcctatcatccattttcaggtgtacttaagcatttcattattaaataccgtaatcatccctgaagttcacaatggttgccaatagtcctgggtcaagcatactaaaacctttgaaatattttctagagtgtctatttttacttggcaggtaaaacctaatgataattagggtggaggcattagacatcacgtaaactttttctagctattgcttttttagttcagtggctagttttcagtgtggattaacttaatctgtgcaaataaaaaataaatgattactttcttacatttcattcatgtatttactacattttctgtattggtcatcatttttcacagaaaactatgtaaactttttctttatcttggacatatttctaagttcaatgtattccaaatagaaaaataaagggtaaggacagaatatttcctggaaacttaataaatatattctttaaaatgtttattaattttttaagtctttaagaaatatacatttaatacttggagacaactttgcttatagttgaaacagtagtgtgttttctttcaagggtaaaagttttagatattgtggggatttaaaaaaatgtatggcttagtaggttcaatgtcatttaaaatctaagattttctgtaacctaataatagactaatttctgacaaataaaaacctgtataagacatttatattccccacagttttatttctcagttttaattataaaagatataaaccaagaaaatatattcttccttatatatgatgaatcgcttttacgtaaattaccatttaaaaataaaatcatccctttgaattttgtgtctttggatttattaagatgtgctaaaattgcttatctttacaattccacctaaaaccatttttgaaatataatccagtataggaaacaaaacactaaatctatttaattttggagctcaaatttctcatgacaaaatacatttttggactttaaaaaattagtcataaatataattgattctgaaataattaggtttttattagtctgaaaatagagctcatcccatcccttttatccatctgccacattaagtatctgacaatctttacaagtgcttctcattcagcttatacaaaaatatagttttttttttcccccaagtgagttcacaggaacaaagtatggatttgaaggaaaacagagtcctacgcttggtataccctcagcgtttttatcagaggggagtaaacactgaaggaaatgaggtgtttgccttcagtcagtattggaatatgtagaaatgtagaagtagaaattggatggactatatcttttaaatctgattttaaataaaaagcatttctatttaacatattgatattattactggtgccagaaatgagactataaagtaatttattggataaattttatttgaaattttaaaaacattgcaaataatgtgtagtcacttttaaacatgtaatttacatgagggatatttcattttgaataatttgatgtttttctttgattcccagaatgtttcttatatctgatcaaaatccctttttttttttcttttttacgaagcggggtctcactctgttgcccagactggagtgcattggtgtgatcttagctaactgcaactttgaacccctgggctcaagtgatcctcccacatcagcttcctgagtagctgggactctgtaggcatgcaccaccatgctgagtttttctttttttagaaatgggatcttgctatgttgcctaggctgatatcaatgtcctagcctcaagtgatcctctcacctcagcctaatattaattttatttttctcactttataagtaagtagttgggagactttagctaattttttcaagtaatttttcttaactcactgtttaatggacttgggttttaaaaaatagtcaatttctattgaaagaaacatagttcaaatatgactctattaaaacaaaaaatgtatcggaaatagactctgtattggaaatagacactgcattggaaatagctctcatatttaaaagtgggctttatcattacattatcttaagatatttcttaaagatttgctaatttagtaatgatgtctagttcctggatattcctttgtttggaaaatttgtgcaaatttcatttgactcatcttgatttggaaaagatgaggtatactcttcaaaagagttatgttttccctttctgttacatttctgatgaccaagtattaatatatcataaatacatttaattaattttgacactgcctaaggaaacctataaggatatgtgttttattctaaaataatcaaagttttttttaaagttacttttaaaataagatgaatcatcttttggcctacatgtcattcattaatcctgtatgagaatttgattactatgtctgtacatttcttcctccagacagttcctttatttgatatcataactacatctgggattgagttcttaatgtgagtttaacaaacttgtgagctgatttcataaagctatcaaaagcacttgctgataactgaggaatatgattcagtatgtctctgaacttaaaaagtattttaaaaatttaaataactgacaggtttttttttaattaacctatttcatttgctatatttgtcttgcctatgttctcagccagaagtcgttttcaaagggtgcatgtgttttgacttgttagaattttaatattttagattaagtcattcaaaaagtatatttcttaggccaggtgtggtggctcacacctgtaatcccagcactttgggagtccgaggcaggtagattgcttgaggccaggagttcaagaccggcctgtcaacacaatgagagaccgccccccgtctctaaaaaaaaaaaaagttatttagctgagtgtggcggcatgtgcttttgtagtctgagctactcaggaggctgaggtgcgaagattgcttgagcccaggaggttgaggttatagtgagctatgattgtgccactgcactccagcctgggcaacagagtgagaccctgtctctctgtctttttttttgtttttaagtgtatttctttattagttgatgtttacaaagtatcttttcatacccaccaaattatgttttacttcagaaatttgttatgcctgcctacagtgtagaaatatttccagaagtagttacatagcaatttggtagggtgaccacctttactttaacaaatagcatttgaatgcattttattcacagtagtagaagggagtgactgtaaatagtttactgtttgttctttctggctctattgtcaatttcaagattcatgtggttgaagcttagaggataagaatgttagggtccatagtatgggtattatttttgtaagtcatttatttatttcagcaagggccaaacaggcagtttctatgagtcctgccttacactcatcctgggaatcaaatcaatccacaacaaaatggattaatttttcaattttagtgaaaacaatgggaacgtcttaatgcttaagcaaacactagttataccttctcttcctttttcaaaatattctgggggaataatgacaagacaacctaagacagaccttgtgccgggcgtggtggctcatgcctgtaatcccagcactttgggaggccaaggcaagcggatcacgaagtcaggagatcgagaccatcctggctaacacggtgaaaccccgtctttactaaaaatataaaaaattagccgggcatggtggcgggcacctgtagtcccagctactcaggaggctgaggcaggagaatggtgtgaacccgggaggcggagcatgcagtgagccaagatcaggccactgcactccagcctgggcgacaaagcgagactctgtctcaataaaaaagacagtccttgtaaatatttgtcagtaaaattttaatgatgtctaatttaaagtgccatttcaaactattatttctgtggtattttcttaacaaaatattcaacaactctaaaagattttaaagtgatttctttctttttttttttttttgagatggaattctcgctctgttgcccaggctagaatacagtggctcgatctcggatcactgcaacctccacctcccaggttcaagcaattctcctgcctcagcctcctgagtagctaggattataggtgtgcgccaccacacccagttaacttttgtatttttttttagtagagatggggtttcaccatgttggtcaggctggtctcgaactcttgacctcatgatccacccgcctcggcctcccaaagtgctgggatcacaggcgtgggccactgtgcccaactaaagtgatttattttgatagattaagcaaacattttctaagcactatctggtacagtctgtacagtcttttttttgagacggagtcttgctctgtcaccccagctggagtgcagtggtgtgatctcagctcactgcaacttccacctcccaggttcaagccattctcctgcctcagcctcccgagtagctgggattacagtcatgcgccaccacgcccagcgaattttttgtatttagtagagacagggtttcaccatgttagtcaggctgacctcaggtgatccacccgcctcagcctcccaaagtgctaggagtacagtcgtgcaccaccatgcccagccagtcttttttttttttttaaccttatatagctgtagattccaacttccacaggcatgaaaaatacttatatatgtacatatatacagacatacctacctgactccaaatatggggatcaagtaaaacattaaccaacatttttagttcaaggtggcctgttaatccaggaaatagattacaattaaaataaaagaagaatagaaaatttgggccatcagaaaatgtcaggaaccagaactttttatgtttaattctaatttacaataagagtcaagaggttgagtagctttatgcatgattgaaataataataccaaacatccctatccttaagttttagttttgtgcaacagtaattcccatgcttaagtagtctcttctcttaccctatagtcttatttgcattgtgagaaatttcttctcttgcctgtcacatttttttttttgtcattgtacctggcatgtaatatgttctcaacatagatgtaccaaaaggagtcatgaataaacaagccgggtgcagtggctcacgcctgtaatcccagcactttgggaggccaagacctgtggatcacttgaggtcaggagtttgagaccagcctggccaacatgatgaaaccctgtctgtgctaaaaatacaaaaattagtccaggcatgatagcagatgcgtgtaatcccagctactcgggaggttaaggtaggagaattgcttgaacccaggaggcggaggttgcaatgagcctagatcacgccactgcactccagcctgggcgacagagtgagactctgtctcaaaaaaaaaataagaagaagaataaaaaaacccatgaataaacaaatgtgtcatttagacctaagaaaaatttaaaagccagaagagtcttctaaattttctctcttttgaggataaagtcctcacatgctccattctcagccttgagagggatagagtaggagtttctagagcttgattgcctgtagtcagtatgaggtggaaaatgtattttctgttagtaagtagaaaggctgctctaccttaatcatgccaattatatattatttaatcatacctgaccagtgattggaatgatgatgatacaaatgtttttcttaggaattaggtgtttcacaaaatttccaaacatcctttttcctttctatataacgagcccaagaaaaactttgtcattgatatcacaaatctagtgtgtgtgtgttggggattgtggaaggatgtagatgatctgtgtcatggggaaactgcatttagttcttgcattttgcgaagtctcgggtgaaggacaattattttttagacaacaaagacaagagcatgtcaagtactctcgccatgaatggtggtatattttggaatttgttttttggtagaatggggcacattcaggtgggccattatatgatgcagctctgaataaactttccataacacagctttatttctcaagtgaattatatcactgaagcaacaggtcgcatggtctgttgcctccagggtagtgcctctacagctgggcaaatgttatctagaataggacaatcctcttttctcataagtgccatgtattctatctacacttcttctgcacaagataaaacttgaatgtttcctttaagacctcttccagaatcttcccatcatgaaatagaatgtcgtctattcatctactttgactgagtggccaagatgacatttgagctggtagttccaggaactagatggcattactttaatggtctgagcatcaagttatctttcccaaagtgatgcacaagagtggcttacaggtattaatttttgtctagatagtcttaaatgtctgtcttagtattaaaaaatgctatgtcggcacaaacttttttctcattttgagtgcctcaataataaagcttaaatcttttagtcttctaaccatgatcttagactccccctggtttgggggagtttatcttgtcccaacctgtacacatgtaccatctgtacatagtagcttccacgtgtatagaaataagcagactctaagtatgtgctacttgcatttacagtggtttccaggtggctccttgtttgtgtcacattctcttcttaaatttaacatgttgacctaaatcatcctaatcttttcaaccatcattactttctagttttttcattagcttgaatggcactttcaacgttaatgtggctctaatattagaactgattttccttccattttagtgctctttgccctttagcaggtaggagattccttctaattctcatcttgatatcatggcacatctctgctgaaacccatcaaacccaactcaagagtttatgtaatcttgcatctgcttgtttgcctgcctttattttatcccactggttctctctctgttcttggcacaagccaaactcactgctgcctcgggacctttgaattagctggtgatgcttcccagaattaccttgcttcagatctttgtatgtctggcttcaactctcagctcaggtagctttctcacactcctcagtcactccctatcacatctctctgtttcagtgttcaaaatgtaaaaatccaaagacataaaattgaaaagacttttaaattctgatcttatgtccttccaacatttccattaatgtcctttctcttaagaaatgatagttacaatatgtagtaatgtgttatttctatggagcagtccacaaccttttatttattttttaaaatattatcccccctccaaaaactctgtgttgaagcccttatgtgtcttatacataactgctgctttggctttgcttgtcgtatagcaggtacttttccacttatatcctgactcactttcagaagtccttttttgaaacagggtgttgctctgttgcccagactggaatacagtggcacgatcatagctcatggcagcctcaagctcctgggttcaagtgatcctcccaccttaacctcccaagtagctgagactacagacacacactaccatacctggctaattctttttattttatttatttatttatttgagatggagtctggctctgtcacccaggctggagtgcagtggcgctatctctgctcactgcaagctctacctcccaggttcacgtaattctcctgcctcagcctcctgagtagctgggactacaggcacccgccactatgcccggctaattttgtttttgtatttttagtagaggcggagtttcaccgtgttagtcaggatggtctcgatctcctgacctcgtgatctgcccgcctcagcctcccgaagtgctgagattacaggcgtgagccaccgcgcccagccattctttttattttttatagagacagggtctttctgtgttacacaagctagtctcaaactgctggcctcaagagatcctgcaaccttggcctcccaaacttctaagattacaggcaagagtcaccatgcccggcctactttcagaagccttttgaatatgaatactttatattttactgaaagtatgatgtgtgtatttattgcatatgttacatatgcttaatatgtctaccatatttttagagagtgggggtttttaatacttgcaaattgagattgtaaactctttgagagctgtattgtgtcttctctttagcatgcttctctaggtgtagtggtggtggtggtggtggtggtggtggtggtggtggtggtggtagtggtggtggtggtggtggtggtggtaactgtttttataaattaactattttccagacattgtgagaggcatttaacaaacattatctcatgtactcctgacaacctgaggaagtagttactgtaatcatccccattttacatctgagaaaattccttaaggaagttgcccaaggttatagggcaagtaaaagacagagctgagattcgaacccagagagtctgactcaagaacctgcaatctaaaacaactatttgcagccttctcaattacaccatgaattcttcgtaattttttttttttttagacagaggtttactctgttgcccaggcttgggtgcaatgtagtcctcatagctcactgccgccttaagccttgacttcctaggctaaggccatcctcccatctcagcttcccaagtagctgggactataggcgcataccaccatacctggttaatttttagtagtagtattattatttgtagagatggggtcgtgctatgttgatggtgctgatcttaaactcctggtcttaaatgatcctcccactttggcctcccaaaatgctgggattacaggcatgagccaccatgcctggccaattgttagtaattctgattgactacacttagtgtattcagagagagacattcatttctgctctttgccttcaatggatagactgccaattaagtgttgggtagaacagattattaaatatcaacttttgacatattggtaaaaatctaaggaaactaacactttgctagaaacttagaaaatgttattgcattcagttgtggtttttttttttttttaatttactaaaaagaagattcccctcaacctggtccacccccttgatggtgaattaaggaggtgaattttgaatgggaaaagagaaaatttgctcaaattagtgaaagagcttttgaggctctgaggttgttatgggactttgtattaagaaaggactataaaattataacacatatggctgtggggcagattgaaaataatttaatcttttgaccgattgcagttatggaacttggaatgattcatcatttatataagttatcattgctaccccaaaacagaaatattgtcaccgggtgcagtggctcatgcctgtaatcccagcattttgggaggccgagacaggcggatcacaagttcaggagatcaagaccatcctggctaacatggtgaaaccccgtctttactaaaaatacaaaaaaattagccgggcgtggtggcgggtgcctgtaatcccacctactagggaggctgaggcagaagaatgaatggcatgaacccaggaggtggagcttgcagtgagccacgatcacgcctctgcactccagcctgggtgacaaaacaagactccgtctcaaaaaaaaaagaaagaaagaaatactgtctattactaactggttgatattggcataagtacactttaatatgcatattagtaatgactcttttctgggaatgttcagcgcaaaatacagggagtgagtttgttctcattgtttgacctgagggctagtatttgattctttgattaaataataggtcccatggattactggggaggggagggtataagaaaaagttccccgtgtgctgcagatggccaggttggatgtggcagttggtgcaagcatagatcaaaatggcaaaagtaaaaatgaaacaaaaccaaaaatgttcaaccagatgatgggccatgattgtgaggttggtggaattttataatgtaaaattctagtttatcccttttctactattcagcacatatttaggcttgttggtattcatagtatacatctcttaacataattaattcccctttggcaaataccatattctgcagttcatttaactgttctgggctgcagagccttagggatcacacctgaatttcattatggaagtttaagtaattaataaagagaggaatctcaccattcacaattgccttccgactggttaagacaagacttgatgtaatttttttcaaaaactttctataagcacagctttattgcttgttttgtgtggtgcacaggggatgtgcaaaatatttggtcatgctgactttcaacaggatcctactgtctagaaatcctggataattcattttcttttcccagtttcacctgtttacacttcagagcattacaagccaaagacagtcaattaaatttttagaaacaccacaaacccactcatttaaaatgaatagtaaggaaagaataataacaaaatgcactttagttagtcgcaagtgaggcctcatatccagaaagaaaatcttaagattttcctttctataccttccatagctatggttcatgtggcttatatccttaagaagagagctttgcatcaagtggtcacacacatctgtcagtaggaactagagaagaagattccttctagtaaccttctggcaactcagtttacatgtttctcacaaccctcaaatgcccagtcctgccccctaaaatgtaatgtggcttattcattggtgtctctccatgttgttcttcaggaacaggtgttgttgcaaaaataatggcataatggctcaggcaatatttgtgatgatggtaggcctcagctctacccatgtctcctgtagtcccacttagcttctgtaactagattaggaattttactccttacaatctcaagaaaatttcccttggctctcttgaatgttcgactcagaattataaattgaaaggtataggccaggcacactggctcacacctgtaattccagtactttgggaggctgaggtgggaggatcacttgagcccaggaattcaagaccagcctggccaacatagtgagaccccatctctgcaaaaaatacaaacattagccgggcattgtggtgcacacctgtaattcccaggtactcaggaagctgagttgggaggatcacctgagcctgagaagtcaaggctgcagtgagctctgattatgccactgcactctagcctgggtgacagagtgagaccctgtctcaaaaaataaagaaagaaaataaattgaaagctataattttggtatgtgacagattataagatagactttgatttttactatgtgcagaatatgatttttattcacttaataattatttcttgaacacaatatgtgtcaaagttgaaacaagctagtcagtctaaaaattcagcattaactcagttactaatgaaaaactataaggaaatgatttaacgcatgaaattatttacttctttgataaatggtcatcaccttggtactaaaaatgtatttaggttttcttggtttgtttttagaaattatcccatcaagccctctgcttcttggtagaggctattataggaagttggtatttctaatattcctcccaaagaggcaccttaagaaataacaatacctatgatttgaaaagttctataaatatttctaagaaaaagttccaagaagatgcacaatattcaaggcaagtaaaatcctcccggaaattattactgttataagatgatgctctagtagcataaaatattcaaaatcccttcctggtcaatttatccctgggaaatagctttctcactaatgtgatcggattgtaattaccgaaacaaacaaacaaacaaacaaacaaacaaacaaataacttgccagtagcataggatctttcccactaaactgaggaaagaaaagcagtgattatcccttatcacttggtattgcttttattcagaaagaaacacatgtcttttcgttatagcactttccgatttttaaattcttgttcatgaaaatgtgattatgatgtactagaaatttgcctcaggttctttatcagtccagcatcttatattcaaggttccaattaattttaagaaattgaattaaattctctgtttccttacagaatcgccttcacaagccatgatattaggtttgctgttcttggcatgggaagtgctttcaatatgtgactgttgtttgcttttttttttttttttttttggtccctttgtctctctgcaatcatatcatatgtgtgtattcaactagcagatataagaaaactcaggtgagggtaaacttaagcttttggtcgctatcctcactttccatttgttccacaaagaaaggattgtttcatttccatttagtggcaggaaagtgctctcatgtttttctgtagatatcaaatctgcctgggatttggccctacttttcctttatctttattggttttagtaaaagtggaaaatttatgttaaaaaatatgtgtatataacataaacacacatactacaaatagacatataaaacctacttttatcattttttgtatcactttatgttgaacacttcatgaaatgtttattccacattaacttatttggtaaatgcataaaaaatgtttttttccttcttgaattgccttttcaaaagcctctggattttatatgttatactttgtgagtatttgtattaactatagatatacatatgtatttgtatatatatctcttttcttgacactacaaattctttatccagattattgagtaataggttgttattgttagctgttctggttaaatatgagtaaccatatgttgtttagatatgaggaaatagggttatgtgttatgatgaacataaatacattcttcttgaatatttgcaaagtaactcataggcttgcttaggaatcctcattatacatcttattcctggagacataataattatatgaattgagttagtaccataccgaccctaaaataacaagtaaaattgtatcagatattaattttaaaattgtgtctttttactaagtttttatacaatacaaagtattaaaaagtatggataaatctaacatcgcagtacatgttactcacgaatttggttttcttcacaaatctgcaaaagtaccattacctgcatgtagcttcatgttacataactgccattgatttttattttggaataattatagagtcacaggaagttacaaagatagctgagaaagatcctgtgtactcgtcaccgagttttctccatggttgcattttataaaaccatatagtacaacaaccaagccaggaaacttgtatcgtaggggccaagggcaagcctccctctttgccttctgaaggttcactgaaaatcaactgacaaaaggcagattaataggagaaaaggcatacaaatttattaacacacacagggaagaatcccagagtgattaatccaccacatagtggggtgctgatggttatatacccttcttctcaggggaaagggtgatggggaagtagggatgattttaggagagtagtaaatgatttttaggggaattcagtgggcttgaagaacatacaccggcctaggacaaagtctgttgggccagcagagcagacacgatggttcgtgacaaaaacctgctcaggtgtgttgacagacttcagtctttcttcctgtgatatgagttcagttaatgaaaactcagggaagggaccagaggtgattgttttcttctttggcaagtccagactctcagcagataagggaacttcagagaataacttcatcttttgctttgggaggcgcagaggattgagagaaggaagggaggaggaaggtcagagaggcctaaggcttcttcttcagttaagcacatcaaagcgccatattttggtgtatcagtttctgagccccaacggtataatgtgtacatatagttccatgtcttttttttttttcacatgtgtagatttgggtaatcaccaccatgatcaagataaagtcgtacccctttagagtcaatcctgtatttcccatcttcgaaagtctagagcttaagtctgccatttcattttttgctttttcgacttaaccgtctctttacctttcactgttttgtttttcctgccttcctgagggttatttgaactttgtttataattgcatttccatatatctgtaatatttttaaatgtgtctgtttagatttttagtgtcgttttaggtattacactgtacatccataatctttaacagcctatttgtgtcaacattttactaattcaagtccaatgtaaaaattattatctctctctacatccctttaccctcctcatttataatataattgtcttaaatattttttattttttcagtctagtttctttcggttgttcagattgggtaattcctgtttttcagtctgcaggttcactgacctgacttctccatcctgctgtcgagcctatccattgagtttttaatttcattattacatttttcagttcaacgatttctacttattcttctttatatctcctctttgagaacattgagaaccacatcagacagtgttgtaattttttcttccaccatcaaacatgatatctctcaagaggagaagggcataggggtgaagggaactttccctccatcctttgaaggttcaataatttgagtctctggaataaagttgacaatatacagattaacaggagaaaaggcacacacgtttattacatgcatatagacgggagccccacacaatatgagactcaaaaaagggcctgatggtggaagcttaaatagcattttgagctacagaaagaaataaggggctgggatttctggtgggaggtggtaacaggttatagaggtttgaggggagaaaaatgtgtgatgagcagaggctgtcttgttatacggataaagtctctcagctagcaatcttcagaataggtggttttgacctttagtctcctttcctgtgagctaatcttctctgtttgataagattatagagaggggggctcaaagcaattgcatttcttctggaggaacttcccttagtcagataagggaacttcagagaaagcaccttcctgcactttgggagggaaagaggggcaagagatgagagacaggggcagcaggggactggaggagggtgaggagaaggtcagagaaaccttgattcaaagcactcagcatgccaaagcaccatactttgggacattgtttcctgagccccaataatacttacgcgtatttttgctcttttcaattttccttattcccagtgttccagtatttcttctttttatcatttctcttccattttgataactttctgtagccatttctttagggtaggtctgccagtgacaaattctctgagtttcccttcgtctgagtatgtctcaattgccccttcatttctgaaggatattttcactgagaatcagattctgtcttgacagatcttttctttcagcacttgaaaatgttgcatcatttccttctggcttccgtggtttctggggaggaatctgctgtcattttaatttttattcttctttaggtgaggtgtccctttctgccctgctgctttgaagctttttctttgtctttatttttcagaaatttcattatgttgtatcttggcatggatttccatgggtttttcaaatgtttgaggttctctaaacttcaatctgtaaacttcttcaatcattatgtctttttgccaaatttgggatattttcagccattgtttcttagaagaagttttcagccacaccctctttcttttttccctctgaaacttcagtgacacaaaggaaatcttcgattatggtcccacaggttcctgaggctctgttcattgtttttagactttttctctttgttgttcagattgagtaatttctgttgttctgttaaagaaattcaggtacgctgattcttttgttttcgctcttctattattgagtccatcactgagcttttgtattgttcagttattgtattgtttagttctaaagtttatatttgatcctttacatcttctacttactgatgttttatattttttcttttgttttatgcttctttattattgctcattaaagcttttttgtttttgtttatgttttttgaaatggagtttcactcttgttgcccaggctggagtgcaatggcatgatctcagctcactgcaatctccgcctcccgggttcaagcggttctcctgcctcagcctcccaagtacctgggattacaggcatgtgccaccacacccagctaattttgtatttttagtagagacagggtttctccatgttggtcaggctggtctcgaactccagaccttaggttatctgcccacctcggccttccaaagtgctgggattacaggcgtgagccactgtgcctggccctaaaccatttttatgatggctgattttaaatccttgtcagaaaattctgatatctgtgtcttggtgttagtgtctcttgactgtcttttcttttttttgagacggagtttcactctgtcacccaggctggagtgcaatggtgctatctcggctcactgcaacctctgcctcctggattcaagcgattctcctgcctcagcctcttgagtagctgggactacaggtgccagccaccacagccagctaatttttttttcttttaatttttattagagaccaggtttcaccatgttggccaggctggtcttgaactcctgacctcccggccacctgagcctcccaaagtgctgggattacaggagtgagccacgaagccctgctgactgtcttttcttattcaagttgaggtgcttctggttcttggtatgacaagtcatttttcatcaaattttagacactttggctattatttcatgaaattttggatggatctttttgagaccttctgtctagtagatgtcgtctgatactgctctacctctttacttgttcaatggggttggatgtctgggttacccactaagtctttgttggcatctggtgggtaggcatacctcattattgcttggcaggggcaggagttcaggctccttaccagccttcccatgatacccccactctgggagaggtggggattcttactgctctgagtacagtctctactgacactgcaggggggtggccttggtactgcaaggtggtggtgaaagtcctaactagtaggcctccgctgacactgctcctgtaaggaggggaaaggacacatcattcccccagtgccagtccaggttcctggaacgtacacagtctccattgacagtgtgagagggggagggtcaccactgatttttaaaatctcattttaatatttcagatatttccaattataagtaactttaatacttcatatgtttacttttttggttatatttcttttagatctacagatatatttagttttttcatactagttttaacaaagctcagagcttacaattttgtctggtgttgtagcgtcacatttgagaactgctaatttgcttttcagatgtgagaagaagagaataattgcaaagtgtgctgtagatgaaagagtttaatgcttttgtagatattttgtgaaaagcagtgaaagtataggtctggttttttaaaaaatggaaatagatggtgcttacattcctacttgattcttcaatttataacaacccaattataaatattactttttgttccagattttttacagaatcaagtgtatgtttgtataaggctacattggcatgagcattagaatgtcataatattcacatttccttttcaaatttaggatgtagtttattacatttctggaattatgcatatgcagaagatctaaagttgaaatttgaaaatttgtaaatacattcagagattgagataattcagtgacttcatggccccaacatacttaactgtcgttcaatatgatattaattgaaggcttttaagaaatccttccaacaaataatagatttctaggtatagccctctgtagttttaccgaacactactttaagtagatatgaagattctcagatcatttgttaagataaagcttccgaaataataatgtagaccctcttaaaaataaaaactaccagagaattaattgctttagccttatctcaaagcaaatggaaacctacttaaacaatacgtcgtttacttacctttgacatatgtggataagggcataaataaaatcacttggaaaaaccttcactgttagatgacaaacttaggtacgtctcaactgggttaggaacataaaaagaaaaaaaaaaaacctgtttatctttttcagggtgtttcagaaagtcttatactttatgataataaattcatcaattttataaataaattaacatacatattttttcattaaatttagtagttaagatgccaatgcatttcattgacaaaaaactgtttaacaataaagaactcaatagtaccaaattcgtaaagaatctgatcttgttccttaatttagcctacatgcattatcttaaattgtgcagattatagaaaaaaacaacaacattgggaactataatagattattcactccgggtgtttagttctgttttgttgaagaaaagggagaaactttcttacatgtttgttacttctcttccccaagttaaggctagactttacggtttgtttagctgtgaagggatgacagacttgggggatggtgaggggagcttagttttggaatgtaaatacatgtagagcttgcctccttttgtttagcatctctttaaactaagacaaaaaaaatcagtgaatgaatgaatagcagcatggtgaaatacctaaatgtttgagttaaaatttttggatgtttgaaatcctatttggatccttttcccagatcacggtgcattcatatgcactcagcaggaaacttcatggagatgcacatttgggcagaaggtctttgacggtgcctttttcttaacttgtgccttttcttctttagaaaaaagtaatggcttaagtctgactgaagaacaatcttttttgtatgttccttataagaatttacttatggttcacagatttttacccaccatctatgtctgcaatccttggatttaaaatagcatatatcctactgcagactacaggaaacaccaaattaaagacttaatgacatactgttgaaaaagacaaaaggcaacaaattataaatcaatccactaaacctttaaagtgaaattcacagaaaaaaaaatgtgcatttgagctaatggttttgtgaagcattagagtttttgtgcttatgtaaaccaaaatacaggtaaacttggcggtacagttggatttgaatccagatattttttaaaaactatgatgaacatgtggaatgtgcttcttcactaggcaacaagcctagtgattatatgggtatttcggtacttctaaatgctgctcatttaaaaaaaaatgtttacccctttttcttatttttagaattattcttcaaatcctgattgtttatggtatctatctagtaatgtggtggtttattaattttcctcttcagatttgccttagccatactgaagtccattccgattttcttgacgtgtaaggaagtgagagtgtcttttgtctattgcttaagttctggggaagggagcaagaacaagaggctctgggggttaatggaagggttagagaacagatggaatgggaaggaaaaggaggccttttaaaaactagttttcaaaagaccctggttactgcctctggctcatttttctagccttccctttgggagggtttgttgtgggtttttgttgttgttgttgttgttgctttggtttggtttgggtttttttttttttttttcttccacaaaggcactgattcccccagaaactctgacagaacatgctccttctgggtggtgtgggaatgtcaacctgagctggtaacaatgcagctagtagtgaagttatcataatagcctagagaatcgtggctgcagggcccctgataattctgtggagctgtatttgggactggaggtgagacagctctgtgtcaatgccttagaaccaggagagcctggcagagacataccaagctgaaaacaccaaagcacattcagacctcactccacttcatgacagttcatttgaaggtaataaaaatgactggccagggtgcacatgtttgcatgtgagtgaacagacacaccattttagggaaatatgtcaagcctaagctctctcttgtgctcacgggtggattctaaggtcaaatatactgatgaagattccatacacactattatcctcattgttgttatgatgtttcagtttcaacagagagctggatgcaacacagggcagaggcgacaaaggcggagcaaatccaatgccagaacttgagagaaaagtagaggacgcaccacgattaacatgttggcaaattcactttctttgctgttgtctttgcttttctttggcttatcatcatttacagagttggtctttccaaccatgaaatcgatctctccgttctcaaaaatttgttttaaataagagggagggaaatagatgacagtatatgcataagatggtagaatatattttgagaagatattttagaaggtattataaggcatttgactcctcagaaaagtcagagggaatgtcctatatgtaaaatgtagcatgaggaggttaacatagactgtactgaggtaagaaaataaggttgcatttgagcgaggtctgtagcatgctgtgatgagcttctcagcacacagcaataagtggaggcctgaggaaaaacaattttactgtgtttgcaactcttctagaggttcattaattgtcatggggtggggagccggtgttaaagacaaaggagcagaaaggctacataacttgtggtcctaaagcaacatgaaaatgtggggcttcttgtttaaaaataaagaatttcatggtagtgacagcagagtgttaaagcaagtgtgggcccttatgagtcctgtggattgtgactgcacaggtgacacacccatgaaactggcctgcaagaggaacctgtcctgcactcgttccatggccaggagcatcaatgactgcccctttttcactgtctacttaccatctctttcacagggatttcgtgaagattacttgacagggaacgacaaacacttggaaaaaattcaaaggaagcaaattatatattatacactataagggagagagaactttctctctaccctctgaatgttcaacaaccaagcctaagacatgaactgacagaagacagattaacaggagaaaaaccactttaattaccggtagccgcaaaggagttccacaaaacatgagacaagggaaaggtcagatgattgaagtttatagaacatcctcagctacagaaaggaaaagggcttgggccttctgggtggtggtgacacaagttacaggagggtgaggaatggagctgtatggtgaataaaagttgtattattatgcagataaagtctctctggtaatagagcagccttcttcctgatacagttactttactaatgtagacttcttttagagatagaactttcctttataaaagtataggttttcagaacaagctcaaaagatgccaaaggggtgtattttggggttgcacattctggtctctcacagtcatattttgggatggtgtgtcctgagcaccagcaacacacccatacacacctcaagctatgttttctaatatacataattctttaataaaagaaagattattgacataattaagggacaaccaaatgtgttgtgaccatctaaaatgtttgccatgtcaatagtggaatgattaaggtaacattattaaaaagtgtcccaactctaaagttctgtgagtctaatatccgtaatcattttatgaagatttataatgtaaaagcctgcctgatgttcagcttaataaaagagtaacttatgtatggatgttaaggagatagttaaactgaatacctgatacaggttgagcatcccttatccaaaatgcttgggactagcagtgtttcacattttggatttttttcaggtttgggaacatttgtgtttttttgtttgtttgtttgtttgtttttgtttttgtttttttttttttgagatggagtttcgctattgttacctaggctggagtgcagtggtgcgatcttggctcaccgcaacttctgcctcctaggttcaagcaatctctcctgcctcagcctcctgagtagctattacaggtgcccaccaccatgcctggctagttttttgtatttttagtagagacggggttttgccatgttgggcaggctggtctcgaactcctgacttcaggtgatctacctgccttgacctcccaaagtgctgggattataggtgtgagccaccgcgcctggcctgggtttaggaatatttgtatttcacttatataggggcaaagggaaaaccttcccttcacccttggaaggttcactgataaatcaattcaaaaaggcagatgaagagaaaaggcacacaaatatattaacttgcacacagggcagaaccacagagtgattacatacaccctaaaggggttcaggagctcagaagcttatatacgatcttgaggttaaaaaagaatgggaggccgaggcgggtggatcacctgaggtcaggagtttgagaccagactgaccaacatggcgaaaccccgtctctattaaaattacaaaaaaaaatctagccaggtatggtgacgtgtgcctgtaatcccagctacttgggaggctgagacaggagaatagcttgaacccaggagatggagattgcagtgagctgagatcatgccacttcactccagcctaggcgacagagcaagactctagctcaaaaaaaaaaaaagaatggggacttgggtcctggcaaaacaggttatgggatgggggacaagaggaattctgatgaagggcaataaatgattacttgggagaattaatggatgaagaacagagattaacttgtaaatagttctctttgggtctgctcaggtgtccttacattcttggtcttcttttctgcaataggtacaagataacagggaggagaagaaaaacagttgttctccttgtgattcccttggatctttaggtagagtgggaaaaaatctcttccagtgtctgttgttctccaagagcctttaattcaaaatactcattataccagggagtagtgttttggggtgaagttccctatgatccttcatttgtttgttaaacatctctaatctgagaatttgaaatccaaaatgctccaataaccattaactttaagcatgatctttgagtgtcatgtcagcactcaaaaagtttcagattttgaaatatttcagattttgtaatcacctaatgggttcttcttacccactgtgcagatgaagccaattcactgagacagcattattgcattagagaaagagttcaattattgcaaggcagcctagtggaaggatgggagttattactcaagtctgtctcctcagaggttcagaggttagagcttttcaagggtagtttgttgggtgggggggtaagggaatgggtgctgctgattgattacaagtgaaatcataggggtgtggagaacagcccttgtgtgctgagtcagcctgtgggtggggccacagaactggttgagtcatgagtcacaggtctagatggagtcagtcagttgccaggatgcaggatgaagaaatatctcaaaggaccaatcttaagttctacaatagtgatgttatttatagtagcaagtggggaagtcacaaatcttgtgacctctggtgccttataggaaggtaagctatgcctgcatcttaccagaattcaggcccttcccataattctaatcttgtggcttttcaaaattaatcttacagaggcagtttcagtccctgaacaaggaaagtgtcaattttagggagcaactagcatcatcattgtttcaaagttaaaatttaaactaaatctctccaatggttagcttggcctgtgcctgggaatgagtgaggacagccagcctgtgaggttagaagcaagatggaatcagtcatgctagacttctctcactgtcataatctttgcaaaggtggtttcagatttttcagattttctgactagggatgcttaacctatatgagataaaacttaccaacttaaattcattggcttgcatatttttaacttgtaaaatgaaattagctttctatactcagttttcaaaactaatagagatgtcttaaaattgaataaaagaaagtaggaaaaagaaagaagtccgggcgtggtggctcacacctgtaatcccagcactttgggaggctgaggtgggtggatcacctgaggtcaggagttcaagaccaccctggccaacatggtgaaactccgtctctactaaaaattcgaaaattagccgggtgtggtggtgcatgcctgtagtcccagctattcaggaggctgaggcaggagaattgcttgtgagtgagccgagattgcactactgcactccggccttggcgacagagcgagactccatctaaaaaaaaaaaaagagtccagcgtggtggctcacacctataatcccagcactttggtaggccgaggcgggtggatcacctgaggttgggagttggagaccagcctgaccaacatggagaaaccccatctctactaaaaatacaaaattagctgggtgtggtggtacatgcctgtaatcccaggtacttgggaggctgaggcaggagaattgcttgaagctgggaggtggaggttgtggtgagctgagatctcactgttgcactccaacctgggcaacaagagcaaaacctcgtctcaaaaaaaaaaaaaaagaaaagaaatattattttttgttgtttgtttttcaacttgcatagcctgggttaaatgcagccagtgagtaataatgcaagtcctcaatcattcaagacaaaactaaattgttgtctttagtgatacaaaggagagtgaccaaataagagctagggaactgagagacttcatgggatgcatacaagcatggaacccataaaacaatcaaaaccatgaagaggactatcagccagttatagaatctttatttctggaagactacaatatttgcttatctaaagggatggacagtatcttctctcatctctttcagagctattatttgatctgaaatattacaaggctataaaaggattttataatgtttgcatgccattttaagaacacatataaacagtgtatttaaaatctgttatttttatacaaagtgatggtaatttgttaggtatcgctagaaatgctaccttaaatttacaatatttggtttgtctattaaacatttatgctcttttttttttgagacagagtcttgctctgttgccaggctagggtgcagtggcgcgatctcagctcactgcaaccttggcctcctggtttcaagaaattctcttgccacagcctccccagtagctgggactacaggtgcgtgccaccacacgcagctaatttttgtatttttagtagagtcgggatttcaccatgttggccaggatggtcttgatctcttgacctcgagatccgcccgcctcggtttcccaaagtgctgggattacaggtgtgagccacaacacccggcccttatgctcttttaagaccgtagttttccagcatttcctccactgcctttggttagactgcctgcattcaagcttcccttcctgaattttctgacttagcaagccttttaacttcggtgtcttaggttgttttaggttaaatgttctgggaaagaagttaaaaatggaactcatgctatttttcaccctaaccacctatataatcactatcaagtttctacccatgaagaatagtatttccaaatactgacacctttttctgttatttatttaaaaacaaacaaaaaacaaaacaacaacaacaacaaaaaaccaacctcttctgattacaggagaaatgtgctcattttaagaaatgcacacattactgaaacgggtcatatagaaagttgaagttctgtgtaatacaactttttgaggtaataatggtggaagtttggtgaaacacttaaattttacagttttataatctacaaagccataatgtatagaactctggatattcacagtatatatttctaaaggttgaattccttatatgccaacttctgtgaaactacacttattttcactctagagacttaaccttgaatcgtgaaatctgctcacggagggctttttccactcccggcacaggctaggcatctgtcttataatttggccttttatcacttcactaaggacttcttccacagtctttgtgagagctgattttttttttttttttttgagacggagccttgctctgtcgcccgggctggagtgcagtggcgcgatctcagctcactgcaagctccgcctcccgggttcacgccattctccggcctcatcctctccgagtagctgggactacaggcgcccaccaccaagccccgctaattttttgtattttcagtagagacggggtttcaccgtgttctccatctcctgacctcgtgatccgcgcgcctcagcctcccaaagtgctgggattacaagcgtgagccaccgcccccggcctgatttttttaaaattttttttattttactgatttgatggagtcattgttgggatcaataaaataatgcgataatttcttcagaaaccattgtcatctttagatgtccttggtgttggacagtcttgggctttgtattgcaggttattattattttttatttagctggcggttattcagagccaagtctggtgaatattttgaatcatgttggttcccttccagatatggtcaaagatgaggtgatatctactaggcattgagactgtttgtcttgaatgtcttgttaactaactctctagataattccagtggaaatactaatgtttagcagtgacagtatcaattggaatattgcctatcttgacaatttttttagaccagtgttttggaagtcttaaatttgtagctcatttattgaaaaatcaatctacttgttttacttcattgtcattgctttgacacttataaagtaattattaaatgtaaggtgaatgttactactatgcatggattgtttagcaaatctcctgttcaaggagcagatttttagtcctgttgagcctgcccttcaggaagaaatgaagtgagtggggcagtgtttttgtgtttttcgggagggctttccttttactcaggtctgctaaaagaatgcaaatcgcttcaaaacagtcatcattctccctttctttgtggccttatgtgttggtcttaatctcctcctttctgtctttttgtttttgtttttttcctcagtaaagagagtcaggagcctgccctttcctccctttctctcacctcacctccagggtggcctgagaattgaggaagaaccttaaattctgctctttgttaagagctctgataactggaactgttggaatattgctaaaatgggttttggagatgttccctactctccctgcctgccatttccacagattactgaggattggctctgttgccaaatgaggctgatattgagcctcaaattttgacccatttttcatcaagtttgtcttaatatagaagttgcaagatttagtagtgcagcaattattgttcttatagaaaaagtcaactgcatgtttgctgaattccatctcttgggctgaagacaaaagagtttgtgcacaatattcgcagtccatagtgttgtaagcaggaatgtctgcagcagccagagagttcagggcaatgttttttgacctgaaacagttacctacctagcaaatgtaatacaaagcctaagtattactttctatggaatgtggggtgtttcataactaaacaaatcagtgatgctggaataatatgctttaaaaaaaccttacaaatctatatttgagtgaatgaaatgaatgttagaaagtttacaatttttatggaaagctggtaattttaggttgttgggtggaggaaaaggagggcaacacactttgctaagttacttgaagttcctgccagtactgctgccttctcccaaatgattaaaaagtcgaaagcaactttgtggcaatttaacaatgatggcaaatacacagaaatgcagggagatctttcatttaggctgtcaaagatcagtgggaattaaggcacctttgcatttacatatataatatgaagcaccttttgttttatatttcacaaattctaatggacattttatttataatgaaacatgaatactactgccaggatattctaatgaaaatgatcagctcattttcaaaaccttaaaataatgaacatagaaataatttctagtgtctagttctgtaatcttacattaaaatagtttcttggacctccaatcagccacaatactgaaatgacaatgccagaatagataacagagatgcaaaatgatttccagttaatgacattttatcttattaacgtaagtattaacattttaatctaccagaggaaagaagactcaaatattaaaagaagaattctctggagcagtttacaaacattttgggaaaacaaggatgaagcacagggactgggaaaagatttcagtgtttctcttgttcacatgacagagtagcagtcaaaatacacccctgtgatttgtcgcatctgttagaaatgctgcagtagctaaagggacgttccctggctttggtgaagaaataagtaaacaagccagtgtaaagagaaaaccctggttagtgatcagaggccacattctccaacccctgcaagttctagcttcgtgtaatgccagaaagagagaggtcaaaagtctgagagaacttttgttatgaaaagtgtttgtttgtatttttaaaattttggataacataatccagtgctttgggtacaaaggtttgagcaatcggcaccattttaataatgcatttagtagtcgcaatgcattaacacttaaagagatagagtctaaaatgcagttcatgtacacatttcacagtctgcctgatatttattaagacacaccttcttttccctagataccttttctcactatttctgtcttaggtggttactcatctctcctcactcttacatgtagtgttttaaaatttcatatatatgcccagaggactcttggcatttaaacaagtttctctacattaaaaacaaaaagtctgtttctgagttatagaagttatttagctcctctgacacataatgctacatcagcttcaggacaatcaaatatagctgcttttagagacagcagaactaaagcaggagccggtctgtgcatttttgcatgactcactgagatgtattgaaggtctgagtctcatgcagaatttaaccctctctttcctgagactgatgatgttttcatataatctacacttcctctttcaaatggtgaaggcagacaagacccccaacattgggagctgcttttgatttgaaagaatgtaagtgatagaggactcaggcttatgtatcttcttttggctcaagtgtgcatttctcaaaaagaaggtctataaggaaagaggcagcaatgatcagtttgttaacatgtcaatattgtgctcctatgctaccttcaggtttctcttttcattgcaaaactggccaagtttttttattttagtagagacggggttttaccaccttgcccaggctggtctcgaactcctgagctcatgtagtccacccacctgggcctcctgaagtgctaggattacaggcatgagccaccgcgcctggccactctttcttttaaaatttaaagataaaaatattttatttaaggccaggatcatatgccattttagaggggacaaaaactgaagatgctatagggagaaaatctgttgaaatactatttgaataagatgaatatatttaaagctagaaggccagttacttgcattttagggtagtaaagaaattgaccaagtttatcaaaacaccattggctatccatcttgaaaacgcaaagagtattacaaaagtgcataaaactgacaaagagcccaaggcggatcaatacttttagaaaatggagaattatgctttagaaagccacagacctgaagttttgctactcttctttcaaaaactgttttccagaaatcagtcttaaaacactaagaacaaaatgaaatcaagcaaggcagaaccagccccaattaaaaatttgactttcagaagagtaaaaattttgtttcacctaactttatttttttgaaacggagttttgcaacctccgtctcctgggttcaagcaattctcctgcctcagcctcccgagtagctgggattacaggcatgcaccaccaccccggctaattttgtatttttttagtagagacagggtttctccatgttggtcaggctggtctcgaactcccgacctcaggtgatccacccacctcggcctcccaaagtgctgacattgcagacgtgagccaccgcaccccgcctgttttacctaaccttcacatggacaatgcactcaagctggtacaaaattcaaaaggtatagaagggtgcatgtagtgaaaagggaacctatccattccccacctcatggataacaatgacagcctcattttaagtacatttagaacaaataaatgaaaggaaatcaataaatgttatttattttgtctgaacaagacttttttaattccattctgtgcaaaatattaattaaaattggaacagtatgttctccatccctgtttttcaaactgttggttgcagcatgattagggagtcatatacagacttttgtggatttcatgttaaaaaaaaaaatcaattgttataagagaacacactgttttgtaaaaaaaaaaaatcttttttgttgtgcatatgtatttacacacatatatccatgtgtactcggtctcaatatcaaaatatttcttacagttacttatggtcaaactgtttgaaatacttgtatttaatttttctggtgtggcttttcagacactctggaaagcagaactaagaaatgatttctggggtatatctaggaaatgtcacctcagttatagcccagaaacaactgtggccacaattatgaagacagtgtttacactaagaccatggatggaaccaggcttctggattcagtagcctctaaatttaaaggggtttgccagtacttgggagatgtaaacaaaaacagtcaataaagcattcttttttttttttttttttttttttggagatgtaatttcactcttgttgcccaggttagagtgcaatgacaggatctcagctcaatgcaacctccacctcctgggttcaagcaattcttgtgcctcctcccagctacagcctcctgagtagctgggattacaggcatgtgccaccacacctggctatttttgggtttttttggttttttttttttgagatggagtctcgctctgtcacccaggctagagtgcagtggtgcaatctcggctcactgcacgctccgcctcctgggttcacaccattctcctgcctcagcctcccgagtagctgggactacaggcgccggccaccacgcccggctaatttctgtatttttagtagagatggggttgcaccttgttagccaggatggtctcgatctcctgacctcgtgatccgcccgcctcggcctccgaaagtgctgggattacaggcgtgagctaccgcgcccggctatttttgtatttttagtagagacggagtttcaccacgttggccagggtagtcttgaactcctgatctcctgacctcaggtgatccacccgccttggcctcccaaagtgctgggattacagacatgagccactgcacccggtccaataaagcattcttaaaagtgttaaaatatgagacaaatattatatgctctaccattataaatacagtcacctgggggacagactggatcctgtgaacaattgagctctctgggtctttgggaactaaagaagagaacagaagggcaaatagtataggacaccagaaggtatgtttggagtgggggtgtcttgtcttctgccatctactacctatgtgacattaatttaatagtttgcttagcctcacgaagcctcagttcccatatctgtttaaaaaacaaacacgggctgggcgtggtggctcatgcctgtaatcctagtactttgggaggctgaaacgggaggatcacttcagctcaggagtgcgagagcagcctggacaacatagtgagaactcctccctatttaaaataataataactattattcaaaagaaaaaagaaaaagaaaacacacattagaatttaaaaactagaaagagaacacttgttttgcaggattgttttgatgattaagttagcagaaaacataatatgctgactagcacattgtaggccctcaacaaaatgtacatttcttttcttctgtatgtgaactcattgaaataaacttcagctataacccctcttacacacacacacacacacaggcacacacacacaaaatcacatgtaatcgcagatgctcgtacccctacaaatttgtaaccatccagcagtatttatctaatgtcctgtaaatatagcactaccaaactctaaaataatttaccagtaagtgcaaatggctctgtgatagagaggcggcaatcaatacataagtggataacagtgtggacttgagatctgccaccgaagccactgggcaagttattcaacctcactgtcactgttctacagcttcctcatctatagcatggtgagaattttttttttttttttttgagacacagtcttgctctgtcaccaggctggagtgcggtggtacggtgatctcagctcactgcaacctccacctcccgggttcaagcgattctcctgcctcagcctcctgagtagctgggactacaggcacgcgccaccatgcccagctaatttttgtatttttaatagagacggggtttcaccatgttggccaggatggtctcgatctcttgacctcgtgatctgcctgcctcagcctcccaaagtgctgagattacaggcgtgagccaccacacccggccgagaatatttaactaccttactggtttgtgtgtgtgtgaatttgaaattattatacgtaaagtgctgggaatgttgtccagtattaagcaaagttcttcctgtcacctaagtggcaaagcgatggcaaggaaattggttactgaaggaaagtttcctatggaagtgcaaaagtaaggcttttgtgagattttaaggtggagttagtgagagactatcagaaaagatggagagatttttattcacacttgtgtgccattgttaaagattccttttaatactcttcatgtttagtttgggaagtctgtgtgcttcttgtgtttaaagttactgactgatacgcttacttttgtttctaacagttttttatgtttcttttgtttctaatgaaatatgcccattagctgtattttttggtgtttgtttttcgtttttaaaaggaggggcacaagaatgatgtttctaaatttctcaagtttaattccaggccaaagtagagatagatagatagatagatagatagatagatagatagatagatagatagatagaaagaaaatattttctgactgacattctgacattccattccagtcctttagatgttagactacaaacaatcacaggtgaattctttggcaacttaaacctgttttcatagctcaggctttgtttgagggaaaacagtttgattttgaaggaaattttcaaaattctcatgaaagaccttcagcagaattgtggatcttcaatgtgcatgtacttttcataactcctatctataaaaatccacatttgtgagaaatggctggctgataaatgtcaccagtttgaggatgtaggggattgtggtatgtagccatgttgttcccagctcacgtgtggttgttggccaaatttgaagcaaagagatacagcttcattcatacttatgtgtcattattccattattccattctcactgtcactgttagataagtcttcagctgtgaataccacatttcccccactgtggtacattgtatttgtaacttccaaaatgagctagttcataaactacattctaagttaccctgggagcccatttgctcattcagaatatattttgaagcccatgcccttcaccacagtgcttcaggtacagcccagagtgtttacacatttagtctccagactaaagcaggggctttttccattgactactactaatggccaatcgtttttgctcaatttgcattgagttcagaaaattattaactatcaagacctggttaaaggcctacttttgggctttctcacaatgcagaatttgactggtcaatagaaaccactctgggtatctctgaaatgacagagatacacagaatcattagcaatgagagcatagttagaaattcagaaacatatattacagggcagcaagaagagacctgtgatacagaacttgtcaactttgttgaagaaatttgcaaatatatgcatctgttagcgatcagtgtcctgacttaataggcaagtttaaaattactgattatgctgatgtgcttctgatttctttttgcaaaacagatgagtagtttttattccaaaatttgttccaaatcctattttttggcagtgcgctaggtttagtcacagtgtgaataaagtatgctctctctgtcttgattactctgcctaaaatatctcaacacagtgtacatttggtccctcttagattattacaactaatgttaaacatcaacaacttcttcttttaagctaatgaaaaagttgcaattgacactcttattacccttatgacacctccccaaacccaagttcctcttctcaattctccactattttgactactcaataccctctctaggtcacttcctttgcctctcaaccattgccttttggttttgtgtccctccattaatgtttagaggacgactgatgtctttcattcatctttggataaagggcaccattattaaattggctttgctttattccatgtgtgtcctggatctgcctcccctcttagtagccaaggacacatttctgagttctctatctatgcttgccaaaatgggaaaaagaaaactgttgaacctgaagtcttgtaagatacgtaaccaattcaatccatatttttcatataagtgattttttagcgtccagtgactccaaccattggaagctgtggagtagatgaagagttgtttgtgccttgtggcatttatcttgggtatggtccatctgtaatgaatttgagtcatgagatataaatcatatcattataaagagcctaaaatgggccaacacgagaatctagcaatagtacaaggtgtaatggtactgagaatttaagacagaacttgacctcagttattttcctttggattgccagaggccagtagctacatttgctcctcttgagataagcatttaaggatgttccttcagccattgttgactcaaattaagcattgcatgaagcagcattcaacccttaggaaaagttagttgagttgccatctttagggatctaagatgctggaacagtaaactttcaaaaaatgctttgatgctcagatttaacaaaaagttaaaagaaaataaagcccttaaaaacaaacctaatacacttatcattgttgtattagtatgaaatgttgtttctttacaagcctaaaaggagaggtcattatttttgtagctttccatagaataaggagattgatactttataatgttctggaaaccagatagattttgaagttttgaaaaggttcagtggtggtcatcatggagtagttgagaattgtctaactagagtggggtattgactttacaaatatttatcaagtaccttctgcatccttagcactctgttaggcactaggatatggggagcttgtgataaagagatggaaaagatagtggctctcccctcaaaggtgtgtataatgtattaaggtacataatgcaaggaaatgaataaaagggagggtggattactgagtctagtacctaagcacacacaacccatttctgggggagagggttgcaggcagggctggctacataatttgcagggcatagtgcaaaacaaaaattccattgttcaaagtcgggcaaaaagtaccattaaaagtactaaaatataaagttttatcctctgctcatccgacttcacttacaaaacacaaattcagagataaaattattaagaatttcaagatagtaacagcagagtactaaactaagcccagagcccttctgagcctgggccccttttgaaagtggggtcttaggcgactgcacagtggctcacacactcatgaggccagccctgggtacaggggtgattcctgtgaaatctaatatgtcagcactaaaccttttttcaaggaagggtttatatagagaaatttgaacaagtttgtacagatcaaaatggatatgttttgttaggtatatgttttatttatttccctttttttggttaggaattagggacagggattatttcttataagggaagacagagactagggtatgaaaaactcagaggaagtatcagacttggagaaatatagtgatactatatgtaccgcagagacaggctgggtcatttgttaaactttagtgcaggatttgccatccagggttttggtacccaaggtggcttaatatttatgacacatctttctacatcagttgttacatcattctctcctttttcctcagtttcaacccttctgaagggtagctgtttgcctcactcagtataatttcactgattattccagatgtaccctagttgtggtgagagtctatccaggcgttattgcaggcagacgtgatgtccatttatttatgtagattaccaccctcacatgcagctagtgaccagaagaaaggttttcaaaagattgaaaacttctaacatagagttggtgtttttgttttttgttggacaatagtcaggggagagaatctgtagcagattcatttcttttccttggcctaaaagccttgctggagcctcctccaaacttaaaaaaactagaggaaaagaaaagagtgttctttgaatccataatacatcagtctgcagtgtagcttttcttttttgctaattttttctaaggaagaccctcatggactcaatatagatatgagtgaaactgctgtctcaaaagccttttattaactagctgctaaattttatgacattttttctgtctactataccccacccttctctgcttcctttttttcccttatttttttccttatttttatttttattttattttatttttgagacagagtttcacttttattgcccaggctggagtgcaatggcgtgatcttggctcactgcaacctccacctcccggttcaggagattctcctgcctcagcctcctgagtagctgagattacaggcatgtgccaccacgcccatgtagagatggggttttctccatgttggtcgggctggtctcgaactcccaacttcaggtgatccgcccaccttggcctcccaaagtgctgggattacaggtgtgagccaccgcacccagcctttatgtatttatttatttatttttatttttatttttttgaaatgaagtttcactcttgttgcacaagttggagtgcagtggcacgatcttggctcactgcaccctccacctcccgggttcaagtgattctccgtgcctcagcctcccaagtggctgggattacaggcccgcaccaccatacctggctaattttttgtatttttagcaggaacgggatttcaccatgttggccaggctggtcttgaactgccgacctcaggtgatccacctgcctcggcctcccaaagtgctgggattacaggcatgagccaccacgcccggccttccacttatttttgaacatttctttttgtttgaagttcccttcttcctgagcttattttagcattgcacatgcctacttgttttcctacatttcctttcactgtcttcttcactcagttttcttttcctctctattccttgagtatagacacttaccgaatgttggtcctacagccttctctttattctctgttctttctacctaggagatttcttccacttcctggccccactcttgacagcatctcagtgttgatgtctctgtcttctgactccagatccaaatgttactctgagtgtgcttaatgtgaatgcaccaatgccccattagcccccacatcccttcagcatcgtcatgttaaataaattccttattccagtgggagtttacttattctgtctcctcccactcatgtctgctatttgggacatccctcttttggttggtgttgccctggttctcattggcaccaaacccaattcccatgtctgtctctcctttttagaccataagcagggaccaggccttttcattttgtaactgctgcatgtagtacagtgcctggaacacagctcagtaagtaacaagctgattgattcactgaattaatattgaacggcttctctcccacctcccagttagttctcaaagacttttcatgccctcatctcttatgtaaatattccacttttattcttttgcatctctaaccttccctttatgtttctgccagagttgtcctccttacagaagtccctttctgtgcagggctgtgccttattcatctttatataacccaagtgctgaaccgcagtgccttgtatacagtagccacttaaaggtatgctaaatttgagcggagctaagaaggaaggaaagagatgtgaggggtgacacattgaaaggaggattagaaagataaaaggggagaaactaaagggctgaggccagccagtctgtctgtaaacattccattagtcctggtgttagattggataaaagcttttttttttttttttttcctgatgtccctggacacttctcctttggaaaagaacgatacattattcaagagatgggaaaagcgagagaaatagggctcagtccccctcacaaaaatctggttcatagaacccagaattttggagctagaaaatgcctgagtagagcccagctctcattctgcaggcaaggaaactgaggcatgaggaggttaagtggcttagcagctagctaatgggaaaatcagcagtcaaacatgagtctctttcttcctctcccagcacatccatcagtaaatcacattttctcttttcttggtggtgcaggccagtgtttaaggtgagggattatgattactaagagactaggcattttaaagaccctttgctaatcacaaatttttgcaaagtttacatcaggctctttttaaaggactcagcatggtgggaaatagattagtggttttacatttcttttttttaagtggagatttccaaagcgtccctctttttattttctttttaaaataaaattgtacttagcataattagagaaacagattaaagtggaattgttctggctaaattggaggtgaggaccataaattctgcttgctgcccccttccccattcacctccttcatcctgctcctggatgcccactgaagaatctgaaaagtttcttagagaacactttttatccagttaatcaaatgacctccaaggtccctttcattctctcatgctatggtgctgagatgatgtagtctgttgccatttggatcattattgaaaattatcaggtgatgaggatttagggagagtgaaacaagaagtggtgtgggaaggcctgctattcatcaggaaataaaaggtacccttaatttggtttttaagaaatagtcaggaaaagagattgatagggcagcagagagactgtctactgcttggagattttgaatgctgtggctagagtgataaacaaagacaactcttagcagtgggcacatatcaagaaatgaagaacgacgagcccagagttgaggagctcagattagggaactcttctgagctcaggacataaagaagaagacagattatttggagaaaaaagtttgaaaggtttttgtgaactggatttataatgtaaaggacagaactttgttgagttgttttccaaggttcagcaaacgaattgcatttcagcataaatttgtcaaatggtagatgagaaatgtattcttcaccctattgaggtagtaatgttggaaagagatcttgctgtacgatacaggagaaggaaggtttattaaactgcacagaatgtctgcaagtcatcccacatctctgaactctttcttcccatctgtaaaaataggaagattataattttagatatgttgagcctgtgtccatcccagtgctcctgctcccttctgccttcaggcgtaaggtacaggtgtaaggtgttagcctaccattattctctttttatctagggtctctttggatcagtagtctctaactagagacaataccattcctacctaggggactttcacctaaccagcctcagaaacctatttttaggtagcaaaagaaaaacatttgtcatatagacctagatgttagctgcttgtcacaagctgaaggggtgttctctttttttttttttttttttttttatgagacagtctcactctgtcacccaggctggagtgcagtggtgcgatctcagcgcactgcaacctccgcctcccgggttcaagcaattctcgtgcttcagcctcccaagtagctgggattacagatgtgcaccaccgtgcccagctaatttttgtatttttagtggagacggagttttgccatgctggcaaagctggtcttgaactccagacctcagatgatctacccgcctcagtctcccaaagtgttgggattacaggtgtgagccactgcacccagcctgaaggggtgttctaatgttgagtatgatcacacatgcatcagctctgttctggtactcgcatttcgtcaaccagaggctcccctcataaatgtcagattagtcccaggagacactagtctgcaatctgatttcccttgccattgtccccagctaggcggcagagctgagtttaactaaaagtttaagaaaactgggttttttgctcacccatctagctgaacattctcctgaacatctgcctgaacatcctcctctgaagaagccaatgagaattattgataatgtatgaacccccaggagacaaaccttttacaaataaactgaaagacaaggaagtaaagttatatacagttattaaggaacactcaaccacccctgctttttaaaaccacataatgaagctttagcacatttcacccttattctgtttttgtttctgttttaagctagagactctttgggtcagtggtttccaactggagaaagtacttttttgcctaggggactttggggaacgtatgggaatattctgattatcactataactggggtcactgctagcattttgtgggcaggggccaggaatgccaggacaaggccaacccccgaaaagggagaattatcatatcttaaatgccaggagcatcctcattgaaacactgagcattttaatgaaaatgtactcttcctttgccaaattttcttactgataaactatgataaactactcttgaagatgagtaatctatagctattttgcttatttggaccttagtagtgtaactgttttctgacattggacactcaataagtgtctgccaaaatactgagaattatgagtagtgaggcatcaaatatttaaaacatatttctgttttatacataagcagtatagtcatttttaaaatcatttattgcacacccctaatgtagacaaatgtttataaaatattatttgaattaaatgcaactgcacactcacatcatttaaaaaaatccccaattgcttttttttttttttttttttttttgtgacggagtctcgctctgtctcccaggtgtgcagtggcacaatctcggctcggagcaacctccacttcccgggttcaagcaattctctgcctcagcctcctgagtagctgggattacagtcacccaccaccatgcccagctaatttttgtatttttagtagagatggggtttcaccatcttggccaggctggtcttgaattcctgacctcgtgatctgcctgcctcggcctcccaaagtgctgggattacaggcatgagccaccgcgcccagcctcccagttacttttaaagaatgtcttggcacccattaagaaaagtagatgtttagaccaggtacggtggcttatgcctgtaattccagtactttgggagactgaggtgggaggattgcttgaagacaggagtttgagaccagcctcagcaacatagtgagacccctgtccatataaaaagaaagaaaaataagtgttgatttgaggtttgtgtgttttcatttaaatggctctaatattaatattaatggcataggactttcaaaataatttaaaaaaaattttaaaacaaggcagctggtatatggcctacatttagatgtgagttgcagtttttaaatgcatcttcactgttggtggtctcagcaaagtcagttcagacatggcaggagttagggattgggaggaagaaaatacaatttcattttcctcatgttaaatgtacattatcaaggatccagtttaaatgtgtctaagttaattggagcccctaggagccactttgctaagcagctaattcagcctctcttccccagagaggataattgttgttaaaaaacaaaaaagtaaaatgtgttgttttctcatgtaattatgtaactgacatctttatataataatacatttgggtggtctgtccctgaaacactcggtttgttaggaaacattacagtttccacaagtaatcacttactcctaaatatgatgaaagaatttggtagtattacattgcatcattgcattagtcagaagctaaactttctaaatgagtttggcactggagaaggcttctaggttttttgctatatttttcttaaatgtcattatatgagctaaaatattcttcaggtggaatactatatgacggaatgtttaaaagtaacaaaataccaatctgttaaagaaaagagcaagggtcccaaagtggcatcttttcagtaattacattgtgatatccttatcaacgtggttattccagtctctttcagctcattcatttacccccactggattgggttaggacgcatgaacttacttgccatagtgaaccacaaatatcttgacaatggacacactgccattaaaatggagttcattttaatacatgttggtaataaggttctgtgacttgctgattaaaaaatgccacacttaatgaaactggaattttccctttaattctattcttctgagactagactgccttggtcctgaggagacacccatccctaatcccagattcagccaggacctgactctaactaatcatgatggctgattattccacctgagggcatgttgttaaattgctattacctagaattgtgtgggaggcttttgcaaagtagcagagagaggaaagaaagtgcacagacagataaaactctaaggagggaggagaaccccagggcaaaagcaatatgaggtaaacatgcagaaagctgaaataggcaaggtaaaaggtgcagaaagttgaaataggcaatgtaaggacagagtttgatttcaaagatagaaaaggaaattgtgagatgattgcaaaactgtcatcatcatcattatcttcatcattccttctttattttttagagacagggtctcctatgttgcccaggctggtcttgaaccctgggcccaagggatcttcctgcctcagcctcacaaaggctaggattacaggcacgagctaccatgcccagcccaaaactgcattctatgactcaatcagtggtttatcctcaacagcaaatagaaataaataggctatgctcaaaggaaagaagagagttaacagtttggttccaaggctaacgactaggagtgggattattctatcattaacaatctgcactgtgtttcctagacgaaaatgtgtatcaggtgaaatgacacatttctacttaacatcatcctaaattagtgcttttaatatctttttttccacaaagaaatggccacattttttaacttctttttttttttgagaaggagttttactcttgttgcccgggccagagtgcaatggcgccatcttggctcacagcaacttccacctcccgggttcaagcgattcttctgcctcagcctcctgagtagctgggattacaggcatgcgccactacgcccagctaattttatatttttagtagagacagggtttctccatgttggtctggctggtctcaaactcccgacccacctcggcctcccaaagtgctgagattacaggcgtgagccactgtggctggcctgtgaccttttcatgcaatgtaccaatactgtacagccattgtgcctaaatatgtgatatcttacacatttgagatggatgggcatctaacatggtagagtccatgacattgttggtactagacattaggttttattacaacacaaaacgttagttatttgagaaaataaaaatgttttttcctagtataacctaaatggaatcacatgccagatacaaaattgtgaaagcaaaggtgaaatttaatggaatacagtttaaaaatgcatttgggtaggtactgccataaaagtattgcctttaaaattgtaacctaacctggaatgacagtgcttttaactaggtataagatgtgtgtagaagcaagtatagatttcctctgtgtgtgttatatgtatactgagcaggtattgaagtgttatgacattgttcagtcattcaggaaaatggaaagtctacttgtctttatttaaacttgtagttcccaaactgtataccagggcacccaagggtaccacagtcaactcataggggatgttttaaattttagaggaaaacacagcaatgtttggtatctgtcaagtacccagtgcattactagattgaggtagttcacagcttcaacattagatggcgctacattccttttgacgatgtcatatctttctaaggttgggtttttggaggttaacttgatacaaagcaagtactgcatggcaacaatttggtatgggaaatgaaggcaactctatccaatatgattccaagatttgagaagttgtgcatacccgaaaggtgtacgcatactttagtgagtagttgtggttaagaatgaaataaaaatataccttttttctttcaatttataagtattatttttttcaaactgctaccaagttattaggacagctccttagtagttgtttgaacgtaggtacttaataagttaactgttaggtatttcttttggcctaaagacaccaccatagtgggagattaatcactctcccactacgtgggagattcatgaatcaagaaaatttgggaacctctgctgaaagttaacttggtgtcttggagttgaatcaaacatgtctatagaagattttgtgaatagaagcatacttctgatcttgctctgttcttccccacctgatagggtcagctacagagccaaggtgtttacactcattgcttcaattgccccccgccccccctttttttttttttttttttgagatggagtttcgagcttattgcccaggctagagtgcaatggcgcaatctcagctcactgcaacctccgcctcccaggttcaagcgattctcctatcttagcctcctgagtagctgggattacaggcgcatgcaaccacacctggctaatttttgtatttttagtagagatggagtttcatcatattggtcaggctggtctcgaactccttacctcaggtgatctgcctgcctcggcctcccaaagtgctgggattacaggcgtgagccaccgtacatggcctgcttcaattccttttatatcagctgttcaacagcaaatagagacaccatgccccggctccctttcattctgtttagatctaatagaatctatattccctaccaagtataacagatgcgttcctaaaatttgaccataaaataagttccagtacattcaattcagttatctcattggcttccacttcaaaaatggaattatacccatggggtgggggtagggagtgagaggaattagactatatgaaaagactatattaaaagcaaatatttcaaaatcaaacattcaaagagaaaaaaaaatagtgtttctttgttaagatattcggaataagccacaaaaggcaagcacataattagcacataatttcaaaatttttttgaattttgaaaacaaaattcaaaaaatcagtgcagcaaataaattagaggtgctttttcaattcataaaataattcttctcttgcagaatcattcataagagggttccctgtgatatgagcatccccagggcatttaaaatatgattcaatttttaaaaattctatttgtacccagctttcttcagaaacacaactttggttttaaacaaggtgcatctgtttccagaaaatgctttcccatggatctgtgtgtagaagggttgtattgcatctggagatcacactcagctcaagtcaagattctctttgaacgcaccaagcttaggagctaaactgtcttggctgtgtgcttgtgtttgatcctgttgggaatgaagctaattgtttaagaatttacatcctggtaaggctgttagcactttaaattgatttggtatttttaaaaacttatttaagatttacttatactgaggaacctggctttccctgaactaaaaagaagaaattgtatttccagattttacctggcttatcatctgcacaaaatctactctaggagcattcttttatgtaacaattgcagtgggttttacatattgtctttgtagcaatatgatgtgtttttttttaactattttttttttagagacagggcctggccctgctgcccaggctggagtgcagcctggctcactatagtgatcctagctcactatagacgacctgggcttgagcgatcctgctgcctcagcctctcaagtagctgggaccacaggcgtgtgccaccatgcccagcaaatttttaaatttttcaatgggtttcactgcatttcccaggctggttttgaactcccagactcaagtgatcctctcgcctcagcctcccaaagcgctggaattacaggtgtgagccacagtgcccagccttgtgctttctttaaaactttttcatgcctcccaacgtgctaattactgccctgttcttaatctagtcttacacaacaaagtgcccttaaaactgtttacattcaaagtgccttttgcataagcatatcaaaattctttataaacactaattaattcacactattctgtggaaggagtcgctctcatttttcttttcaaaataaggcttttggttctttggcattgtgtacctgtcttcctacagagaaaagttatcgtcagtttctcaagagcagagaatcaaacctcgcagaactttataaacctcacttagcattgagctttacaaacaaggggatacacacacccatacacacacacacacacacacacacccctccctggtaagggtttgttgagaatgaagatatcacacttcatattcaacagtgggtagatatatctaaatatcctagaagtctatctcatgctcagggtgattattgactcacattttaagaggagcctgagatgaatcttttttgtaaagcgaggaatgtttttgaaatttgaagaatcaccgtttagtcagttaccggataactagactttaaagtgataactagactttaaatttggccataggtgcatttaacacacgatcatagaataacattgagtgttcccttaatttagttgtctattattaataaatgccagataatttagaaatgttattttttatccttcaatagctatacaatgtatattttattttctccattttacagaggagaaaatgggacccaaggatgttaagtactttgcctggtgggtggtagaagcagaattccagcccaagtctgactgactgcatagtctggactctttcaattatccattctcctccccaaatcctgttatatctgcaagaaccatttagaggttatctagcccatcagccttgcagataaggaaaccaaaactcagagacacataacttgcccaaggtcacctggtgttcagttcttgatgcctctgaataaccttgaaatatgctcaatagatgttgcatatttatctcagctgattgcagcttttcagaaattcaccactcctccccaaagttgatacactaaccattatgcttggtagtacttagaattctagggaactcatctatcggcagcacctctggacttgtattgaggttttctctcatcctttatatccttacaggcttatcttcttcaactgacctacttcatgttcttgctacagtctaccattaaaattcagataaacagtatgctgtaaaattgtcttttggagagtatcctggtcattttaggcacgcaaaatgtattcagtaataaattaaagatcttgattcaatacttgattcaataccctataaatattaaatgtcaactcattcttttttatcctgttcctaatgatgtgtattcttaaccctttagaagctaacatttaatgagcagctgttatgcgtcaagaactataataaagcaacttgtaactcaactcacctgattcttccaataacttaagtgggggctattgtccatgtagtttttttcaactataaagttgaaaagatcttatctcagaaaagctttttttttttttctttttttctttttttctttttgagacaggctctcacttggttgcccaggctggagtgcagtggcacaatcatggttcactgcagcctagctagacctcctgggcctcagtgatccacccatctcagccacctgagtacctaggaccacaggtatgcaccaacacatccaaattattattattattattatcattattattattttgttgttgttgttggagttggagtctcactctgtcgcccaggctggagtgcagtggcccgatctctgctcactgcaagctccgcctcccgggttcatgccattctcctgcctcagcctcgggattagctgggactacaggcgcacgccaccatgcccggctaatgtttttgtatttttagtagagacggggtttcaccgcattagccaggatggtctccatctcctgacctcgtgatccgcccacctcggccttccaaagtgctgggattacaggcatgagccaccgcacctggccccaaattattttttaattttaatttttatttttgtagagatggggtctccctgtgttgcctaggctgttcttgagctcctaggctcaagtgatcctcccaccttggcctcccaaactgctgggattacaggtgtgaaccatcgagtccagcctcagagaagttaatttctgaaaggacccaaagctctattctaaatggaaagaaacttgacttgagcttcccttcttctttaaagaatcattaaccacaaaatctgtaatctctctttctcactctctttaaagatgataagatactcaaaataattcagaatgtgtgagttggttctcaaaaaaaaaaaaaaagtgaaaggggtttgtggatggaagcccaattaaaagcttaaaaggattgggcctgtgcgcatgcatgtgtgagccttttctgcaaattatgtggaaggacgaggctagatctagatgaagagaaaatgaatacaagacacccctccccaccccacccccggccagatggacttaattaaaagtttgtcagcctggctacatagttctggaagcagttcaatattcatttctacatttacacaaaatctctagtatacttcattgttaatgtaccttctaggaaaaagatgaccttttcaaaacataacttgggcctcttgagccatatcttgaaattatatcatgttcctgcctagacaccatggagggctttctactgcccttgggataactgctgacttcccttcagccatctccactgcccagtttccatcctcagtctctgtcattgaagacttggccattccagctgtactaacttcttttgtaccaccctaccccttctagtcttagatttaaatgtatatatatttcttttgtgttctccacattgcccaacattgtactggatattccttaatcccatcccctctttgtttatgacggttcctctgtttgctcccgaaatcctgctcttgtagactctcagcctcattagcaaaggactctgtcaggcttcttcactattgtagctccagtacagaatgtgatacatagcagatgcctaataatttcttttcagtgactgaatgaacgaaaactacaaagttgaaactctgtctctgtgaagctgtcccattaccccaagttaaaaaattactttctcttcagaattattatagcaattccgtgttcctcatctgattcttcagtgtttgccaaagcatagtcagagaccacctgcattggaaccctctggagtgtttgataaaatgcagattcctaggctgtaccctagaccagtgtaatccgatgtctggagtggaggctggcagtctacattttaacacagattttagctcacattaaaattagaggcatctgatctgaactcttagctctgttagaagtgctgatgaaaagcaaaataacaaaagatggtcaaaattgaaaaataaattatttctcccaaaataattatcaattgcctttttggtttatttttgctggtttttattttctctctagcagtatattgtttgttctaaaatcttgcctgaaaccatttgaaagttgaagtcatgatcacttgaaagaatgacagaacataggcagaaacataacattcagggtaaactatatgtttgagagtcagggccgaaagaaggtagataggtactctattcttttatttagaacttctggcagaattgtaaatgagaggagaggaaaaataaaacactgactaattggatgtggacatgtgttctcttagctctgtggttacagggaattagtggtgatcagattcaaagactagtgacactgggtgtcatccccaagccccaccgaaaaattcctacagagagacatcaggcagtgaaggctgtcttttgagtgtctgaaaacgagaaagtcaaatctggggacctttggatttggggatgttaaagttgagtatacgggggttaattttgtcggttgctctacttttgtgtgtatttgaaaataccataaaaaagaatgatctgttgtatacccatgtttgtagcagcattattcactgtagctaaaacgtagaggcaacccaagtatccatcagcggatgaatagataagcaaatgtactatatatacacatgcaatggaatgttattaagccttaaaaaggaagggaattctgacatatgccacaacatggatgaattctgaggacattacgctaaatgaaataaggcagtcattaaaagagaaataccttgtgattctcttaaatcaagaatgcagagtagtcaaaatcacagagacagaaaggataatggtggttgccagggtttggggagagaaataaatgaggaattactgttttatgcataagagtttcagttttaaaagatgaaaagagtaatggcgatggatggtggtgatggttgcacaacattatgaatgtatttaatagcgctgaactgtacacttaaaaatggttaagatggtaaattttatgttgtgtattttaccacagttttttaaaaaaatctgagcccaacctaataggagatagggggaggagtgtgagagtgtgagcagagggagtgaggatgtgggaagaaagacctgctgttcttggaggaggggagtggtggaaaaggttgattatgtagaattgggagcacccttggtattgtgagtacaacatttgcatgtactcaccctctatgtaaacacatgggctagaatctggctatgtagttgttccattcttgacaataatttagatagtgagctttttacatagataagtagaaagttcaatatttaaaaagtgacccccttaattaggtcctgctataaatgaagctggattttacatatgtgagggtaaattggcaggataaacagccataattgaaggtcaaaggaagtggcctagctacaggttcagtccttttcagttctgaatcctacaaagattgcaggaatcactttgaaaatgaagaaataagtggggaagttgggctgaatgtataaataagggttttctcagtaaattgaaggcagaataatctaaccttagcaaagaaaaaaatataaattaacacaaggggaaaataaatagatggtaagtaaaataatgtatttggctggaaatgaaattattatggtaaataatagttattaccaggtaatacattgaccttgaaaaaagatggaggtggttattgttgatgatgatgttaattgtagagcagtgggaaatggaaatcctaaaaggcatcactctatcaactaaataggcgttggggcctcaaaagaggtttttttcattaccattattctcaagcccgtggaactgaattgagtaactctccagaacataatgtcaaaaacagagcttatagattgaaagcaaaggaaaaagcaaaagaaagggaaaagcaagcaggataagagagatgaagggaaactgagagccagggtttatctgcatcaaataagaccacaccaagaatagtgtgttcagctatgagcagctcaactccagatgtggaacagctggagagagttcagaggaatgcagcaagaaaagaattagaccaaacaaagaactggagagcatataaaagacagcaggctttgagaatgagtccatgatatgagtccttttctaatttttatggcaagggttaagaagtataagaagttattttatatatagttcaattttcccttaatatccagggcggtcactctctaagtatgtgagtgcttgcaaacagaccagaagaaaagtttgtgcacatagcccgggtggaccttgagctctgtagtgaaatgggatgcagtgaggataaagagagcataaatggaagcttggggagacgactgcgggagtgcgggctgtccaaatgactggatggcctgtggtgggagggttagcagttccatccttggaggagcattaaaagtatgctgaactggtcctagaagttttattgttgggaatcatccggagtctggcagaggactgcgtgagattacctaatgggtttcttccgtctattttctgtgattcatccaccctagcctacggcagtacatggttgagtcagtcgaatgcagatatctcattaaaagggggaattaagggctattaaaaatgatttgctgctactcccagattaaagaaagtagaccaatttacaattacagtagctatggtccaaaataaaatgcaaattgtcaaaatgcaacagttatagggaaacaggagtgaaccagagtgcaccttctctggcattgtttttagagaatggaaggctgaaagtgacattgctgagatagtgtgatttaagcagccttcccccacatgctttggagaccagagtccccaaactgaaaatttcagaagtttcttataaatgggtaacataaatttggagagcagatccaacattgaatgctgttttcctttaagatgcaagaggattaagtcaattgatgatttttttaaagaaaatttatttttaaaatatacttatgtacagcaaagcaccctgataactcaaagcaggtttacaagtttttcagtaaaaatctagaaattggataaacaacactgaattaccaaatgattatacagtctctatcttaacaaaaactgaccgctgtttattatctacataatactatacgccatactaaaaaagactaggaatcaactgattccatgactggcagtttacataagaaaaaaccgctgggtgcagtttacaagaaaaaaataaacaactgcatcaaaaactggacaaaggatatgatcagacacttctcaaaagaagacatttatgcagccaacaaacatatgaaaaagtcatcatcactggtcattaaagaaatgcaaatcaaaaccacaacgagataccatctcacaccagttagaatggtgatcattaaaaagtcaggaaacaacaggtgccggagaggatgtggagaaataggaatgcctttacactgttggtgggagtgtaaattagttcaaccattgtggaagacagtgtggcgattcctcaaggatctagaaccagaaataccatttgacccagcaatcccattactggatatatacccaaaggattataaatcattctacaataaagacacatgcacatgtatatttaccgtggcattgttcacaatagcaaagacttggaaccaacccaaatgcccatcaatgatagactggataaagaaaacatggcacatagacaccatggaatactatgcagccataaaaaaggatgaatccatgtcctttgcagggacatggatgaagctggaaaccatcattctcagcaaactaacacaggaacaaaaaaccaaacacctcatgttctcactcataggtgggagttgaacagtgagaacacacggacacaggaaggggaacatcacatactggtgcctgtcagggggtgggggggtaggggaggtgtagcattaggagaaatacctaatgtagatgacaggttgatgggtgcagcaaaccaccatgacacatgtatacctatgtaacaaacctgcaccttctgcacatgtatgtatcccagaacttaaagtataaaaaaagaaaagaaaaaaaaaaaagaatgtttaaaagcccggggttatcaagcagtgggaaaaacctgggagtgttcagtcttgaactagctttcattccatttctgaggctttcagagtcatccaggttctccttacctcctccttagtgttctctcttggttccaagattccgctcttgaaacctgccctactcataagcctcaggtagcttcctcttgcctatacgaaaagtgtaagctctttgcctagctttgaaaatcttccattatttcttttttcttttctttttttttgagacagagtttcactcttgttgcccagtctggagtgcaatggcctgatatcagctcaccaaaacctctgcctgctggattcaaagcaattctcctacctcagcctcctgagtaactgggattatgggcatgcaccaccatgcctggctgattttttttgtatttttaatagagatggggtttctccatgttggtcaggctggtctcaaactcccaacttcaggtgatccgcctgcctcagcctcccaaagtcctgggattataggagtgagctactgcgccccgcatgatttctttcaagagttcttgcagataccacaaattaatgtttttcgagtttttaaattaggaatccttataagtgattatttttatgagaattgtactgaaatatatgcaccactgctcacagagtatcagttgcttgcagactgtgttctctgaatcctgtgtgctcccagaaagactcaggcactagagtttccactctttctcactcttattcgatgactgaccctcagggtgccttctggcttaccctatatccagcattgcactgggataaaatttaataaaaccaaaggatgactgtcctaaggcaataattaataccattctcacatattctttaattgatgtttactaatatttattttatcatttttcactaccctgtttaaaaataaataataatgattaggaaattctgtaggatttttttttctggatctagttattatatcttcagtttcttgaaatataagattctcctctgccactgtgactaaaccggggttcgttctgaagtaactgaagtttgtttgaatctagaccactcccctgtgcagtcgggttccttcagtaattccctctggcaaagggggcagggcagtttttttattgtgttgctttgtttttttgaaactgggtctcactctgtcacccaggctggagtgcagtagcaggattatagctcactgcagccttgaactcctgggctcaggtgaccctacggcctcagcctcccaagtagctgggactgcaagaatgaaccaccatgcctcgctacagggcagtttgagagaagcctttgggtgtattagtgaggtgctctgatttggagttttcttttccttaaacatttgagatgaactatcttcatctgaggaaataagattcaatgctgtaatcttagccccttgttactgctttcctcttaaatctgagggttttttgaataactcacagtcctcagttcttagctctgtgggattaaaagtaaattaaagtgaacaaatggagttaagcaggtatagagaactaaattctgataatttctcacatgtctccatccacctcctgtaatttaacgattagtgtcttctgacaagaaaaaactgtgtttgtattctgggtaggtatagtttagcgcttaaaattggggcctaaagtcagggcttaagcatccatcagacctctgtgtaaattttatgtttgccacttgttggctgtgtgtgaactctttcctcatctatgaaatggagacctaacaccaatttaataccttaatcataaagaatcaaaaaaggtaatgcaaattaagtgtttagcacaatgctggcactgctttgatgctacttaaaagaatgactgcagattgcttttcaaactagtactaagaaatgggaaaatggaagatagagataatgaagtatgtctttgagttgctttggtatttttgcaaaataggtgttggagaagatacataaggaaagcaaaaagtataatttaggaatcataggtttattagccaatgaaatcaatagcactcaaaggaataaataaactgtatgttcaaaatagtagttgaagaaagaaactagagtcaagactttaggccaggttcagtggctcacgcctgtaatcccagcactttgggaggccaagtcaggtggattacttgaggccaagagtttgagaccagtttggccaacatggtgaaaccccatctctacgaaacatacacacacacacacacacacacacacacacacacacacacacacacacaaaagactttaaagactttcaactgtgactgaggcagagttgccaagcagatgctaaacaaattattttggcatctcttgctggggaaaattcccccagttttatgtgtcagtcacttaatgggaggacatgttggtatagtgaaggagtggggctttagaatcaggccagccagaattgtctccagccctatgactgcttctggcacctctgctaaaaatagggattaaaagaggttgctatagtatgagatttttgttgttgttgttgtttaggttttggttttgttttgagacaaggtcttattctgttgcccaggctggagtgcaatggtatgatcgtggcacactgaagcctagacctcctgggctctagtgatcctcccagttcagcctctccaagtagctgggactacaggcacataccaccatacccagctaatttttttgtttattttttttgtagagatgaggtctcactatgttgcccaggctagtctcaaactcctgagctcaagcaatccactcaccttggcctctcaaagtgctgggattataggcgtgagccaccatgccacagcccatgaattttaatgaaatatatatataaagaccaggtacctaagaagtgatcaatagatggtaggtattgtaacgtataataatctgtgtttgcttcccctgttgacagagcaggttcactcacttctagatgtgctgttctgaaagcatagactcagaacaggtagcgctcaggagtaacctgacccacagagtaaaatgagaatactgactcccttgataaagacacaaagtctcttaatgtagccatgtctgtgtggttctggaagttaatattctacccttacaaatttgaaccacttactgtatgataatgctttatattttatacaacattgtatttacaaaggagattttcaatatattgtataaatacacttttctcattccctttgtgaaaagtatagaaacttaacctcaattggttgtgcttctccttccactatttaagtggccttttacaaaagttggatcttgaggtactttgttactttctataaaatatatatgtgtgtgtatatatatattcttatatgaacgtttctcagaatactggactttagcatacctcttgcctgctgtgatgcttcttttatttctttcttttcttttcttttttttttttttgtagagacagggtctccctgtgttgctcaggctggtctcgaactcctggcctcaagtgattctcccatcttggcctcccaaagttctaggactataggtgttgagccatcatgcttgccctgtgatatttcttttagttgctgtgacaaatggatgactccgggagtagatagtaaaacaagtttcggggaagctaaggagagatttcaacattcagtctttagaacattagggtgggcattaagatttgatgtcaggagtctcttattctcattgcaaaccaagtggttgcctgtgactgaggagttatgtcccatacatacagataccactatttcaaatatagatgaaaatatatgtgaataccatgtgattattaaaaatacaaatttacccataaacattcctgaactggcagtgacttaaagcattgtatattttctcaggctacagatactaagcaatataccacttgtaggattcgattcttccctaggttcctttttttccccctttctttacattgaaatgtttgggaacacatgacctagacctttttggatttaggtgttagctggagactaaaaccactaaataaagtttttgtctcttagatggttttgtgctaatgagtctttcctcctattataggcgaaaagcctcagaccttccatttaagtggtgcactttgtatctttcatctaaagaacataaaatactttataaaactccacagtgatagaaaggaggaaaagttgttggggcgggggggcagaggaccgggggacttgcccaaggtcatacagggtaccagtggaagcactgcatagagagcaccagattctcctgacttgaattcattgttctcagaccttgtttccagagacttgataagacttttctgctctaatttcatcatcaaagagcttggtttgaaatacttacattttgtgctggtatctttcaaaatatgatatcttctatcagcagggtcaatcacttgccttagtttgttctggcaaaattgcatggacttaaattctgaagtaatattgatctatattccataaaaactcagaccaggtattcatgacacagatttgatgggaacacttacagattaaacaggaatcatctaagaagtgaagttattactgacagccttttagttcctcaagtgggaaaaattactatgtaaaagactactgtgctacattaaaacaaaacaaaacactattagtgggaattttttttttttttttttttttgaggcggagtctcactctgttgctcaggctggagtgcagtggcgcgatctcggctcacgcaagctccgcctcccgggttcacgccattctcctgcctcagcctccgagtagctgggactacaggcgcccgccaccacgcccggctaattttttgtatttttagtagagatggggtttcaccatgttatcaggatggtcttgatctcctgaccttgtgatccgcccgcctcggcctcccaaagtgctgggattacaggcgtgagccaccgcaccttgcctagtgggatatttttctaacctatgccttgaatttcctagttttcacattataatttggagataaaagttaacaaaactattttgttagtctcttggtaattaatttatgtttgttataaaaacaagaacaaatgaaatacaactgtagtccagagacaaatcactactgggtataaatgctccaacagaaaaatccatgaagttcgttactgttcaaaaataccatcctttgaaggggctgcccgtcttcttcaggactaagcgatactcacatactgccagctccctacacctgcctcccttgatctatgtatagaactttccttctagaaacggacatttctgaaccaccagcaccacgacctcaagctcgacatgccaaaaattgagctcatcttctctcaaatgcatttctcttcctgtttgtcccatatcagtgaatgatgcctccatcgagtagtcacttggggcaatcttctagactacggtttggggctgcttgccagccttgcccctccacatttgcccaagttatttttttctgtgctggaaatctactcatctcagtcccctgcttaaagttaagtggctccccatatccattagtataaaagttcaagttctttggcacagcatagaagacgctctatgcatagaagcccctcatcacttatttccagccactctggctcatgtgacatcccagtgaaatgttgtagtttcctaaatgggtggtgtcactaccctgttcttggagcatgtgcaaatattattcctcctacctgcatgtacttcctttctactctagactcagccctagtgcatttttgacatgccacttactcagctattttggtactcgtgtggttgcctatcacccctgctacactaccccagtagaccctcagtgcagggattatgtcttatttgtgtttttgctgcctgcatagcatagtatctgggacctggagggtgcctaaaaaatgtttattaatagatgaatgaactaaggaaacaggaaatcaatttctttccttccaataaacagaacattgatggcacacaggctaaatccaggatgtgcgaatcttcaatcctaaaggtatcatgagtctgtgacagcgggtagctttccttgatagaaaggtatggccacttaatatcctttttgccatttttgttattatagctacacacccagatgacgtaggcagagccagggaccctggccaagcagctgtactgatgttcctagacctatcagcagccttagtcaggtcaggtcaacatgttctactcactcacccacctgcaagccttgtggatggttgtgtctcaactggctttggtccttccccagaagaatcatatgacacttttttcttttaatttcttcagtttcagattctttctcaataggacccttggcattgccacgccccatgggcctagatgctcctagtatctttccaatgtcaaataaagccagcaagtattgccaagagagggaacagaattagatctgaacatttcacagtcctttgcatgctgctgcttactgccctacatcatgtccatgtgaaacactaaccaaggatttagggtgcccgtaaaggccaagatccttgagaacttcttagaggagtagtgtaacagggaggaccctttgcaagtgctttgtaggcaagctctctttgaatacagtgcttagattaatgaaactgagatatttccagcaatggacagtcaccaaatcaagtcccagcttgctgtgactggaggtgttcttagtgacatagctaattggaagctgctgggggatccctcagacatcatttctgcccacctatttcttgtttttctcttacaaattgatatgggagaaagtttagagaaaaagatggaaatacttagaatgggaaggaggaaagactgaggttgtaggagtaaggaaaaaaaaggttagattttcaggctggagtagaggatgttggtttcctggtaatcaggcccacacaaccactgctgtcagtcctgctcatataccagggttcccctcatgcctccttcacagcacctttgtttacatctccctgaggtacacataaccagaagactttttatactgttgccgctcaccttcttataactgattaccacctcacagacagaaagtagaatggagaagttcagtaaagaagccagaagatcagttttctctcctaggtcttggatacatcacctatgattatcaagggctctctcaagattcaaccagattttaattaattctagaattagagttgcctcaaattctgtgtgcagcaaagcagaggttgtcattaatccattaataaattggacatttaagatctataaggacatagtttttgttctttattttgttaactattagaacaatgtcatgtttattaaatatttgtcaagtgattgaaatacacaaatgatgttagacaagaagataggctgaaagtacctaatatagtgacctttagaattctgccattatttccaatatctatgcttttgatctctgctcacagatacatggtttccaagcagaaaacagtgagcgcagagaaacttctgtttgcttttaaaataattaatgtctaccaatatatggcagaaattccttaaaggggcagggcgtgttttatagattacatttaagggcagattattgaggaggaaaacaaatcacctagtaacctcataaaaatgacatttttcagattaagtcacaagtaaaggagacttaattgacactcccaggcacttacaaccacttagctgcccaggcactgcctgtgctcactttcttctccagccagatcaacctggtaagtgtgatccaggtctaaggcaacttgccaagaggtgggtacatgacagtagcttgctaaagggtaggctgtacccaatttaaaaatcagttgaaaagttaacatgggatttgtttctgtgggaaaacagagtctagcttgtatgcaatgttatttatgtggaatcagtttcccagacagaccacaaacccaaaactctgttattagtctcttgtcttctttttttctgtttttttttaatgacagggccttactcaaagtcaacataaaattttaaagactttattatatgcccacatatacaaaagggaaaaatcgttgaaaatagcattatttatgcatatgataaatgactgtatcatttcagcttataccttttaaaattgcccgctcacagaaactaaaacatcatttaacctcagttaagtctgtgtatttttgtttgtttgtttgttttgttttgtttttttaagacagggtctttctctaccatgcaggctggagtacagtggcgcaatcatggcttaccacagcctgctgaggctcaagtgatcctcccacctcagcctcccaagtagcaaagactataggtacatggcacaacacctgactacttttttttttttttttttttgagatgaagtttcactcttgttgcccaggctggagcgcaatggctcgatcttggctcactgcaacctctgcctcccgggttcaagtgattctcctgcctcagccttccgagtaggtggaattacaggcgcccgccaccatgcctggctaatttttgtatatttagtagagatggggttttaccatgttcaccaggctggtctcgaacttctgacctcaggtgatccacctgcctcggcttcccaaagtgctgggattacaggcgtgagccaccatgcccggcctaattttttatatttatttgtagagacagggcttcactattttgccaaggctggtatttttttgacgttaaaaaactttaaatcaagtttatatctgctgtaaatttccattctctgtttatttcttggacctttatgcttcgatttctcatactcggctgtgctttataaattgcagttccttagccatcactgccattgtcatcactagtaaataatatttatttagtgcactcatgctttttctatagcagttgctccaagtaacatcacagttgcacaaacaagctggatatgatagagtaaaaagtaattaatatttttagaaatttatcttcaagtatctttaggtcattgcaaacatgaaaataaggaaactctgctagtattaaacttgaaatcacttccagtacgtaacagaaggcaagagacagaccatcagatagattttattcctatatactccttgacgttgaaatctcagtacaataccgatattggagggtgagactaattctcatttgtgatttaactgtttaaacaggttcatattttatgttccacagaaaatgccttgaccggtgatctcggtaaacctgtataataataagacagtgatttctggctctaaagtctctagaagaaagtcataattataatgttttatattagtttggacacatgtgaaactgacacaattcaactgtttttgacgtacaaaaaaagaaacaaatgttacctggtgcaacctaatatttgctttgtaaagcaagcataggagatatctgtactaagacccggaaagattaaatgacttgttcaaggtaataaggttaacaaatagcactacttgaattttaaaaaccaagttttctgagtcaaagtccagcatatcttctactataatatactgtgctactggggaacaaactaaaataatgaaaataattgtggtattgaaaatatgatccaaaataagggaattgtatttttttagggaggaaaaatgactatcaatgcgggcaggtgattaatcatctgggaaatttaaaagtatgaagaacgtttgctttgcctaattatttacatttatgatccaagaggggttttttttgtttaatttccacttttttcttttaactctttccaaatttattaggaaattctaagcctttacaaaagttgagagaatagtataatgaaccccatatatccattaccagttcaacagtcaaaaacttacggataatctttttaaatctatattcacacatacttcctattccacactggattatttttaagccaatcccaaataccatgctatttcatccataaatatttcagtatgcataatagatgattcctaatccatcttttaggcttatttgggaaaatgaacattgcaattgttgagaagcaaacaattaaaaacctttaagaaattcagcaaagcatatgcaagggctgtttagagctaaaaaattgcatcacatcagcaagaattcagttaccaaatcttccctttctggcctctcagcatcagatactagctgtaggtatgccaaggcatgcataaggagacttgttattgagcatgttgtttaggatgtgtgtgcaccaaatatgaaatttaacatatcatccaactcaagtaatgaaaggctcttcttttttttttaatcacttcatgtggtgtttgtgtgtggatgcctttttaagaaatagctgtgtgtaaatgaatgaggataatgtactcaataatttctagtcatataacctgaacgttagtgctacagagatagcattggtcacttctgagtatttttgttattattctttaaatgcttttgttgtctaattggaaaactggtaaaatactatcattttccagataaagttcttggcaagttttctctctttcaaaccccctaggacaatccacagctccatgaaaacatgagtcaaatacattacaaatttcccaaggagaatcaacatcttttccagctgtttggatagtctgtctaacatctgaccacagccctcatctcccagtattgttctgggcttttatactttaactttgatttgttcaatgttataatttaaaaatcgagccaatagtttgagtcttcacttttttcttgaagacttataactcttatcatttattacttttaacatttataatttttttttaaatgccagccacagaagatactgactccttaggcacttctctttgatagtgcaaaaattccttcttaatgctatcaaacttttctctctcttttttcctccctaggtatttttctattatttataaagtgaaatgtctcccaactataacatcaaaaagagctaaacttgatctgattgattagtttcaggttttctattttaaatgtctcttggcactagccagtgtgttttcatttattcagaaggaatgcatttgtgatcattccaattaatcccttgtctgttttgtctggcatctgtgtgaaactagttataataactttaaagtttggcaagctgtacagtaaactgcccaaggtgggatggaaaactttcagggcccaatgagtcaacttgtcctccagcctatctacacaaaatcatctgttgcgttgagttgtctctgtaactgttaataacatttgatgagtagttcagggcaagaaggtaaaaccaagcaactgtgtcattaagaatggattccagagttttgaggaccaaatatcaacaaataaaaacggagttctctctcgctctctctctctccctctctctctctctttctcactcattctcactctctgctatagtgtttaggatgagagaatggaagagaagtaagctattgaaatacctggaactttgtttaagctttattcaaagaaaacatgattttggtttcaaatgtatggtagaagctgagtgatattttatggacttttttgtaccctcctggagttggcacaaccggaagaccagtacaccattcaaaaaataattattgaaaccattcaatagctattatgcaccaaactcatcaaattatgtttcatagtttttattttctgttttcattggctatcttttatcttttttcaagtaaaaaatggaaattaatttcaaatttttttgcagccacatttgatatcatttggggggagtttcctctcaaacttcatctatgaagcctgtgagatattaaactagatgcatacttgtacatgcatcacactttggacttacttcttccaaggttctcccttttatccagcatgcaatcacctttacagtatgccaagagagttaaaccacattttcatttacatatgctcatgcagtaaatgcaaagtttatcttaatttatggtattttaagtgtcccagctcacgttcctgtcacaacttctcaaacatgggatttttttttcttttttttaccaataaagagttttagccacttacatttttattattgaaacaaagaaagtttttgtaaccttcttattccagaatattctaggcacttgaggaaaattgtcaactcacaaaattcagagatcactatcccattgcatgctttgtagtgggttttgttgagatcataaagcagaaatagattttttaaaaatattaagcatcgaaaagatgactgaaaataggaacagacctgcttttatctgtttgataattctctctcattcaccagaacgtgtttctaaattatttaatctttctctttgttcactctgcattttgctcctggcaaaatgtgctgaagtcactgttgtcacatgtttttaatttttgagaatccatctttctaagatagacacaaaaagaaaaactaactgcacagaacaccacattaagaggaaagtagttgaagttctgccatgaatagttaccaaaaagaaaaaaagtatgatactatttggccccatcttcctaactagggaattcaaattgttgaatacctaatagtacttttgcaagtatttcagtttttaaaaaatatgctatggtggacaaagcatgcctattatgtaaatatatagttactaaagacactagcatgtatgtgccttttcttcttgttgttgtttgtttgtttgttttttgagatggaatctcgctctgtcacccaggttggagtgtagtggcgcgatctcggctcactgcaacctccacctagcaattctcaaacaattctcctgcctcagcctcctgagtagctgagattacaggcacctgccaccatgcctggctaattttttgtattttttagtagagacggggtttcaccatgttgtccaggctggtctcgaactcccgacctcaggtgatccacccacctcagagtgcgaggattacaggcgtgagtcaccgtgcccagcctgcgtattttaaaagatataagatgtgcccaggtaacaaaaaatgtgtttaaatgccctatatcgggccgggagcggtggctcacgcctgtaatcccagcactttgggaggctgaggcgggtggatcacaaggtcaatagttcgagaccagcctggccgacatggtcaaaccccgtctctactaaaaatacaaaatgaatgaatgaatgaatgaatgctctatatcaagtggtaagcccgtccgaagactgcagtccttcagatcactaggatgctgctaattgagtaggacacagcagcttacagtaaatattactttctggctactttcttatgatagttgaaattacatctaatttatcaagaaagtgaatgcttatttgatttggctatgaaattatgctgctcagttttaagatgtcttcatgaacccagtctcagtgaagatgtttctgtattttagggtttgtttgggttttttggcctcatcctcccacgaatgtttaaaattagcttggcattttaaatctgtgcttttatgttaggtcttagataattataaaatagaagaaaaattaagagcaaaaaattagatatgccaggttttgctatcttgttgaaagtgatcgatcatctgaaagctgtataatttatttagacaaccagttttgtagagtatcagtttacatcatggtgcatataattttacttcagcatactaactctctcttatattaaagagacgaaaccagaagtctaatgtcagcttaatgcccccaagttgccactcacatctctcatttctctagtgacagccaggcttcttgaaaacactgtctgtgtctaacctcccattttttccttactcctctagacctggaatctggcttctcaccctacacccatcacaatcactgaacaataactgctttttacaggactacttctttggtactacatttggtcctcacttctctatttccctccttcatagcttctttggccccacattcaattgtctagttacttatcgtgggcctcctctgtggatcactcttcctccactgcttcttacatgctgatgttccccagcattccatcccctggcttctgatcgctgggcaaatctctcaacatgaccacatgtcctcccctagtttcagcctcactcacatgcagatgattcctagatctgtctcctgaaggcagctctgtgtatccagcaccctactggacacctcacaagtcttaggttaaatgtacaaaactggatccatttttacctattgtttttctacctactcttcttattttctcagaggcagtgaatagcagcaccaacaccaattcttattttctttgtgatccctttgtctcctcccatatccagtttctaaattttatcaagttcactatagccttcatatcctcaaactaaccacttttctctccatcttcattgctgaaatctctcatctgcttttgccttctcccatttggcttgatcttatcattcaatacttttacatgcttttattgtcattctagtgaaattttgaagagagaagagataacttgtgatgaattcattgtgtgtacacggaagtctaagccagctttaaattaaagcattaatgttttggaaaagttagaaaatacaaataaacaaaaattttaaactaaaaaaacctgaaattataatatactgaacactgactcttaactaacatttgtctatattattgcagatttttccattccaatatgtatgtctattttttaaaggggattataatatatgaactgacttatattccagtttagtgtgtacctacttctttgttggtaattatacacctgcagtatcattttttcatgacattattatatggctgcaacacagcttattgaactagtgccctaaaggtagatgtataggatctttccaacatttcattattataatcaaagccttattcatacatctttctgtacttgtacatctagtttctgaggacagatttctgcatgtggaatttgtctcacatatttgcggggatgcattgttttagggcttttaaaatagattgtcaaatagctattgtttgggaaaaactctcaaaccaccttttctctcttctcttacaccaccacagtaacagtcgtcaacacggaataagacttctttgaccaaatgtgtgtgggttgctttccaccaccaagtgagcaattaattctgcagtggcctccaattcaatcccaccactatctacctggagatagtgtgagatcccacatgctggggttcagtccccatgattgtcccaacagcacaccagttgcaagtccaggtctcaagaatttctgaatgaccagctcaagttggggttcccacaactcccacttttggttctgttaacttgctggagcagcacacagaactcagggaaacacttacttacatttaccgctttattatgaaggacattacaaaggatacggatgaagagatgcatagggtgaggtatgagggaaggggcgtggagtctcagtgtcctccctggggtacaaccttctgggaacctccacatgttgagccatccagaagctctccgaaccctgttctcttgggtttttatggaggcttcattacggaggaatgattgtttaaaccattgccactggtgatcaacttgatcttcagtccttttccccttccctgaggttggaggatggggctgcaagttccactcctctaatcctgcatatgtctttctggtgaccagccccatcctaaagttagcagtcaacattagtataccaaaaagacagccttttggagattccaaggattttagaaattgtatgtcaggaaatggggatgaaaaccaaatatatatttcacaatatcacagctatccaaagtgttaataccttttaatacactgcagagcaagagtttgtcgatgttccccactcccacaatagtaatagtaataattcttttacatttttatccaactgggtagatgaaaaatggtatctcagtccatttactccaatctcagacaagtttctaaaatgtttggttgtgtgcttgccaaacccacagtagatcagaagcaggaactttggaagaagaaagatgcactgatatagtcaagtccactggcagcagcatgagtaatagcagacagaccaacagtgagcaaggatacaagaaaccccccacacagaaaaaaaaaaaaagaaaaacagaaatagaatcccaaaatgcacacacagtccatggcccatttaattcaaggcccaaaagcccaactctcttctgtggtctctaaggctttcactgcatttcaacacaagtcccccccacctcaggattttgaaatcttacaaagagcaaaaccttggctcataaaaatagtaattaattaaatgtcaactgttgtcaatcagtttcagaagattgctaaaataatattctttatttaatcttttactaaaatagtctttaaaatgcttacactatgagttgcagagcttcagccttccacttatcttcttccaccaaaataccatgaataaattttgtcctattaaccactatatcatttgattaaacactaaaggagatattaataatatacaaacaagaaatatattctaaggactctgcaaggtccggaagaaagaatgcttctggcagatgtgatacctagctttcaattgtgtgaaaatctacttgtttgaatctctctagagtcaagattagagggcctgggcagaagttaaaggaggcagatttctaacaattaggacttcctggcaaagattttcttatgaaatgttttgcaaattggcaggcctctaaggcatcttagcaatcaataaataacaactatgttttagaggaaagaaaaccaaggtgcacaatggaataagtcgcttaccttcaggagtggggtgggagtataaccccagctatcccaacatttcatccactgctcttttacttgtaacaaggtactcctcagccagttctacattgctagagtgttagctctggaattcagtgtctaatcatcaaggatgttatagaaagtatttctacattaggaagaagtaagattagaagaatacgaaaatccctactatctcagggagcctatgaattttggtttaagtaactaagtgtttaaaaccagtatagaggccaggtgcggtggctcacgcctgtaatcccagcactttgggaggccaaggtgggcggatcacgaggtcaggagatcaagaccatcctggctaacacggtgaagccccgtctctactaaatacaaaacaaaattagccaggcatggtggtgggcgcctgtagtcccagctactagggaggctgaggcaggagaatggcgtgaacccgggaggcggagcatgcagtgagccgagatcacgccactgcactccagcatgggggacagagctagactccgtctcaaaaaaataaataaataaaataaaataaaatagaaccagtatagaaataccttcaggcatctttctcaagggagaagatactaatttttttaaacaaaaggaaaatagaaagtgaaatgactttacagtgggatactatactaactgattttagtgggaccttcctgtaaagtgaatattctgtaaaagggatgacaaatgagtgccacctcctgtccaagatgagggaggaacaggtagcacttgctgagaagcactctgtggccacaaccaggctccttggggaaaaaggcttcagtattctgcacagttggcctcagctgtgggaataggtggcccatgtagttaccatctctcttctgcaatcttcagataaaaagagaaattacaaggtcaaatcaagggaatctttgaatcgagagcatttaaaaataaggcaaatttattgctgagaagaattaactatttccagaattctcgtggcaatcaattatcaaagaatgtaaaatattcaagttactctgtgtatgtgtgtgtgtgtgtgtgtgtgtgtgtgtgtgtgtgtgtgtgtgatggagtttcactcttgtctcccaggctggaatgcaatggcacaattttggctcattgcaacctccacctcccaggttcaagggattttcctgcctcagcctcccgagaagctgggattacaggtgtccaccaccatgcccagctaatttttgtatttttagtagagacagggtttcaccatgttggccaggctggtcttgaactcctgacctcaggtgatgcacccgtcttggcctcccaaagtgttggaattacaggcgtgagccactgcgcccagccatcagttatattttagagtcaattttatattcttgaattttcattttgtatgaatttattttttatgaaattcataaaattgggtgaagaaataaagctgaaacttgcctttcatgtcagaagaccctatgagtttctgtgctggctcctactgggaaacactgtttttcacccaaagcagactaacttaaattcttcagttccagaataaggctttcaagatgtatttttaccatgccaaagtctgcaaaagttttggaaaaccaaaatcataatgtggaaatctgacagtcttgcactgtgatctgcttctttggagataacacgttcattgttcacttgagaaaggggataaatgtgctaattaggtagtaaacatctactctcaaattcttcccatcctttattacctttttgtctatatcctaggagacattcttttctattttttcagacctactgttaataatggggtaatagaggctgtagattaatagcagttcacattcatgtggtactatcgaggtgccaggtactggactaaatgttttcattacctcatttaaagcctggagagttaagtattttctctgaagtcacataacttgtaaagaaagaagctgagattagttttacagccctcacttaaaaaaaaataaaaataaaaaaaccttattttgataactcttttctaaccactgccttctgtttcctttcttctaatatccataggacaattgtcttcataatttaaaattcaaaattttcatatatcctttaggcctttgatccagtttaaatgaaccaaagttaaatgatgaaatctgttcacatcatttaactagaacactactatgaattatttctcattacttttgaggaaaatagagtatacatttactatatatttctgatcaatccttgcatagagatgatgaacaaatgttttggttttgaggttttacaagctgattcagatagatttcgaaatgaaacttactgttcaaaaagtgacacacacaacacactcttgtatggttccaattattgataattggagctggcttccaactcccaggatcattattatggaagattctatagcaatgactatgaattgttttctcagtgaattaatgttgtttggtaacataaagttccagatatgttatattatacttaatggtaattacttgtataaatcatggtagccccagagatggagtacatgggatagaatacacaagtataatttatatttacatcatactttttattttatgtacctgttgattaaaagtattatggatattatggtctccaactgttagctagagtacaaattgtccaaggatgttagggaacaatttggtaatacctgtcaacattgtaaatgcacattcccttttatcctatactcttaccatcagtagtttcccctaagaatatacttgtgaaagtacaccaagctgtatgtacaaagatgttcattaaagtgttgctaataatagtaacaaactgggaataacctaaatgcctatcagtagggaactggttgaattaattacattacatctgtagtatagaactccatatgctccctgaaaaaatatgtgctgctatcgaaagaccttcaggataaaatagtcaaaaaaggcaagctatagaagtctgaacaatatgggttgttttgtgtatattatagacatacattaaattaatacatgccaacacagactcctataacataaaagatattttgttctggaaggaaacacagaaatataatacatacaagtaagaataattaatttatgtttcatgcctttctctactgttggaattttctaaacctatgtgtgtatttctccccctttttaaaatttaatgttcacttcaaccatttggatgatgggattaggtacagcttctttcttttaaaagtggtttttgcatcacaaacaactagtaaattttaaaatataaaatcaatcaatgggaatgatttttttttttttttttttttttttgagacagagtctctctgtcacccagactggagtgcgatagtactaccttggctcactgcaacctccacctcccaggctcaagcaattctcctgcctcagcctcccgagtagctgggactacaggcgtgtgccaccatacctggctaatttttgtatttttagtagagatggggtttcaccatgttggccaggatgatctcgaactcctgacctcgggtgatccacccaccttggccccccaaggaaataattttttgttgtttttaagatcacatgcttgatccttgtatatataattatttctaaagtctatgactctacttattaatgtttttcctaatctaaacagcgatttaaaaaatttcaagcctaaccataaccttgtttcatatagaagcagttatcctatttcctatttatctttggtattccccagtccacaactggatgtagatagagaaactaaagggaagggcagatgcctagagccctaacatttggaccatgtggtacaaggacaagatacaagaaaccctgacaaaaacaagcctcttctgtttcctgcagtgataggtgctttagagaaggttacaaataaagacagcctcaggatcccacccacagtgttccagaaatgtgacctgttatcttttaatatgtgagtataaaaggcacagaggattgaaagtggaatactctgagctgggagttcggagacctgaggtcaagccccatctctgccactagctgtgactttggaagaatcacttaaccctcacctccacaaagaggtgaagtggctacttatctggcaagaaaacaagtcagacatattgatatttatatgatgaaatttcagtcttgcaacttgggcacctattttacaaaacatcttgacgtctctttactcagcaatacaaaataaccacaagagagatcaaccttgaactgaatgctcctgtcacaacagaatagaaaggaggacaagctgtctctacatcattaggtattctaaattctatccttagattaagttagagctcaggaaatctttgtgccctagcctcattggtttgggccgtaagattctttcactgaagcacatttacttttgtagtgacctgagctgtcatcaagggtcacaataagaaaatcactgttaaggatagattatttcattatgtgttttagtgttcttgtttttaaatgtccaaatgttaatatccctttagaatatgcaccaggaaatgtttatctcttctaccagctagattgcttcagcttgtgagataatgagaagatgatatatcattgtacatactcatttgcctatatgaaccaatttctacatctttatgttgaagaaaacaatacccattttaatctcctttgactttcaaacttatatcttcccgtcaagcactttcgtttgaactatagacttatatatctgtctgtctgcttgacatctccactcattaattctttcgacaaatatttaccaagcatctactatatgtcagacactgctccaggcacaacagatgcagcagtgatcaggacaagccatgctcctgtcttggaactttcagtatagtaaagggaaaaaaaaagtaaacaagatagcaaagtaaaatgtatcctatgatagtgctaagtgtgggagttacaatgcaagaagaaaggaaggagagttgccagtggggcagggagtgaggagggaggaggaatgcaacgttggatgatcacgagcatggaaggcctcactgagaaggtgacaaatgatcaaaaacaggaagaggtgcaaatcagtgcagaaagtagtaggaataataagtccataggtcccaagagagaactgcacctctatagccagtgccagaggaaaagaggcagagtatcgttaccccttttatcctagcaaaagcaatcctccaggttactctctcccacagttaccttagcatatcttctacataaaatttattagaacctgaaactaggctcttcgtttcttaatatagatatattgatcatctcccccaccaaaatatgacctctgtgaaggcaaggattttatgtttattttattctctattgtgtctctattgcctagcacatagataaaaagcgcccttgggggatttttgctcatttctcctcccataaatttgcataggtattatcttggcagtcatttggcttaacagtgcatcttttattaatatcatacatttattagccagcacatttatttgaaaatgaaacaaaatttttttaaaacttaaaattgtaataatttttaccatactttaaatttattgagacttgttttgtggtctaatatatgatctgtcttagagaatgtgccacatgcacttgagaagaaggtgtattctgttactggctggagtgttctatgtatgtctgttaggtctaattggtttataatggtgttcaaatcctcttatttcctcactgatttttcatctagatattctttctattattgaaagtgaggtattgatgtccccaattattattgtcgaattttctatttcttccttcaattttgtaaatgttggcttcatatactttggagatctgatatttggtgcatatgtgtttataattgttatatcttctgatgaattgacccttttatcaatacataatatctttttttgtcttgtaaaaactttttgaccattttagctgatattattttagtcacaccaactgttttttggtcactatgtgcatacaatatcttttttcatctgtgcactttaaccaatgtttgtctttggatctaaagtgagtttcttataaacagtatatggttggatcctgatgttttttactccattgtgccaatctctgcctttatattgaagagtttgatccatttatacttcaagtaactaccaacaagaatcttaacctttttgctatttgttttctgtatgtcttacacatttttgtcattccctccagtactgccttcttttgtgtttagttgatgttttagtggaatgtattgttttgattctcttttccttttgtgattttttaaagacattttcctagtgcttactatggggattacaattaatgtcctaaatttctaacagtctacttttacttgataccaacgtaacagcatataaaaactctgcttctgtacggctttgttctcctcctctttatgttgttctcataaattacatttatatattttgtgcccattaacatatgtttaaaattatttaaatgttttttgcatttgtcttttttttttttcttttttttgagacagagtcagtggcacaatcttcactcactgcaacctcctcctcccaggctcaagcgattctcctgtctcagcctccttagtagctgggattacaggcagccaccaccgtgcctggttaatttttgtattttttgtagagatgggttttcaccatgttggccaggctggtcttgaacccctgacctcaggtgatccacccgccttggcctcccaaagtgctgggattacaggtgtgagccaccatgcctggccacatttgtcttttaaatcatgtagaaagtaaaaagaggagttacaaatttaaaatatatactagcttttatatttacctgtttgattactatttttctgtttttgagacaaggtctcactctgttgcccaggctggaatgcaatggtacaatcatggctcattgcagccttgaccttccgggctcagttgattctctcacctcagcctcctgagtagctgggactatgggcatataccaccatacccagctaatttttgtatttttttgtagagacaagcttttgccatgttacctgagctggtctcaaactcctgggctcaagcaattcacccaaagtgctgggattataggcataaatcaccatgcctggctccatttggttacttttaacggcattctttatgtctttgttatagctttgacttactatctagtgtccttttgtttcaacctaaagaactctctttagccttctggtaagggaggtctactaaaagcaaaccttctcggtgctggtttttctgggaatgttgtaatttctgctttattttttaaggatgtcttggtcatatatgaaattcttggtcaacattttttattctttcagcactttaaaaatgttgtcccactcctttttggtccccatagtgtccaatgataaatcttctcttagtcttattgaagctcacttctatgtggtaaattccttctctcatcttgttgctttaaaaataccttgtttcaaaattccttggctttcaataatttgattattagatgttttggtgcagatctctttgcattgattcttgttggagttcaccgagcttcttgactgtatagatttgtgtcttttttttacatttggggagtttttagccattatttcttcaaatcattttttttctttctcttctcttctgggcttcccattatgtgtaagttggtatactgttatggtgtccagctggtcttttaggctctgatcatttttcttcatccttttttctttctgctcctcagattggataattgcagtggacctatcttcatgttcactggttattttttctgcttgcccacatctgctattaaaaccctctagtgagctttttatttgagtcattgtagttttcagctccagattttctgtttggttcctttctgtaatttctatctctttattgatggtctctatttgttcatatgtcagctccagattttctatttggttcctttttataatttctgtctctttattgatattctctatttgttcatgtatcattctcctgatgtcctttagtgcatctatggtttcctttagtactgtgggcatatgtaagacaactgacttaaagtctttatctgtaagtttagtgcctttggtcctcagggaaatttctattaatttcttttgtgaaatttctattaatttcttttgtgaaaaatatataaggcatgcaaagaaagaggaagtatggtcttttgtgaatggaccatacttcctctttctttgcatgccttatatattttttgtttaaaattggacattttgacttttgtaatatggtaaccctggaaatcagtctttcttttcttcagggttttgttgttgttgtttgctgtaagctgcagctgttagtttagtgacatttctaaactattaaaacgagggatgtattctttatcatatgtggtctctgatagctttattcctttagcttccattcagatagtgttctgaaagagattttcttgaatgccaggagccacaagcaagagagaggaagtggggtggggggaagaaaatctctcagggtctttttttgaatgtatatcatgctgtgggtatgtgcatgactttgtaaattctctagtatatatagacacttttgaatgccctgttttctcaaaacaacgacaacaacaacaacaactctctccagcttttcttttccatatttttgggactcgtatgcctcaactttaatcttttgtcctaggcagctgcagggtttccacctcgaatgtgttttgagttaggtgaaacaaagttcttcaggtagcctctagataagttagaaatgacaaaaacaattctttgtaaataaggtacactgtgcagccttcagaaccaggcgccagggtcccacactggaaatccagactgttgcctttaagactgctgctgagccaggaaacaggtttgggccagaacatatgcaactgttactgtgcttttctaccatttttaaattgccttactcttgattcggcattgcttagttgctgtaaacctttgtctgttttccagagttctaacaatgtcaattctcaaagctttttcttgaattttgaatgtttccttgggagatggggcacttggaggtgcctactctgccatttttgctaacatcactttcctgccctactttaaattgtaagttttagaagtgtgttttatttatcgaaaaattctttcttaaactgtaaaatctattccagttttggagctttaatttcagttgtaatcctagtaaaatgctgccgtaagctcacaaggtatgctttgcaaaatatttatatatttataaatctctgtaaagaagaaatggtaaatctgactgtattagcttggcagaaaagtgattagatcgaaaattttatccttttctaaagtaacctaattgttgttgaaggaagaaaagtattggggtatcaggattgaatggaagggtgtagagtcttccagctgtgctgctatcttcctttgtcttacagtccttaggtggaggggcaggttctttaaggtctccatctagtatggcacatgaaatgtgctcgataaatgtttgttagatgaacttcaagttaactaagacattgttattaagttaatctaaagcaggagatgtgcatttcagtgctggaagaagtatagagactttcacccaaagaactatttcttaggcagattccagaaagtgatgttggagtatggcacatatgttaccgaagagctggtgcaatgtggaaacactggagtggaggtcagaaattagatcgatgctctttccataaaatagtttccactttaagaacagtgtttttaaaaggaatatgttctttcctatgcaaagaggcagtgtggtcctagttagcagtatgttggaagcaaactttggataatgatgcctaattttactgaccgttttgagtattaaatgagtctatttatgtaaaatatttgatctagaggcctaacactgtgtggattctcaataacctaacctgtttacatgagttcttaaagttgaatatgagtttctactcacttttcaggttatcaagcatttggtgtgaaaggaaactgttctgtggcagacatgaaatggctgggaagtgggaaacgcagggacatgatgttcaaggagtggacaggtgatccagtgaggaattgggctatggaacatggaaatattcttagaaagtaattaccttatttttctccttttgttgtattaactgattagcttaatcacctccaaataatgagaaatcagtatacaagttctacaccttggcagagggcttggatcccaagacagaggaaggtatttgcagatgatggatggagaggatatatacagcaaccttactgaagtagctgggtcttccttgcctgtatgtcataccatgcttcttcaaatgttttatccagactaaaggatgccaggactgatttcccaaacattaggataattctaccacttagaggaatgcaagaaagctcccctgtctttggtgatttttttttttttttttttaagtagaagatgagaaatagcttgtatggaacagagaagtctttgtaccgatacatattcaactaaagatctgaaaatcaataatctcaggttttgaaaatagaatgctattcttataccatatgtttaatgtacatctgtataaggttaacaaaaatctattaccatctcactacttagtctgaaatggaaaacctagtgtttttaagtgatcatagataattcattaaagcgtaaggctcctacataataattattgcttgtcacttttgaatcaacaaatagatattatgatggatcagagaacttttgatatatccgtattaattatgattgtctcattaaatatagaaaatgtttgttctcacattcctttggctgacacctcctcttccttcaggcgtcggcattacaaaatgtatttcccactgcacctgcccctgcctctacccatccctaccacctttgccctccaccctcttcatatgaaaaggtcttcctgcttcacacccatagcacactgaccatcagtagcactgatcacaactacagttggttaaattttgcgtaataaattttctaatgaggatttacctcaatatattctctgcttcaagaaatagtgatattaggaaagggcatatacaaacaactcaatctactttgctgtataaaaagttcacttatttatagaaaatttaaatataatacatattaagattctctgagctccctactaaataacaataacccctcacatttgcatagtgctttatacaagacacgtatattatcctcctcaattcttcagaggtaggtagaatctcatttattttatggataagaaactgagactcagaaaggttaagtaagttccacaagatcatggagcctagtaatttgcaaaataaggcctccaatcaaatcctagttttctttctataccccagctgcagcttttagtaatggtctagttcagcatacatataaatatttataaacattgtgtcattgttctgaatgagtatatcttactattttgactgttttatgacagtggagctgcgtagtaaagtgaacatttgcagaagtttaatctacagccattttatattccctctccctctgctttgagattttatcctttgctagcaacaacattcttctgtaacaacaaataaagcaagcatcttcctatttgccttcaaataaaacaggtttagggattatctgctcttttcacatacttaaacacaccttgagtttctttttatagactttcctttctcctgacactgtgaaatcccagtgctgtttcttatttgaatgttttatcatctgacacctaataataaaaagtcattggcacaataacagagtttcatctttcttaaagtttaaaaatgtttagaaattatttcatttcttaaataaaaattgcagtagaattaagtatttccctagagagataaagattgaaatttgaaagtaaattgctactaactttgagccaattaaaaaactttcatggaaatgatttttttcacattcattttttttaatgtagtgctaaaaccaaggagtatcatataaaacaggcccaaggcacgttttgtacctaagctaaaaattacttttgtggcctttgacatatcaaggaactttgctattataatgcaagcataagatgaaatttattcaaccttttgaaagtttaaacataaaaagtttaacataagaaactaaaaagtttaaacataaaaaacagttattgtctgtgcaaggactcaaattctttcactctcttcttttttgtttgtttgtttttatttttgagacagagtctcactctgttgcccaggctgaagtgcagtggcgtgatctcaactcactccaacctctgcctcccgggttcaagcaattctctgccttagcctcccgagtagctgggattacaggcacccaccaccatgcctggctattttttttatttttagtagagacagggtttcaccatcttggccaggctggtcttgaactgacctcatgatccaccctcctcggcctcccaaagtgctgggattacaggcgcgagccaccacgcccagctactctcctctttcacacacaatttccaaaatcacagcacagattgtccagaaaacatttgtactaatagttttgtttatggaatttgagttattccccaaagcacaaaatgtaaaaaaaaaaaaaaaaaaaaaaaaaattcttttatgtaaagtctaagagaacagtaaaaatatataatgtggtagctggtaaggaagaaactggttataattttaaagcataaagcataatgcttgaaaaagattcatggaaaaactataattttatctagttaatatatttacaaagcaatatatttatttactgatatttttagtggtcatcatatcgaaaatatatagggaaggagtatatagggaaggagtaagtaaggttttccaaaaagttatgtgaaggtattcttgtgttctctagatcagtgcttttagaaaatttgtgtgatctaaagaacacaaagaatacctacacagaaccacctgcagactggtgccagtccacaaaatatctgtttgagtatgcaagaagataaatacagaaattgagagtaaacatttaggaaatttatagcaatctgacatctctgcaacatccaaagtatatgatttttgtattctacaaaagcttagctcagatctatgatgggttagaaaacaaatactcaaaacaaaccagctccttcaccacagatggtatttgaagttctgatcaagctcatggtctgcaaaccttttctctaaagggtcagattgtaaatataggctttgtaggccatactcaaagtccctgctactcagctctcccatacccagctgcaatagacaatatataaacaaatgaatcttgctgtgtttcagtgaaactttatggacattgaaatttgtatttcatctaatttttatgttcttaatatgctaatattgttttgatttttttcccccaaccatttaaaactgtgaaaaccattcttggctcttgcaggccatatgaaaacagggagtgggctggatttggccctcaggccaagtttgctgaccccaagctagatcagcagtccagccatcgtcaggaacagatgctgttatttcttagtctcagtgttcccgtctgtctcgggattttaattgccacttactttcactctgcagtttgggttattattcaagaaataccttagagcactcataatgcttagaacattatgtttaataaaatccagaaggaaaatgttccaagtatctcactgtgggaatacattttaggatttactatgacctactggtttacatgaactttgctgagaaaaaaaaaagcatggagaagattgggatggaagatctctttattgtgtgtataaaagtagtaataggctattttaatttgtggcctggaatgggtagtgatagagcatgagttgaaatcttgcttcacgattaccctcaaatggagaagtaatctgtttcaaatggtaatcaaatgaaaaaaagctgtgagtagattgtgttagcttagccaccaaaatagagaatttctcagattccccctctgtctccagtccttattttctcctactgttaacagaaattcaaaccccagctgctcccatagttaaccagccgtcatgacatcgtcgtctttctgttcttagcaatttccatctggcttagtagaagtggttcctcactaccttgagcatagtcgtttttttttttttaatttttgtagaaacgaggttttactgtgttgccctggctggtcctgaactcctggcctcaagcatttctctcacctcagcctctcagagtgctgggattacaggcatgagccaccatgcccaggccgccactttaaacacttgaatactacatactttcactacttgattgatcttgcacataatcatcaaattacaacattcatgtttatggttttacttatttgtttttcacatttatgtagtgcctttttttctgcatcgcttaacatttgccaacaaatatctgcacgtgaactaagcaagtcattctgttagcacaatgaccttgagcaaaggcactttccttcttcatatgcatttgttagtctttagtcctaagtttttgcttttgtttagtttgttttttcactcttcacatacgagcagtcttttggaaagagttacttatagtatttctaacttggagaaacctttcatcaagttgaaaaagttcagtgttctgagcgattatgatagaatctcctgtcagaatatatgttccctttttgttctacttcaaaatataagaggttaactcttgtaggcatgccacagtatttttggattaagtcaggccctccaaaaaacttagaactatgaaacaaaccagtgtttaagaagacacatccttggaatatgagcaagcccattaattctgtattttgagtaaaaggtgtttgatcttatgcatgctgtcttccatgtcatcatttcaaatgatgaagaaactacatctcctaatatttgagaacaaactgcaaaagttggtcccttgattgtattataaatccataaaaagacccatttttaaacacagcaactttttaggcaacttcctgtttttcacttgaaatagaagtcaaactgttataagtgctgtcttcattattcatatttaattacacagtggcttattcttcattattttagtgtatttgtgaatactctagctattgagtagaatactggttacaaagctagtctataaacaacatgaaatgaagggtgctgactcagaaatttagagtcctccacaataccatatccaatgggaattaaatcattgtattgtcttgtgagtcttgaggcttatttatctaactgatgtttatcaagcaccttccatgtggcaggcagtatgtagcttttattttatttagcagtatcttttttaagattataaattttttgttgaatattatttgcaatcagggacacttctaaacttaaggaaaaactttacgactaaagtgccagctctcttcagaatggcagtgaaggtaatgatttgcggttctgtgtgtgtatgagtttgttattataaaatccttcagctccgggctatgtacatttatgtttcagtagcatgtctcattaaatcctttagtgcagtacttctcagtgaagtgagttctgatcaatgtgaaggaatgctgagtgggcacaattgtgactcttgttctgaatattacctgtgcttccagaaaagtattttagcaagtgtatgacccctggttaatgaaaagtgttaaaatatatcaaataaactgtcttaattgttcttttaataaaaatatatgtccacttggaaataataatttcactattttaacgactgtagttgttttggaaatttgttagataaaggctccaacagcataaactaatagttttatattaccagattgcttccagatttctcttttctgttcagtgaataagaatagggtgtaggatcaaatttctaatgattttctccaggagaaccactgttacgcaaataccgaatttataacacttcaaaatagacatcagggcaaattttacaagacctatcagttcatttttattgtttgcttctgtaggtagtcatatagaagaccaaaagaaccataaaacactgtttttacatacatgatgataggagttaggtggggtaaagtttactaatatttgttaaggaacctactacagtagttccaactttattttggacacttacatttgtttgtcattatctgtcctctgttcccaaattgccttaatttgtatatcatcatcttacgtattcactgtcattatctcaagtttccaagggtttttgctatgtcactattttttacctgtgcctattctatttcttttctttctaatttgtttattagttctacagtgttattgtttaatttattgtttccttctgcaacctccctttttatctcatttttttccactggtgtctcatttaatttctattttctttaatcttgtagtgtaatgcactcacggagatttttggaggaaggtggagagggctgttttcttctaaactagattcttgcttccttcccagccctccccctttctttcatttttttctttgctctgggagtcctgcttagttgtcatagtcttttctctttgtaaaacttaagttgaatatgaacaactcactcaggatcttttcttcattctctaatgttggtgaattgtccttgtcttgctttttaaccgtctctaattagacctcggggtctagtcccagagctgcattcagtttgaggagtcgacctgaagacccacatgctggagatgaggtagagttagttgagctgggctgcgtgctgggatcctacaatcccagttgttggtaggatctttgctcttcctcagtaattgtattaaatgccctgcatcagggtttgctctacatattcacagatatatctctggaggagtgagatacggggctttggattattcctccaattcaaggaggtgcttgcaagccatttgtttgattagttttggctaagaatgtcagcctcaggtgtctccttcccttgccacatcctatctttcccccagcaagtgtttttatctctttccagctaatggagaaaggagaaacctgtatgcttttaccatggcattattaatccacagacagggaagggaacctcacctgggaattttctgcctttaattctccttctctcccagccctcaacacacacacacacacacacacacacacacacacacacacacacacacacacacccttatttatttttctctttggctagacctttgtttactgtttaagatacagtaaactctgatacagactagcgaacctcatgttagcaccaactaagatttaacacaactggcaattggctatctccttcccttcatcccagcccttgtccttgttttattagctctacaacaatgagatcccacatacatgattgaatttgttagactcctacatacagctttataatagagtttggctgtaattaattagctttgcttgattatgactcatttcccttttcttctcctttcctcccaggcataaaaagccaaaatggtgagttctgatttgcttttctgtgtctgaggagattcctgtgatggcaggaagagctttttactatggatggatttttccatctcctccctgggctgccaaaatgctagcttagatccattttccccaaattgggggctgttaatgatagttttcaggattttggccacctaactttcccacctccaatgcaatccctttttacctaggaatcttctattcatgggcaccgcttatacagaatatggtatgatgttctctttaacttggttggtctctggtaacatttttgacttttttttcttttaacagcgattttaagtttattccattaggggaaagattctataatctggctttattatgtctttttttttttttttttttttttttcctcttgagaccgagtcttgctctgtcgcccagactggagtgcagtggtgtgatctcagctcactgcaacctccgccttccaagtacaagcagttctcctgcctcagcctcccggggagctgggattacacttgcatgccactacgcctgggttttgtatttttagtacagatggggcttcgccatgttggccaggctggtctcaaactcttgacttcaggtgatccacctgccttggcctcccaaagtgctagaattataggtgtgagcgatggtgcgcagcctattatgtcattttagcccaaaagttctgtgctaggcacttcaggtttaagacttttaatctttacaggcctgctcaataaaccatagtgatatgatccctcattcatacatgaggaaactgaaatttgaaagagtgagggttcccaatgccacacagctaaagggtggaatatcagggtcaaatgcagatggatctgtctccaaagcctgtggtgtctccacttcagtgctgctgacttgtgctgctgtctgatgctgggtacctcagcaacccttctaggctttagttacttcgtctacaaaataaggggcctggcctgcaaggtccttcccagctctaaacttctatgtttatggttagtggaatgagaacactacattttactttaacataaatttacttgactttacatttaatagcaatggccatatatttcaagtttaaatatatatttacatatttctgcagtcgggaattttagattatataaacctttttgtttttgcaactcatttttcaggtgctttggaatttcactgctgttctttttaatgtatggtgtttgcaattgtaaagtttggaattttcattcaaatgtgaattttttctcttattctgtcttggtttaacacttctcagtgtgctgagaatgcctgagttggaggtagtttgagaaagtggagcaaagcaaaactaaataactcgtttggaggttaaaccttcacccttgacctaaacaaactgagttaacgaaccaaagattacattatggagactacaaacccctgcttctacaagtttataatctaaaagataaactgtctgatgtcaatgtacgtctaaactactcagtaaacatacccagtaaacgacaaacatgtccgtgttcacagttgcaacgtaatagtgatgtagaagctaggagtacagtggaaatagcgattgtctgttagatcaggaagtacagaacatgaaaggccactgtggacagaatggatcatcgtaggaataaggtcacatgaggcaggactttgaagatggttgagtagagacgaggaagctgactcacatctctctcagccactccaagcttactccttagtcaagtgctgtttagccctctgcctacaagaatgcagcctccctgatctgttgcccaggaatcagtatttgtttttcactgccttctttctaaatgtcaattccatcccaaagatgggatccttagaagtattgaacctatattggcctgtctctgcatagtgtaacttaattgggctacttctaaccatgcttttctctattttgtttatttggtattctttgaggacattatatgtgccagacactttgctaggccttaggtatatagtgacgagcaaaagaaatagtaattaagctgatacatttgtagtgaatcagaaaattagcaattctagaaaagcagacaaataattagcaaagaaatcaaggaaaaggataaggtagtaggatagaaaatagctgagagtgcagtcgggagctactcagtaggtgatcaggtttgttgtttgttttttgtttgtttgtttgttttttgaggcagggtctcactctgccacccaggctggagtgcagtggcatgatcacagctttctgcagcctcaacctcccagactcaggtgatcctcccacctcagcctcccgcatgccaccacactcagcaaattttttgtattttttgtagagatgaagtttcaccgtgttgcccaggatggtctcaaactcctgggctcaaacgatcctcctgcctcggcctcccaaagtgctgggattacaggtgcgaacaactgtgcccggccaggtcatttctttatttcatcccttttctcatatattccaagtctcttgctcaagctgtttaaccactcccttgtggactttttctaaagccccatatctaggctgtttgtctacagaattgatgatacttttaaactccttttagttaaaacccaagtatttgttcaaaccctgttgtgtttttggctctgtgccagacatggtggtgtttaccatgtagttctaaggccctgtaagatccctagaaggatcttaattcattttctatccttcacttgctgtgatttttatctcccatgcccatgtaacatggggtccagagttgagatgagtgtctttcttgttccttactgccacttccagaccatttatcttgcaattaaaaattccatttccttttaattttaagccattgcactattctacctactactgttctggacacattttgtacagcttcctgttgattctgaccatcattcatagaagcttttgagcgctggtttgacacctcttcttcccatggctgtctgtcattcttggaaactccagctctcaggtagaaaatttatccagctttggttctcttagttccttgagcactttccttccaacaatctttctttcactctatctcagccacccactcaggccattctcaaccagacttggccattataagtagctgtaccacctgtgaaacctcatctttaagcactgtctttgacaattcctgtcttttcaactcacttactccatacctgcatcagaaaaactgaacatgacagaaggaaaaaccagcaatactactcctgactggcttattaaattgatgaccataaggctcaaggggccccaaattttctagtaatcttagctggtcacttctctgggaaggactcattcatagtttctcctcctctctcaaaccttcagtatcccttccaccttctcagtggatgacctcactccctgtttccctgagaaaataaaaatcatcaaaacaaaaaatctactaaccttttacacacactttcttaccatatcctttttcctttcacctactgaagttacattttctttctggcatcatcactttgttcttctctctagtgaattattacaatcaggatacagagtgttaaaattatatacatagcccgttaaaatcttttaaaaatcccttcttatcttccccaacacccccgcccactccccactgaccagccctcctccagcaagtttctttcttggctctgcaagcacacacttatcgtgaagctcctagagagaacatttattgtctctttgttgcctccatttcctcccctcccattttccctcttgaagtcatgccaatcagttctctcatgactcaactactacgcaatccacagcggatccatccctccttcctgaagcactttcatcactggtggctgcttatcacaccctcacatgtcctgacttctaaatagtggaatgcgggcctcattttgtttttaatctcttctccacctacactcatatcctaggtcatctcacctttcccatggttgttttgttttgttttgttttgtttgagatggagtctcgctctgtcacccaggctggagtgcagtggcgcgatctcggctcactgcaacctccacctcctgggttcaagcgattctcctgactcagcctcctgagtagctgggattacaggcgcatgccaccatgcccagctaatttttgtatttttagtagagacggggtttcaccatgttggccgggatggtctcgatctcttgacctcatgatccacctgcctcggcctcccaaaatgctgggattacaggcatgagccaccgcgcctggtccttggtccatggttttaaatacaccaatgatgcctataaactgatgagtcctacatttaaatctctagccaaagctctcaaccgatttctagattattcctgtgcttccacagcttctagtgccactggtatgtctgatgccatcttacatttaaggtcaaaagattcctgaagcccccacacaactcaaacccaacttctcccccattgttttccatctcagtcaaagtagcatccttccctctcttccccacccaccccacaatttacctagttccctggccccagtttctctcagtgcccacatgagcaagaccagttgcctttatcttcaaaatatatcctgaacctacagtattaccaccctagtccaagcaacctgcaaccattcctctctggattcttgtaattgcttcctacctggcatctctgcttccattcttgcccctgcccgccccatactctttacatggattttttaaatagataaatcagactgtgccacttcccttcccagagccctgcggtggtttctcatcatgaaaataaatagctctcctgacccaggccttgcttagctttctgacttccttttctactgctggagacagttagaggtgagcaccctgtagagaggtgggccctctattaggtggaggggaggggaggaaagggaggaagggagggaagaaagcgagaaaacaccaacaactcaaagaagaatcaccacataaacaactgtgcccaccaggaacatgcatcttgcctgctattatctaatagttgagatgtgaagtggactggcaaatttgtgggttctggttatggagaactgacctaggttgatattcattctgccagagccactggaatttgtagtttctgaaaagacttgtgttatttggcaaaaccagaattgggcatcatttatcttcatgtacttagccaaagccctagaaaaacttttttgattcttaagaaaatgatctaaacccaataatccttgcttcgtttatttttaacgacaggcccattctgtagagtttttctgtatgaacttacccgacctcctgtaaaaagaaagatctaccttggatatagaaatttatttattatctgtttcattctgttcttttctgagaacagcaagttttccacgtagttctgtatacataatcctttttttaaaggattgcaggcacattttattgtgaatttggccatggtttaatgatgtataatgttggatttcttcatatcttaaatattaaaaaagcttatacagaagtaaagggaaaggggaagaaggagaaaagtagaagaagagaatgactaatgctttggtttaacaaataacattgtgaaataaaccattgatattttgtaaggtaaaaatctttcaaatctactcattattataataataagtaataaaatactcatctcacaggcagttcaaaggaaccccattgactaaacttggtaattaattggtaagctttaatggacaatataataaatatttttcttgtaaaagcttgacctagtacaatttttggtgaaacagtttgcttttacagaataataaaactacaaagacattttgagaattaagtcagctgcatgatgtgatcattaagctatttgctataaaatgtacattcaaattattagaagttcaaaagaattgatgacacattagaaatgtattttctgtttttcatatgaaacataaaagctctagaagttatgggcataagtgaagtatgcatgtttccttctctcccttcttaaaaaatccataattgttctctgtttaagcatagaaaaatgccatgtgacttttatttctccagaaaattaggaataacctgtgggcatttaaggttatactagaacatgcataatgagtgaattcctattaattccatgttatattgaggaaaaatgcttcaaatatacgtaacttccaccagagtagttagctttttcttagctatatttggaactttgattactactcttaatctctttcaaagtttaattttattaaattgctcaaaggtagagacaaaaggttatggtgtttttcttttttctttcagcaaatgaagaaaatacaaatttgctacatgcctatgggaattaagcagtatcatagcactggttggtctagttttaaaacttcaggactgccgggcgcggtggttcacgcctgtaatcccagcactttgggaggccaaggtgggcggatgacggggtcaggagatcaagaccatcctggctaacacggtgaaaccccgtctctactaaaaataccagaaaaattagccgtggcaggcacctgtagtcccagctactcgggaggctgaggcaggagaatggcgtgaaccagggaggcggagcttgcagtgagccgagatcgcgcctctgcactccagcctgggcgacagagcgaggctccgtctcaaaaaaaaaaaaaaaaaagttcaggactttattttcaagcaaaaatcaaagttgtttgttgttgttgttgttgttgttgttgttttttctggataacacctaagttacaaacgtctgttcatatttgtttgaatcagtgtttaattttattcttttatgattattaatctacagatttcaaatgtaaggaacattggaatagtgagtgatgtagcagctaactttctttttctttctttctttattttattttatttttttttgagacggagtctcgctttatctccaggctggagtgcagtagcgggatctcggctcactgcaaccaccacctcccgggttcaagcaattctcctgcctcaacctccagagtaggtgggactacaggcgcgccccaccacgcctagctaatttttttatttttagtagagacagggtttcatcatgttggccagcatggtgttgatctcctgacctcatgatccacccacctcggcctcagaaggtgctggggttataggcgtgagccatcgcgcccggcccagcatctaacttgctatttgcaaaacggaaatgtaatgactgaatattttcgtcagtccaaaaatttgtgaagagaagaattttaataacattataacaaacagtaatgtcagtaaaatggaaactgaaatgcatgcattagcatgaaatataagactaggggaagagacagaagataggtaacactttcataagaaaaattattagaaaacattcgttcccgagtgaaaggaaaggtgaaggtacttgaagaaaatgaacaattgccttttcactcatccagagtgcctttgaactcattcagagctctttgtaaatctaatcaattaatgatgcttgaaatatgtttaatttgggtagttgagggaagtatgttctagaagaaatgcaaccaagatatcttttgggtgagaatctaagaggaagtgatggattgtttgttgatttcacagtaactgagaggaaatctataatagcttaaaggattttagcgtaattttatgatgctaacaaatttgtgtcgtaaactgacgctaatatggccagactgccaagtgatgcatactgtaaacaccgataagaattgcattttatttatttatttatttttgagacagagtctctctctgtcacccaggctggagtgcagtggcatgatctcggctcactgcaacctctacctcccaggttcaagcgattctcctacctcagcctcccaagtaactggaacttgcaagtaacatgtgcctagaggcacatggcaccacacccggccaatttttatatttttagtagagacagggttttgccatgttggccaggctggtctcgaactcctggtctcaagtgatctgcctgtcttggtctcccaagtgctgggattacaggcgtgagccacagcacccggccagaattgcattttgggtgtcaacctggtaaaggagacagttggaagatcttggacaaaagattgatgtatgcaaaatactgaaaaggttattggtaagacaatgagtgcagactattttagaaatgtgatttgattcgttaattccttgtacaagaaagtaaaaatatttatccagacatgtggtagggaagttccctaaagtagacatatagtgctgtagtttaattgctcactaagtattcttggtgtcacaggcattataagccagtttaaaattttgatttttttttttttagcagaatgttaaccaaggagaaatatggataaactccttttttaaccaccctccccaacaaaagactagaagagccatacaagtaaaagcaaaataaaacattttgcatgtttgtaggttcttctaaatgttgaaccccatatcagttgagggtgttgattttaacaagcctctggatcaagagaaaactaattgagcattttagtatgatgtatctctcataatgaacgctgttatttctaccctcatgagaatgaatataaacacagatatgacgttgacatgaatggccatggaaattgtttaccccagagtggtgatgatattatggttaaactggctgtgcactgtttggcctgggaagttccttaaagtgtttcatacccacttcaccccaccccactccaccccttttttttttttgccatttcatagtgtacccctgatcacatagatttggcacatcatggttggtgttagtattattttgatacagttaggtgatttcaccattgtgtgaccatcacagagtgtacttacacatacccaggtggtagagcctgcctgctacactcctaggctgtatggtaaagcctgtttttcctaggctacaaacctgtacaacatgtactgaatactgtaggcaactgtagcacaataggaagtatttgtgtatctaaacatagaaaagccgtagtaaaaactatagtattataattctaaaggcccattatcatatatgcagcccatccttgactgaaatgttgttatgctacacgtgactgtacttatttggcacgtccacatagggcttttttctcaaatattaaatgttgtttaaactactgacataagagttatgctagacaaagaaaaactagtgtaaatgtgatgaaaaccaaatgagactttttaaaactccacatcaggctgtgtgtgtgtgtgtgtgtgtgtatgcgcaggcgtgcacatgtgtattttgtacttattccctgataaccttttatctctcagacacttaatttgtcatttaggatatctgtggttaggaatggaaggcccattttgtaattggtcactatgccagaggtgaaagccattgacaccgagcctccggggacggagaactcttggcaaggcttgctaccagtgggtgtttttttcagttctgtcaggtctgtgttcccttgggggaatttgtacccaaagagtattgagttttttctgttgattttttccaaaagcatgtgttttctgcattcctgttttatggttccctgcaaaggaggaacagtttctatccttatttggtttggatttgattagcagcatttgggattagtttagtctttttaaagtaaagcaaatgataggtagcagagggtggtggaaatcgcactgggcaagaaaccagaattctggtctcaacttttccctctagcgaaccccagcagaggaactctcactgcttaactggctcttgtcctcaggttatatgcagataaaatgcatgcaaaaaaatgagaaaactggatagtctcaaaagaatttcaaaattctacattccttttaatgataatgacagtaacaacaatggcaagagcagctatcagatactttaaacacattgtttctaattcccacaataatcttggaagttttgtttgtttgtttttcagataatgatgcaaaagtttgctcaatagcataccaatagcaagtggcaaagccaggattgaaactcaagttagtccaacccctgcaattaccccaagattctgattatccaagctagacaatagtgtcatagatatgcacataggttttagactcagacatctgggtttaaaaactcagttttaccactttctagccatgtgaccttgagcaaattgtttaaactgtctctaaggattgctaaactgtgaggcgggcaaaatcacagctacatcataaagttggtgaggataaatgcacaaaaaacataaagtacgaaatgtgaaagtgtgaaacaaatggtagctttggcctctgctgcttatttatcatcattatgtctaggaaaagaggcctaacatgaagatagatatagtttcattatgtcaatatatgtacctctctctgaaaactaagtctttcataaatgatttcattttcttttttttcctttttcttctctgagattacaaataaacctcagaggccgggcacgatggccacgcctgtaatcccagcactttgggaggctgaggcaggtggatcacctgaggttgggagttcgagaccagtgtggccaacatggtgaaaccccatctctactaaaattacaaaaattagctgggtgtggtgatgcacatctgtaatctcagctactcagcaggctgaggcaggagaatcacttgaactcaggaggcagaggttgccgagatcgcaccactgtactccagcctgggcaacagagactgagactgagtctcaaacaaaaaaaccaaacaaacaaaaaaacaaacctcagagattatatggatctgtggttgttgttgtttactttggggaaatatggctgtcaacatgcaaatcagatgtgaataaattcctcccgctccacactcccaggtttacccaggaatccagaaaaccttgaagtacatttcaaaggattcttctcagtaactctttgagagcttactgtctgctgggtactatcccaggcactgaagttttggatatttccagttgcctctctgtagggagaagtaaaagtccaccaactgtactgaaacagaatgatgtgtgctagacacctctaaagaggacaggcttgctattatatgctttagtcagctagtagctgaatagtattctgtttattttcttttttgttattcaagtcaacaacttatcactacttccatcctgcacaaacatgtatctgcttgttggcagctactgctcctggatgagggtgggtgtaaagaaagagctccttcactaagtgggaaagtaatccaagaaaaagtgttaggctatgagtatgttttccatgaaacaagtagcacccaattggcttgtattatttgatagatttttttacattcatttattgatttcattatttactctgagactactctgtacccagcaagtgccaaaggagtctttattgtgatcctccctcctctttttatccctgttgactcttcagttccatgtctgtctttattaaggacatttctaaaaaatgtcacctctgggaaagggctctggattcacccatgtgagaatgcttttctgcataattagcctaattttttaaaatcagatcatagcagccattgtcccagtatgctttaactctgtgatgttaccagcttgaatattgaatttgaggcagtcaaccttcctaaagaaagatgtatactgtgctttatgcatcatcactgaaagaattttgctttgaagcccagtgtgaacacttaatttttatttgctattataaaagagtctctttgagctgacaaatatgaaaatatgactgtgatttgggcaggagtccaaaaactttagagagaatgatgcttttatcttttgaaagtcttttgactaccgcattattctattaatagatggagaatgggtaataacatccttcaaggccttcttctattgcaactggtctccctacatactatagggaaaagatgtatgtgcctagtggtaagagtttaatgtacatttatttaaatctcctgtctttgggcagctgtcaagtttatttaagagctctgcgtagccaggtttctatttttttttttctcaatttatatgctgtcctccctagaatttcagttaaacaataaaaatcatgcttttaagttggtatgtggttacatacttaagatttctcatgaaatgacagtaaggaagccttgagctaaatggcagctttcccagcatccgggaattctgcatttatctttacagagtctgtggatatgtctacctccaagtacagcagggatataaaagcagtttatctcattatattctgttgtaacgaataattaaagattttatgaagggttaacactccagaggaaatattttatagaccagctatatgcatgtactgagcataggaaacatttctataaacatctatcagaaagtctttttaaaatagctataataatgtcaatatttcaacagaaccccaggtgaaatctaatggtatcctttttatgaaaattgttagagtaaaagaaaaattattttaccaatagtgactgattttgagttagagcttaagggattctgcccacacagcggtcatttacataaccttgggaatcttgaaaatctgaattcagcccttggtcattgctatttaagccagattttgcaaataacctgcaggtgtcattgtgaaaatatgtaacatcagccgtcatcatctaaaactgaactaagcaacttagaagaaagcatagattctcattaagagagatccttaaacctaatgaatattgaagataagctttttaagtgttcattctgatgtatctgactgctttttctgcatctttttttttttttttttttttttgagacagtctcgctctgtcgcccagactggagtgcagtggcacaatcttggctcactgcaagctctgtctcccaggttcacgccattctcctgcctcagcctcctgagtagctgggactacaggtgcccaccaccacgccaggctaattttttgtatttttagtagagatggggtttcaccgtgttagccagaatggtctcgatctcctgacctcgtgatcgcccacctcgacctcccagagtgctgggattacaggcgtgagccaccgcgcccggcctttttctccatctttactgataatagaaaacctttctactggtggttgagatctgtgaaagaatgctattcaaactacaccctccctatatcctatgtcttttttccttctagatttgattaatctcttctcttagagagtaattctacctatacccccttgcccagaccttggaagattcttggagagcatgaagcacagttgggtagggttgttgttttgtggggaggctctaaggtttgtcccaagaaataatgtcaaaagagaacagcagagatgctttgtcctattctaaataaaagcttttcattttattattgttataaactaaagtgttgactctgtgataactatggccttacattttcatgcttatatgattactttcaattaagccctattgcacccagtaaatttggagacatttgagagatgacggggattacgagaaaggagattattggggctttaattgtcctttgccccagcgcttctacattttcccctgtaattccttgagctccttcgtctttgaggatctcacatttaacctctatttgcaaatctctattcccttggcctgctttgctattgccagccacttgctcagatctcagaggcttcattaacttcacactgacactgtgtccagtgttacctataaccaatatagcacggaatgataaagaccacaaacattggctttatcctgctttctgtttccaaatttggctttcacccagtactcttgatcaaggcacggagtcttccagaatgtttataatttcatagtaccacttcattggcgtaaattcattcctcaacccagatggtgatccgcttagaaggtttttttcttccttgcttatttgtcatttagaaagcctgagattgggaatagtaggtccattttgtaactggtctttgtgccagaggtaaaaagccattggcaaggctctcctatgaagggggagctgttggcagggctaggggctggtgggcgttgctcggttccgtttggtttacactcccttgggggaatttgtacccaaaactttttaagtttagttttctactgccttctctcaccttccccaaaagcatatgttttctgcatcctttatcctgattctttcttaataagcggaagttcccttccttataaggtttacatttgtttgaaaacactcatgcctatgatttttctgtaatgtagcaatgtgtgggcactgaggctgtcccttcttagtttatcaagttaatacaaatgccagtttacaatactaaattttcagacccagcaaagtgtgaactaatttctagaaaccgtgcattatgtaaaataatcataaatgtgagttgccgcgtaaggccagtaactgatttagggtaggcctggcctatccacaagtattttttgaattaaataattactgtgccggatgggcagggaatatagatgatatataagtcccaagcccaaacctctagcctacaggcttacttaaaagacagttattgaaaaaagcaaacacaaacaaaacctacttactggagttaagacagagagaggcttgtgggctaaagtaagaagaaatgaaatgtctgacccctacttattctcattgtgtttggttttagttgggtatttatgctgttgagaaagtagcaatgtactatgtaggaaaaggtacataattttttatattattcctatggtaaatagtggaagaaagtaaaggtgccaaagatgagagaggtaggattggatctggtaaaggtgttgacttctgtggcttcctttaggaggaagatccaatttggtcatgcctgcctaatgctgagactattcttaaagcttaaatatgataataacaaagaaaagcaagctttctaacaatttgtaagggactgcatcaggcacaccatctaccttgatgggattaaattacttaatttttccttaaatctttcagcaaaataaaatgacagtaatttgctttaaacagtaacaaactgattgtgtcctacgtacatcttttctaagtggtaagaacatcatttagacaataattggtgtgaatagccccctgtgtgatggagtgtgtggcctgttgggctaggagcagcgaccctggttggaggaaagatgaaattgagatttttttccctgcgttttttcataataatatatatgctgtttgctaatagcatacgtgaatagtatatagctgtcattactctttcttcctcattgtaggccaaataaagctgactttaaacatttatgttgataaggatttaattctgagtttatttataatcaccatttatgattgatgaaggcattaatttgacctttcccttgactcaattgttaggaacattatcatgtattcttaggaatcctttagagataaaaaataaataaaatcatggaaagtgaatctactgcccagaattcctcaaagaatctgtaagacagtctttccagttagctaaactacttctatttcaaactgatttcatgaaattaaattggtatatatacagcttaattccctctaccgacctgcatcttttctatagggaaaccacttgaattaacagtgtccagaggtctgatgatggataatgtagagaaaactgtggtttcctccttagtttcctgttcataggaatgtcctctgtagtcagcatgtgcgtgaatcgaccaccgaaaatattcccctggagtgttgagcaacctagagtgtgttctgtaatgacttcgctttgaaatgatctctaatcccaagacaatacctctgcctcctttctaacaaatatatctcttacacctaggagaagtgatgtctatttttacagagtatttatcaggcttattgaaagttacattatatgcaggaaggtttatccatggatgggaaattttctctctttcaagtgaccctttccttctcaaagactgtttggtgataccaaattcaagctgccctgatgataccctctcaggtgaccaagaaatgttggcaggtttttagtaacaggaggagaagccataggctgcttggttaagatggaggtctttaggtaacatttaagagataaaataataaaaagtgtgtctgtctcttcacttcccctccctggtagccaattgcagtatatattggatgggaagaagcaacttgtgtgggtatgtgatttttagatttattatgaaaatattttattttttattattgtataaaaattttactttgagcattgctggtaatccatctttgtttatgtgaggctctccaggtatttaatatcattgagccttaatatgaaactccctataaattatttggcttctcattagtgtttaatataaaaagaacctataataaatgatcagcccctcctaagaacagagcataagtaaagagagcacttcaggttagcagcaagtgtgcccacactaaactctcttcctcggcttgctttccttttctgcaatagaagagtcccagctgtcctgtacctttatttcccatttgcattctgccacaccattgccttgtaggggggactttgactgagaagccagattagcaggtgcatccgcctctgatggtgtgaaccacacatttatggtagtccattggacctttcaccctgtcccccatgaccaagctcctcaacactgccatgcatgaaatactttgcttttataatgctgtcagataagagaattatctttttggaactaattgtaatagaagggcattgatgttgcacaatagcagaaaagctacttttaaaattgttaccaatttctgattcagttcattggtaaaaatatgtataattatttgctagcatacatgggtagtggacaaatgatagtattatagttttcactatgctcatctttaaataacaatcttggggtagtgtaaaggacacacaattatcgtgacttctgtttgacccataagagaaatgcatattcgggttgtacttttctcaaatgactacaaccaccaatactttacataactcttgactttttagggcagggcatttagctttaaaatactcccattgagggaaaaataatatttaccctaatttcctccctctgtcccttttcgcttctatctaaccaatctgcgtgcttttatgtattttttttttttttttggaacttattttctatctggaatgcttatctaaacaaagagttagatggccttgataagtgagactaatggaatcgtttccctctaacttcataaaaactttaaggattatctttcttgagttctctgtatttctgttttagaagaaaagaacaaaatttcagaaacaagattatagtgcttttgctaaagtataaatacgtgggccctatacaaactggcaaattcattagtcttaaagcagacatccaagctattgtgggtgtttggatgacaccattttcacagtaggaaatcatttcattctgagcgtggactcggcattggttaacgcagtgagttttatgtggtataaacacctggaagtgagagaaaagacagcacagaagctctgtgggagctctgctgagcattgtataatattcttgaaccaatcacccgacagccacttcctggaataacaatgtccttgttaaatttttttcaagtttatcccataaatatgtccatatacttgagggcgggaggattaatatgaatggatattaggggagggggaatgattatgaatggatatcaatataatttgtagaatttgggtacctggctctatttgtttgtaaaagtcctcagaatggagcctcaatttatgcctcgcacttataaagggtatttggcaaagcctcttcctttctttaacctgaagtgatctgctgaattttaatcctttatccacacttcatagcaaggttggagaattggaagtaaaaagaaagatctgaggagctgaaggatccttttagaaagatcatggctaggacggtgacactgattttctaccaaaatgcctacatttactttgcagttaaaagaaaacattaatccaagtgctaatcctaaaatactgccctcatttaatatctaaactacctaagcaaccataaatcatacccttctccaggaaccttttctggcattcaaagtcagctatccgaatcttaactctaatcaaaagtccatctcaaatcctgtctcctccatgaagactccagtaacgttagttaccgtcagtctggctctgtgctgagaatgagtgtggagatcaataatattcactgacatttatgcagtgcctcctacctgccaggcactgagctaaataaattccttacctctcacctagtccacacaatagccttaaagatacatgttattattagcaacatcttacagatgaggaagatgaagcccggggtggttaagggaaacatccacggtcacagagttagtaaagggcaaagtcagactttgaacccagcctgccgggagtccagagaccacttccctacaggctgccttgagttgctgcagccctctttcaaatcatacatttttgattcagtgatgctcagttttcacctcactatacttgatccttcatcctcaattttttatgttatttttgatgtcccaaacacagctaccaagaccctaagctccttgtccataccatttttcagaaagcagaacatggtcctagacacatacatagtacgtgtgtgatcagtacttgcagggctgcactgagttgatatggacagtgccaaaaattagggaaggaaatttgatgcggacctagggaaactttattccaaaggcttcaagaggtgattgtagaggaggtgaattgggacccagggcaggtgcttaagcaggaaataacagagccaaatgtataaccacttacgaatgagagcttttagctgaaggatgaaaacataagggtggtgcacgtgtgtctgtgtgtgtgtctctgtctgtctgtccatcttcatttgtgacttggcaaggcacagagctgggcaggagtgagatggacagacatgcaatataggtaatgtcaaggctccattcttcagaaacatgaagctgatgaagttaccaaaagagaaggatttagaaatttgaggaattctgtccatctttgctgtgttgagttcctattcacgccctcactgcaagttagaaaattaacgattaaatggagggtggaaatggttgcacaacaatgtgagtgtacttaatgccactgaattttactcctaaaaaatagttgaaatggtcaattttatgttatatatattttaccacaataaaaataaaattaaaacggaggaagatattggggctagagaggcttttggactttattttttttttttaaaaaaaaaggtcttggtgactgaaggtttaaccaaatagttcaacatgtgaggtctttaccttgaggcatgttgtattctttttctgctgaattttgtggggggttttcctggctcattgaacaacttcctttggaaacctatttcataggtccatacagaatagtatcttctagtgagccaaagtagagggaaagaagagcatggatggcagagagagaatcattctcgtgaagctgggtggcagaaggatttctgtaagattggatatcagtttcagctgaatggtttttttgattggcgtagaacaatctgaagaagaggaagccactcactgtcaatttgctatcatgtcaattcctttcccttctcctgtcaactgcattgcccaggctccctgacccttatgcttctgatttgctctggtcagggagggacagacagaattttgaggggaagaaggacaagtatgggagaaatgagagatattcttacctgtctgtgctttggatgaagtggctggggtggggggacttttttcccgccgtggctgcatgttctccatggcttcatcttcccactagacagccctttcttccatggtcccagattccactgggcagcccctgccatggtcccagttctcaccagatggccctgacttctatgatctagtaaagacacctcctgcccgcatctctgcagccctgtgggcattagtggcttcctgcaatctctgaatggctttagtatcttggttgagactcttagtacttctgtcacctgtgtagccagttttctgtattacattccttagcttggaataactggagtggtttctgtttgcctgatacaataagatacttggattgcgatgatgtatcttctttaggtgtttttaaaatgtctttatttcagtgtatagttagtaaaaaaaaaaaaaaaaaaaaaagaaagaaaaaagactaaggacatagaggttcataacaatatataattggtagaccccaacccttgtttcagtcagagaatccctcctatgtttacgatacatatttaagttctttgtaagatacgatttgaaaaacaggtttcactgcttaaaaacaaagttttttttgttattattttggttttttttaaagacaaggtcttgctctgtcacccagactggagtgcagtggtgtgatcggtgctcactgcaacctcgaattcctaggcttcagcaatcttcatgccttagcctccagagtagctagaactacaggcacatgccaccatgcccagttaaaaaaataacatatatataatacagatgagtgtcttgctatattacccaggcaggtctcgaactcctgacctcaaacgatcctcctgccttggcctcccaaagcactgagattacaggcatgagccactgtgccctgccccaaacctcacttaatgtatgaaaggccaggcacagtggttcacgcctataatcccagcactttgggacaccaaggcaagaggatcagttgagtccaggagttcaagaccagcttgagcaacatagcaaaaccctgtctctacaaatagtaaaaaaaattagccaggcatggtggcatgcagctgtggtcccagctacgagggaggctaaggtgggaggatcacttgagcttggacattgaggctgcagtgagccatgattgcaccactgcactccagcgtcggtgacagagtgagacaccttctcaaaaaaaaaaaaattataaaaatagaattatgaaactgtaggtttttaaatggcccaagttaggaagtagcacaagaaacaaataaaaattcaagaaaaaagttgaagtgtctgcaatataggacaaatgaagaattttttttttaatgttgaaaattgaagcttgggaggaaacagattttattaaaggcagtagaaggagacttctgtgaaaatgctaaaagacgcttataagcaccttttgaaggagttgaattctttcttgtgtctaatatgtctaacttaacagttttctaatttgaatgtaattccttcccttctctgtaaatttataaatattgattgaggtatttggggctcccaaattacattgtatttgataagaattgaaagaaagaccaggagctattaaaaagaagagagccaaatgaatgtatatacctcctccttgggagagaaccaaagtccctgtgcacccttgttaggccaaagacagtttggttgctgtccagagttgggaggaggggcatggggagttacggtgagcagcctttaagtgagaatgaaaaatgaaaaacagtgtggaactggcactgagtagaaagagaattggactaaatgttaggcgtctaggttcatgccctcaaccctcctagccaactttggctttagtcattctcagtctccttagctgtgaaatgagagggttgaaatagatgatttgtaagtccccttctggctcaaaaattctgactcagagaagatcttttctgtatcagttctttggaatgaatcttattttcaatttatctaaacagttttaaagtgctgtttagaataattaaagtaacactaagaaaggcttgaaaagtaatcaacaaaattgggaatatctcccataatgtggcttgtgtgacaatctgctaaaattttttaagctaataaaagtaaaagacaacaccaaatgaatgctttttaagaaagctaaggagacgtaatggcaactttccaaaagctgctaaagctctcagtctgctcctcccagctgttacttctcaaggtgctcatgggccttcggaaatctgacacaatgtcagacaaatacctttctccggacacttttattacctccttttcctgaaagtcatagtctaacgccaggaagagaacttatagtcatgtctcatttatcttcaatgttctgctttctaattgaaaattttccttcagcggtttttcaaatcagatcttaagcttgaattacaagtcgttataagtcttttaactttacagtgtttacttggtctgaaaaatagtcaggttttttattttattttattttatttttttgagacggagtcttgctctgttgcccaggctggagtgcagtggcgcaacctcggctcactgcaaactccgcctcctgggttcatgccattctcctgcctcagcctcccgagtagctgggactacgggcgcccgccaccacgcctggctaatataatcaggtttttaaaaatgtattgtttaaaaaataaaacttgataagttttttaaatattatgagatttttattttgacatgctcaagaatataccagaaccgaaagaatttcatttaggttgaaaagaatcagtttaggttactagtaaaggagatgcctttaggtaaatcatgcttatttgagaaagctttgtgcatttgacaacctattatatttgtgcatctgacaacatccagcaattatacaggatgtataattcatctctagaactcaaagatcattttaccaagtagcccttcaccgacaaggaggcagtggggtggggacagggaacagcctgcccttctgaagcaactgcgtcatattttatgcagatgtaaagttttatgatcttagcaaaaatcagaccacaaatacaaacttgtgtttcaagttggagaggcaaaaggactttgtttctggtgtgggaggtgattgtttgtttgttttgagtttcaggagttccatcctgactcacccttaccaatggcagccattgaagaccagagcccgaatcgtgaagaggcagtcattctccaaaacttgcttgccctgagtttgaagttccctgtcacttgagaagacttctttagggtgtagattatagacttgcctcagaaaggccactttttaaaaattaatcatcaaaataaatgaaagcgtgtataggtcacttctgttttctgtataagtttctcagaacatgctctgtatacactggttattcaataaatgtcagtcagtcagcagcatttatggagtgctgctctacttgaaatgctcataaaggaaagtgaaagtccccaggggaatagacagttttcagattgtttttctcttgtgtttctggttcaggatctacacagctcagttgtcagcacagatggaaaagtggctgtccttttcctatggagctgttgttcacaagtcaagcaatattccatcaatacatcactacagatgtaccacttgttaaaatattgacgtactggcctatccatttgaatgccacctgtttcctccccgctgggacctcttgggctgctccacaatttcacaaccaaagcagtaattcctggcttggtagagagcctctagaactgcactacagcactgccaccaacgttcattctggttggttagtgtccatgacatactccatctttaatatcttaaatgttcctcttgtactaaacattatctacacagaaagttaggggacattcaagaatgatgcctcaaagctgatacagtcattgtcatttaaaaaataagaagacattcaaagactaaatgaactggtacagtgatccttttacggtgaactattggattcttctcctggtcctagggcagagaccaggcctgaatcttgtttgtatcctcgttactaaacacaggcaagggaacagtgaatgttaattgaactaaacggaactgaatgtagacttcagacttaaaggagagaatggaagctgagatggccataccagaaacacaaactaaggcataccagaagacagtcttttcattaccaagtggctgccagctgagggtcagtaattaactgacaaaacacatggtgctacactacaagttaagtaaaacaggaagtagtttgatgagcagatattgatggatataccttgtcactaaggtacatattgctttcaaggtgtacattaactttcagtgcatagctctggtatgtctgcaaaactgaattctagaactgaattagacattttttgttttaaaagggaaagaaatctgaatagctcagtgttgagaatcaatatgatggcacatagtgattgtcaaactgctcattcctggtaaccccagccttgctttagtcagagcagtctgcttttaatgattttttgttttgttttgttttgagacagggtctctctctgtcacccaggctggagtgcagtggcacaatctcggctcactgcaacatccgcctcctgggttcaagtaatcctcccacctcagcctcccaagtagctgggactactggcgcactccaccacacccagctaagttttgtatttttagtagagacaggttttgccatgttggccaggctggtcttgaactcctgacctcaagtgatccacctgccttgtgcttttagtgttttatacgcattattctgtcactccctgagtgaaatcatctgcaaaaattagttcatgttaatttttactattctccacataattaatgggaaaataaaatgtttctattactggaacataagttcaaggttaaaaggggaaatgtctaacacataggtttttgtacttacatacttacaatagctataggggggacagtatacccataggtaagaacatgggtcctaaagtttcactgaccaagggcagaatgtcagtttcttcacctgttagctgcttgctcttgaacaagtgacttacctctctgagcctctgttcctatatgagttaaatgcaggtgataatacattacctgacagagccgtaatgagaattaagtgatgaaatgtttctgtattagagtaatacagttgctataaagcttacattctcgatgtcttgccactgtaggtcacctcacagtgcaatatggtcagtgggggcactctgctccttgtagttattcaaggaccctgatgtcctctatcttgttctgctctcctctaggtccttggggccactttattcaaccacttatgaaaagggagagaaggactgtgcgcacaaaaaggggacatcacaaaagtttagtttgagccaggcctggaggttgtgcacatcagttgtgccccgactcccaagactcagtcacctggctacagccaaccctggcaaaggctgtgaattgtagtgtagccttttgccctggaagaagaggaggacacagatattgctatgcactagctatctaaggcacttaccacagtgcctggcatgtcataagtaggcagctccttttatttatttatttatttatttatttatttatttattattttttaatagagacagagtctcactatgttgcccaggcttgtctcaaactcctgggctcaagtgatcctccctccacagccatcccaaagtgctgggattgcagtcatgaaccactgcacctgctggcagatactttttaaaaaaaaattccagaagcaccaggcagcagctacagtgatgctcaccatttggcagttgctcagtgactgtgcaaattatcctgaacccataaaagcactcactttgtgttgaagagccattttttaacaaaatgacaagaacatatattatgaaaggcaaccaagcaagatatacaccaagttgaaaccacaaatgaaaaacatagtgtgggaccctatcatcatgtcttcaattaccctccaaccctacatatatgggggaaaagtttctaaaattgggctactctaccaaaaataaaataataatttgggtaaaatagacccccaaaagttatgaaggtacttacgggaaggaaggattgttcagggctttagcatgagacttccattttttttaaaaagttattcacatattacagctttctattaagtagttataaattttattcataaagctaccaatttttgagcacctactctgggcagtcactgtgctaaatactttacctatatttgtgcccagtctatacccaatcccttcaaagacagctgttattcccttattttaaaaaattaggaagctaaagacatttactgactcgtcggttcaagattacttgattagaaaatggcaggacagtgatctttctagttcaagttgcacagctctgatacaaggaacaaaacaacaactcaaacaccaatgtcactggttgctatgagaaacgagtgagctgatccaaacacatggtatttcaggtacccagcatggaatagtaggtgctcaataaaggttagctctatctgcctccccttgttccctccctgttgccattcagtagaaatagaccatggcagcagctgctgcaagtctttcaccttaatccgagctgtttattctgagtgcacacacaggcgtgctcaaacctttcctttttttcctttcccatcctgttttgtctccctcaatcactttcttctcacttgtattattgtttatagaaagcactaggctgatcttttttcttgtcttcataagaaaggtaaatgtatttctactgctctgcactccactggagtgtgagttcccttggcaggagcacagataattttacaaggggtagctagtgttacatttgtagattctaccatgattatttacggttctgcaaaccattctgcattcatttcaatggcttccctaattccttccaagttgagaaaatctgatggggagggctttgctatttaccactcagtatattggataacacctttggcacacacctcgtagacttacgatgtagtatttgaatttgttaaggaaaactgtatgactgctgatctttgcaatatggttcctgttttcacagagattggcagtgatctataacaaaagccttgatagggaggtgttatgaggggtgtattatgtcctgtacagttgcccagtgaatgttcactcacacctggtgtttataagataaaccattgaaattttccttcccaatgaaagacaaaaccagtggaggaaataaaaagcccagtagaaatccagaagttataaaataattgtatatcttcttgtactaattttaattgtgtaattagattgtagatttgtgttgttacttttcaagtttaatggaccttcgaaaataatgcagcttttttttttactgtcaacttcaccaaattataagatatatttcaaaatctcctctcttttgcttccagatactcagactcttttatttcatttgctaactgtcaatggtctgtgtggcattatcttaaagccagattttaagagcttcatatttattagtgtgcagtctctatttgtatttttaagactgtcaaccttggataattgttgaaattctgctgagtttgagaagctttattttgcatgaccccccagatctaaatcactctcatctctcattatcacatttatgtaaatatttttagattattatgcaattgacagatacctttaaaatgtctgatttccggctagcagcagtgacttacacctgtaatcccagcactttgggaggccaaggtggaggatcacttaagcccaggagtacgtgaccagcttgggcaacatagtgagatccccccccatctctactaaaaataaaaaaaaattagccaggcatggtagtacacatttgttgtcccagctactcaggaggctggggcaggagtattgcttcagcgcaggatgtcaaatttgcagtgagctatcatcacaccactgcgctccagcctgggcaacagagtgagaccctgtctaaataaataaataaataaataaaatctgctttttctaaattggttttctatattttccttctctcgacaacctctctgcattatttcttgattcattagtagttatacacttgggcatctagtgttcttggctgtggtacaaactgaagcctcagttatctcatggccatatgttcttattgcatatgtcgtatgatttctaagaatgggaaattcagagcctctttgagcctgagtttaagatagacaactcagaatatgaaatatgtgtaagcacaatactgccttgtgtctatttaccaaaagcgttttaaggaatgcagcttcagttttgattgccagtgtattcctggcagactcataaaaatagggagcaaaagggccccctttacccctctggtgaaggagtttgatagatgagggattagagcaatgttaaagccttccagaggcaatgcaaagaagatgtcctgcagcttgagtatcagaaaaggttaatcttaactgctcttctcaagccagagacttgaagagcactgtttcctgaatcaataaggatttaaggaaataaactggtcacatttgtaaaaagagatctattttctgatgtgtagtccccagaatgggagcaggaggtggggttgttttcttaatttgtctgctctgtgaaggcagagactttagattttatgtgtttggttagtgcctatggagtatatgtagatgtctaataaacactgtgatgataatgttgagggattgagggaacattctcaatttgagcttctatttctgaagaatgaaacccttgtctaaaaggtgtctgtatcttatctccactaggggcccatccaggcttgagccaatggagtaattctccatcaaatcttctgtgttcaaattcctaggagaattttttgatgattcaatctattggtatgtttcactaaccttcatatctgaagtgatatcagagacacacttaatgagttgcagctctcaaataagttgctacaattggacctaaaaggcttttctcaggcaagtccagatatccactttcccttatctgcttactttcaggggccttccagagaacaaatggctggtccttttccaaggggacagattttcctacctgatgcttttgttctccagcaagaaaagaaaatgaaaactgttgtcttcccctagaatattgagtccagagtaagctgaagctttgtgtatttcttttgtagtgatttccttcatatatatatgaatagagtgactactgaatatcggaggtttgggctagaggtaaaaccatctctttgatatgcagagcaaaatgaaatgataaaacatcaaatgttgggatgtttgaaagagtttcctacatgacctgtcaggtcttaatttgctcagagtaatgccttgggccttcttgtgttgttaatagcctttaggggaaattatgttggaggctgtatcaatcatctggcctttttcttgtttcatacaagattccctgtacccttatctttctatcagaatattctagattagctgtgtatttgctgggcagccttagtactgatgccttaaaagaacatgtcacctgcccctgtcttactaggcactttccaaataataataataatactttgtgttctgaaacctaattttctttctttctttccccccaacttttattttaggtttagggggttacatgtgcaggttgttttccctgcagcaggtaaattgtgtcactggggtttggtgtacaaatcattttgtcacccaggtagtaaatatcatacccaattggtacttcaaatctctccctcctcccaccctccatcctcaagtaagccctggtgtctatcgtggaacctaattttctatttctctttttttttttttaatattacattttgactcttcacctggacacagccacattgagattaaggtattctctgaattaaatctgttctgggtattttgtgagtacgtttagaatttcaggtcaggtgcagtgcctcatgcctgtaatctcagcactttggaaggctgagagagaaggatcgcttgagcccaggagttcaagacagtctctctacaaaatataaaaataaattaaaaagccaggtgcaatagtgtgtgcctgcagtcccagttacttgggaggctgagatgagaggatctcctgagcccagaaggtcaaggctgcagtgagccatgaccatgccactgcacttcaacctgagtgaaagagcaagttttagaatttctatcttggaatagaagccaaattgggaaccaagaggcgaatcacttaaagtcacctgacaaatcaaaaaccaaccttaaatcaagtcgtttctctttcttacttgctgcaatgatatttaaaatatatgttgccctggttgagactgtttgtcttggatcaacatcattctaaagaaaaagggtaaatttgacagggatgcttattttacatttcttcctttcgctttttcaagtttttacaactaaaataaatgaatagtgtagcagctggaatagaaatctcttactgattgggccataaaagtgggagctttcagaaacagcctattctccacaaaataaaataacctagacattgtccaaactgttcaatgctagacttgagaactatagttttaaagcttcttttgctatggatttattatcatttataaatattatgaattttcaaatgagttagcaactatcaagacaggtaaatctcacaccctcttctgtgttcccacagccatttttatacataccttgttataattattatctttttcacccagtagcctacgggttctttgagggcagtatcaggtcttggttatctttctctctcacagcacagtgccttgtgtgtgataaagcccccaacaaactgaattaataaaaactatagatcatcctgcccagactgttttaggaagtatttgtgtatctcctccccctagtagtttggtttggtcagctctgtgcccagcatctctgctcagaaggcaaggacaagggagggaaggagggactgaaatttctttggctgactgaccagatgcagtggctcatgcctgtaatcccagcactttgggaggccaaggcgggttgatcacttgaggtcaggagtttgagactagcctggccaacatggtgaagccccgtctctactaaaaatacaaaaattagctgggcgtgctggcacatgcctgtaattccagctacttgggaggctgaggcaggagaattgcttgaaccagagaggtggaggttgcagtgagctgagatcacgccattgcactccagcctgggcgaagaagcgagactccatcaaaggaaagaaagaaaagaaaagaaaggaaagaaaaagaaaaagaagataaaaagaaagagaaagaaaagaagaaaagattcctttgtctattctcattagcagctcattcagttccattcagtgaacactctgagcatctgcctcacttcagaccttgctccagatgcggaattcgccaagatgagtgagagggtctactttgggcaaagctctctgagccttgaggtctgtcttcatcccaaagaatttgcactctagcaggggagaggggaaatgaatggacgaatatttatgtattacttgggttgagggagcagtcaattcttcagggaagggagagcaaggaaaacaaagaagggaagtgacaggggaagggaaggaggttccagaatgcatcaggtggataagtagcagtcttgaagtgtgaaaattaatacatggtatatttggggagacagcaagcactttaaggcatagtttcaagtagggttggggcttaagttgttgaagtgagagggattttttttttccttaaggctttctacacgatttagattgtaaatctttggaggatagactgctataccaccaagctttcctcagagaaggagatcaaaaacattgggagatttaaatgtaataaactaatacagaactataaagtgtgtgtgtgtgtgagagtgtgtgtgtgggcctgtgcacttgctaatttcacttccctttccttgtcctgtccactctctggtatatataaataatgaactgattaaaacactcacagaagggaaaaggagataaggaggaagaagaaaagtttatgttcattctaaaccctcaggtgctgtgatttcaggagggaagaagctgtttataagtaaataaatatacacacacatataataattgtacttcacatatatataataattgtacttcaagatagcgtgaatacttgcaatgatacaggttaaataccattagagtgataaaaccaagggactacaggatctcagagaaggaaaacctcaccttcagctattgtgattagagattgagaagtagcatttgaattgggtcttaagcacagatagaaatttagttgaggtcatagtagtagtagaatagtgccaggtactattctgaacactttaatattctaattcaattgagcctcacaatgaaccttgtgatataggtattattgttcttgtcattattattatacccattttccaaattagaaaactatggcctagagcagtcaagggacttacccaaagccaaagagttagtaagtaataaaaaggggatttgaacaacggtagtttcggcttcagtccagttaactagctaaactaccactcacaagaaacaggacagagggccttctaggagaaagaaatgtcttgggcaaagagttcatatttggaaagggcaaggtgagttcaaggagtgactaaactcagttaaggggataggatctgtgagtattgagagatgacaaccctgctttgttttgttttgttgacacagaatatcactctgttgcccatggggaaatgcagtggtgcagccttggctcactgcaaccctgccctcttgggctcaagcaatcctcccacctcagcctcccaagtagctgagactccggatgcatgccaccatgcctggctaatttttaaaaaaattttttgtagagatggggtctcactctgttgcccagtctggtcttgaagtccggcctcaagtgaccttcctgcgtcagcctccgaaagtgctgggattacaggcgtgagccagcatgcctggcctgaccaccctgttttgaactgtagacttcccatgcatcttcctgcttcatcttcctagtactttatgccattgtctaacatgctacatactattttagtggtttatcacatttatttagtctttcttcattagaatgtaagtagctagaagtttgggattattcagctttgttcaccgctctatctttagtctctagaagagtatctggcatgtagtaggttcctgttgagtatctgttgaatgaatgaatggataagttgaattcagatcactgagggttccacaatactctagcaatctttagtctcttgtggacctcacatgatatgtgggaagccaccaatcaaccttgatcatatcaatgtgtcatgtgtctgtgcattcagtgctgccctttggaggagggggtgctgcaagattatggtggagaaatataaaaacattgaaaggattctgtggtttgaaatgctttgttctacttgcaatactctcaaggagtagctgctgatgtggactgagttttaagggacttcaggaggcattgcaacaaatctcatcccaaccctattataagtacctaaagttacatactgttggatttcatttcgtgttattaatcactgatttttcattgaaaaccgtttttttgttgttagtactagctcagcatgcagcatactaagtaacaagcagcatatttccactgtacacaggctcttgggccagaccaccactattgtgtcttgcccccatagcttggacatattctttaacctgtctaagcttcggtgtcctagcttcgaaaaatggaataataatagtactttcctcaatggactgacgtgaggattagtgagttaatatatatatttttaatcttaaaagagtgtgtggtgctcactttgacaacacatatactaaaattggaatgatacagagattagcgtggctcctgtggaaggatgacatgcaaattcataaagtattccattaaaaaaaaaaagtctgacacatggtaaggtatatagagacttcggattgctggaaggaattcttggaaaggaaggtgaaaaagaaataaaggcagattttatttatctcacagtttggccagaatcctatggctaaagacaccttaactttactgtttttatattccaccatcactaccctgaaagattattttggagagtgttgttggatttgatcgtgtggcattaaaaatgccagatgaccatatgttctcactcatatgtgggagccaagctatgagaacacaaaagtataagaatgacatattagacttggggtcttgggggaaagggtggtgggtggcgagggataaaagactacacattgggtacagtgtacactgcccaggtgatgggtgcactgaaatctcagaagtcaccactagagaacttattcatgtgaccaaacaccacctgtcccccaaaagcctattgaaaaaaaggttaaaggtactttggagaaacaatcaatttaaaaaatgccagatgacatctaacatctgatctataagatagtaagaactggacggtacagttaaaatcctatcacctgaaaatatcacagtcatgggggaaggaatgagggagagaaggaatgagggagagaaggaaagaaaggacaaaggaaagaaggaaggattctgaaaaaatgatgttgtaagcatcattcattttatatagtaaaacaattgaagagtctcttggattttgctgtaagggacttgacctactgaagaatttcttcttactgtgatattcttaaaatgttttaaatgagtgaacttcagttgaagcttctcataccaagacaattctgataaaactggagtccacactccatggtaaaattaagaagccctcaaaatagtaagaatgatcgaatattggtggctttcaatgaagcttcgtgtattctgttaagcagttatgccaaggaaagagataattgaatgttattgttcaactccagatggagatattactttatttttattttgtctatgtagtccactgcttctgtctacaaagtatttaaagtgactcacatgaaaatagtaataataaaatattgaaatacaagaagatcagaacaaagagaaggcaactataataatgctcaaccctactccaattggtcgaatcacttttccaattgagtttcatatttgttgctctgggtttttgaaaaacgaaagggcaggggaatcatgatctgtgacatattctttctcattatggaaaacaaggagaatgtgtcttccatagggaaaataaaagctgttcgagcataattctaagaagacgttttctttatatatatatatatatatatatatatatatatatatataatttttttttattatactttaagttctagggtacatgtgcacaacgtgcaggtttgtcacataggtacacatgtgccattttggtgtgctgcacccattaactcgtcatttaagaccataattctaagaagatgttttctatagaagacattgagtgatctaatgagtaattcacaacactgttatagtaagcgtagttttgaatttcttgtggccttttcttacggtggcattaagtaatgttgagaccctagtattgaaatgccataaagtgatttggtagccttcagcagggtatacttgaacttcattcaaggatagcattagacatcctgtagaggaagatggatgatctggccctttcaatgatcttctctaaagattacttctcccaggagatctgataaagagcagggagttggagatttcatttcctgtccgggcctgaagagctggtaccactaattctggaaaatccacatataaacattgcagccctgtgggcagttgttggattttcattgtgaaagttaagaatcctgagggtcttctggcctgcctgaaaggttgcccaccttccagaaacagacaaactcttataaattattattgacttaaaatttaaatccccaaagtgcttagataagataaaaatccatatttcttaactatgatggttaaaaagcaactatatttatctgcggcacatgagtagatactattatatgaggagaatgtttatattgtcagctattgtgtgcttcacattcatataactcatgtttgttgagcttctactgtgagccaggttaccttcttggatgtgtctctgcatacagtgtagttttatttccttaaattctctttttgatgtgttcatgtgtatgtttttatgttttgttttattttattattatttttctttttgagatggagtttcactcttgttgcccaggctggactgcaatggcgtgattttggctcaccacagcctccgcctaccaggttcaagagattctcctgcctcagcctcttgagtagctggcattagaggcatgcgccaccacgcccagctaattttgtatttttagtagagacagggtttctccatgttggtcaggctggtctcgaactcctgacctcaggtgatctgcccacctcggcctccctaagtgctgggattactggcgtgagccaccgtgcccagcctgattgtttttattttattagtttttttaaaatacaaaaactatagtcacttattattttaagtccaattattcagaaatacataaagatatataaaagttaataatcttttccctctttaatccccaaggttattatccagtgttatcagtttgatgtggcttcttccatacctttttctgtgctcaaataattttcttaattattcagagcatatgtctaaaacttcaatatataatattagtgatttttttcagtggagccatatttatttttgctggcaagcaggagaaattttcccctaattataattgattttctatagtgtacttgtttgtttgctctgtcttgagggaagggaggggaaacattgttattactctcccgaataatttagaagctgaagactccacctatgaatggaacttttcctgttctgaacaggaccaaacttgatgggatatgataagcatgtatttttcaaatgatgtcatcttccatctgatgtcaacttttgtgtatatgctcattaattttgagactagctccagtgtcacagtatcaaatctgaatatatcctacacacccttctcaaaagtcaatgctcgaatatcctttcattgatcttttgtcaaatagggaagtcatctggtttgtagtattatttcctgtgcatttagtgagtgtacggaatcccaggaacagcatgaccctaaagttgcaaaaaagaaacattttgaaaatctgaatacaagtggatcaccccttattgacggaggatacattccaaggcctcctgtggatgcctgaaactacagatagtaccaaaccctttacagttgtccctcagtatccatggggcatttgttctgagacctttctgaaataacaaaatctgagtcagtgaaagaaaatggtgtagtatttgcatattacctatgcatatcctcctatatatttaaattatttcttgactccttataatacctaatataatgtaaatgctgcgtaactagtcatgctctattgtttagggaataatgatgaggaaaaaaagttcattacatgttcagtacgtgtgcaatttttttttgagtattttcaatccacagttggttgaatccacagatgtggaacccatggatacagaaggcctgctatagatactatatttttttcctatatatacatgcctatgataaagtttaatttataaattaggcacagtaagagattaacaatagtaactaatgataaaataattgtaacaacatactgtaatgaaaacaaatgtggtctctctttctgtttttcaaaatatctttttatatggtagcaaggaaaatgaaaccacggaaagcgaaactgcatgtaaagggggactattgtctatagttatgacatcatttttgtgcctgtgatgatgcttgaggatgagaagtctgaaacaagatagttaactgttgaaaaaataggactgctttatgtggcaatcttaaatagcaatcgtatctgaaacatttctagatgcccaaagcaatatctgaaatactgagtgtagagggtctcttccatatttcagttattaggcattgctcacacagagagtaagaatatattaaggaactcggctgggcgctgtggctcacgcctgtaatcctagcaatttgggaggctgaggcaggcagatcacgaggtcaggagatcgcgacaatcctggctaacaaggtgaaaccccgtctctactaaaaatacaaaaattagcagggcatggtggagggcgcctgtagtctcagctactcgggaggctgaggcaggagaatggcgtgaacccaggaggcggagcttgcagtgagctgagattgcgccactgcactccagcctggatgacagagtaagagtccgcctcaaaaaaaaaaaaaaaaaaaaaaaaaaatatatatatatatatatatatatatatatatgaactcttaagccaacctttcaaccttcttctccatgcccattccctctagtctgcccccacccaagaaaaccaaatacacacatgctcacctacacatttgtcaaaatcttgactcttaaacccgaagaccagtaactatagatatgtgtcatatatcagtaggatatcaccacaaggtatgtctaagaaagctaacttcagtattcccattttacagatgggaaaatagatggaatgtgggaggaatagtaacatggagaaaatagtttcaaggtatggtggccatgtagtagttaaatgaaaagtaagtcccctgctaggaagctgtacttcttgctagcctcaatgaaaccattcaaggatggccatccttgcatggaaacttaaagtaacctgaaggaagaggcagcagcttcatcgcatccagttggttaatcccctctctgtcaatcacctgcatacaagctgaaaaaactataaattcacatttctggagccacatggtcaaaatagcactttatattcagtgtgaaattcttaaaatgaaacccagctggcagatgggaaggactggtgtggggaggaatattgagtgtgcaagggtttcatgattttccagagagctttttatgctttgtgcagatataggaatatttttaaacatctatgatgcagcacaaatgaatttcttaaatctaaactgtaagtctaatttataatatttcataaaaaccattaagatagttatgcaagccattgcaaattcagccttgcctataaggatagagtgatttgctcatttagggaactcttttcaattcctccatgagtgttagttaatatattatgtcttttagtgctttgaataagtcctttgcttaataacatactttgtgagaaagtgaggggaacaagaaagagaatagttagttcagttcacttccacctccacctcatgtgcagaacttccccccattatgttgtacctcttaattgcttccatttttttctctttccccaggttttgtaggaggtaaaccatatcttggtgatgtacagggccagtggtcatgctggaacctgtcaaacccccatcccatagtacaatgctttttgttactgatccaagccctgcaacctaccggacacatttacagatttatcaaatcagtttgatagaagattgccccttctcatggtgccaaaaagcagttcaacctgtaagtaggttactacatatttggtgtccacgacttcatataagaagtcagaattcaagtatttcagcagctgcaggagatttcagcatttccgtatgttttatgaaaactataattgacttgctaaaaagtgtgcaggttacatgtgttgtatggatagatgagaagctacagtcaaacaggcaagaatttgtttctgaaatactgatttctctagagccacatcttttcctttttttcagtgaaagattagatgctgtgactaggcacctaaaatttacaaaccctatttcaaggactctgacgtataagtgtccttatgctaaatgtgacagggtatcaggaactaaaagtaagtttgtggacacatagaggcaaatgccatttacatgtatcatttagaattgttttgttattaacacttaccttctagttaaaaatagatcattggtacaagctatcatttgtcaggcattggaattatatgatttttgtttttaagcgcttttctggaattggcattttaccaaaggaaaaatgaatttggtaagaattcatttggaaagaaacagatgataatttcaaggtaaaataggactattctgcaaagcactaagattacctgctctctaaagaaatgtagtgtggaagattgtaatcagggcatgggctaagaaaagctcaggacattttcttgatgggtatactttataatagaattctgtttctgttctgggtctagaaaattggaataagttctatttaggaaatattttacaaatacattcagaataacattatgtttaatattttaactaatattatatttaataacaaggttttcagttataaccataatatgctttcatagagatgaatatttctacaggaaactgtaggggtgtgggggtgtgcacatgagcgtgggtttgagtattttaattttatttatttatactcgactgtcacaaaaaaggatttgaggtgatagacactagtattgattctgacagtggacatgcttttatgtaacactctaaacttcagactgaagtgggtgttaatgacttcccctctgagaatgcttttgattcagacatgatgaaaagtgtgactggaaatttagagcagaacgtgtagttaaaagcccactcatctggcctggtctgaactggtagttgaacagttaatcaagaactggctaaaaggccaggcgctggtggttcacacctgtaatcctagcactttgggaggctgaggtggtcagatcatctgaggtcaggagttcgagaccagcctggccaacatggcaaaaccccatctctactaaaaatacaaaaattaggtgggcatggtggcaggcacctgtaatcccagctactcaggaggatgaggcagagaattgcttgaacccgggaggcagaggctgcagtaagccgagagtgtgccactgcactccagcctgggtgagactgtctcaaaaaaaaaaaaaaaaaaggaactaaaaataaataatttattttaatttaaacataccaatggtactaatcttttcatgttgggccaaggccttttatctgaatatgtggccactaatcagagttgtgttttatatttgtttcattaagcagccattacctatgatttttcagcttctgtttctttaaaatggaactataagttaaagatacttgggaagcaatctgcatctttccctctcaatcctttgtagttatcttatctaaatccaatccaacagcagtttggttttagtgactcacctttattaagttctttgaactcattccatttagtttttcataggaatagaaattctcaagttcatattttatctgttggtgtcacatttacttatactacttaataataaatatgattgccatcttgagagctgtgaagcaacctaggagtgctcaccagttgtcagcatccactgggtaattaccatcattcagggtgatgtgtccactggtcatgaacattcactgtgtaggcaacatcaatcatttgtcttgtaccaggacaatgaagagtcggttgatccaaggtgattaggtggagactaatcagtagagcttttatcatagctctatgtgctattgttttgaacccaactatagatttgtccttatctatggctgctttatatttaacccatatattgccttctgtccctcctttagatcagttatatagcaaatgttattattgctgtggtactttcttttccttcatgtcacttattcctacccgactttacttagttacttgatatctgtcagtatcgctggccaccatgtaagctccatagggccaggacttgttatgttcacctttgtatccccagagcccaaaacagtgactgtgtagactgagtgaaaggtggctacttccttggcacacttgtttcagcccaatttggtgtactgacttggccccccaagatctgttgatcattcattttgagccagaaagaagcacagagaataggagctgttgacctgtgatgctcctggacggagctcctggtctaccctcccagtccactttctaaatctcctggttccagggagtgagtctgatggtttgtgctgctaaactgtggattgaatcattaacaggggtttgttctctgacttttgccttagaagatcagttcagagcaaggtttttcaatcttggcattattgaccttttgggctacataatgttttgttgaggtgagaggggaagctgccctatgcattggaggatgttagccacatctccctggcctctacccactagatgctggtagtaaccacctgctctgcttccccaccccctgttatgacaaccaaaacaatccccaaacattatcaaatgtcccgtgggaaggtacagttgccttttcctttccctggtttagaactagtattttcaactagtcatggatgacaattacgacccaaggccacactcccaatgctgtggtaaatcccagtcaatggcttttggaacctttatttctggtgttctctttatgtctgattagaatgttcttgagacatgtctttcacaggctttgtactgagctcaactagtcctgtgtgggattttttggctaaaattcctcagtacggattaccacttagcttttctttagacggcctgcaagcctctttccaagctcatatttctcagttgccaggatattaggctcctgactgtattgccagcagggaaagaaattcccttcccgtgactgacatggcacctggttacaagcccatttgttacctgttgcccttgctcagatgtgctattgaggcggctgtcagctttttctgcctcagctccctgcccctctttcccctagttctccatgctttcctgttttttcttttccttctggtgtttccatggtggcttcttgctgtagccagaggacaaactgctgacaggcacatcccttgaatatctctgcatctggacggggccattggcaccctccattggtgactgagtaacgcgtggcttgccatatttgtctgtctcctgtttatggcccaagaatttgaatctgctccagcatctaaatgttgtcgttgttaggacagagtgctgccatagtaccacaaggccaatattaaacatgtttatttgggttccatatattaacattttgatttgttactactgctgttgttttttcatacccgacagctgcaagattgagacaggggacatatattccattacaaaagccaaataaccttgtgtgtataaactgtttttaaaagatatttgtgccttcaacattctttaaccattgactaaatatattctccctaatattttgttgagtcagagaatcccttgagttggccaattgacagtagtttaataaagtgcacaagggtgccaatattggattagcagggagaatagctagacttgacaaaatcaaatcacgttcccctggttgtctgatcaggtagcaatcgtttgacgtgtatttgtggcacacagcctcgtataacagaaaaagttgaatgtgaggtgtggccaaaaactcattttaaaagatagagtagacttttaagaaaattgagaatgtgaaatagaatcaggaattgttcatttgtcagctaacgttaagttacctcaaatgttttgtaaggtcttagagggatgaaatttgatgttcactctgaggcaaatgttggatttgaaaaataccaggctcaggggcttcttcctctcatgctattttgcagaatcaaaggctatggtgggaaaaccgtgttttctgtaacacaaaagcataaattctcagcactggaatgtcctcagagcacatctagccatcccagtctaagcttttagcaaggcaaaggaggaataatccaactgtgttgaaacatttcagttactgaggcagacacaattgttggtaatcatgagttgtttttctttttcatatgctctttaacctcataaaatatggaactcatatcttcaacctgcactttgtaatatcaggatgtgcacccaccctcccacccacctagccatttcaatatgcacacttaatgggtattaagtttaaaaaaaaaacttaaaagaatcaatttcatggtgaatgcatctagttaagcaagccatttaaacaacattttactcgtgtgtagcagaccattttataagatactgatagctttacaagcctgtgtttcagacaagctaattggttgtctctaatatgtgtttggggctttcactcattaactccctttcctgtctagtacatactttgttagcttacagacatataggtaggactccttaaacaaccttattctattgccaggagaaaggttttcattgaataggtttcttcctacttacaatatttgctttcttgaaaggaaggaaaatcataactgaatattaccccaaatacagaagataaaaaatcaagtagaataccctaaaagtgcttgataccaaaaatgaatgctcttttgaaagagtggagtggaaatgattgacagaaaggaaggaaaggaggagaggagaaaaaggaagagaacatgatgtgctcttgaacctggctgcctctgtaattaacgactatgttatgtatggtattgagaagtctgttgcttgcacctgcatgcaaagacaagtgtactgatgcttctctttttgcatatgtcagagctttccattctctgaaataagaattagatgctttgtttggacacagattaaaggaatagctcaaaacataagtgtcctatgtgggtcttgagatttctggagtggttctcttttccaggataggttgtttacttttctgtttgcaacacgattcattgcagctgcccgtaggcatatgtgtaatcatttgaaccaattatatctacagttttgaaactcttcatgtaaaatcccacctccttcatgaaaccatggcttgattaattgggaagactggtaacttctctccaatattcaattttcttcttttactaacattttaacatggaatgaaatatagtacatattttgttgtctttttcattgtagctcagctatttaaatctatttttttcaaataagtatcctctttgtgtctcacattatattgagaatactagataatacaattttttttcatttctgtgccctcaaggaactgaggactcatacacatgaaaaaaatagggaataattatccaaatctggattatgctgtaactgaaaatggagttcaccagagacttgtggagatgcttcatctgcattgagtcttgatagcctaacccattaatttatacaataattatttataatgcctgttataagcagagtataatggttcctataactaaaaagttcacagattgcaggcctttggcatagcttgattcaggggtttgtggttcaatcacacctgcagttttcttggctatttcttcatgtatcagctatctttcagcatttgtatcctgcggagactacctagaaaccaaacctcagctttgattaccttatgaacctctgaatccagtgggcacacactagcaggggatatttcagttttataaacaaataaatcctcttcatctttttaggccagtttaagttgggcattctgtttctgtcaaccacaggcctcttcagttactgataatttcgtactagaagggattgctgagttaattctaccaaacattaacattcagttactcataatttggtactagaagtggttgctacaagtgaactccgcaatgtagaattggataaatagatgtagggaggaaaaaagtaaggaggactcttctgtccctgatttgtaagattagaaatcctattcactgattgaaaaacagatcatttacattttttcttgtcgtaacttggaatatgtcattaactcttgtgaatacagaaacaaaatgtgagagagacataatccaactgaattttatttttaacatgtataagaggtataaccatgctagataagaaaacaaggaaaagaatatagaacttcatttacttgaatcaatcaaaaaagctagaaattgaaacataataatatatatgggggtgagatccaacagaatgctcttaaaatgccattaaaattaaatgtttgttcatccttaggaaagtaggagaaaaaagagcaaactaaaccaaaacagacagaagaaagaatataataaagattacactagaaataaatgaaatagagattaggaaaacaatagagaaaatcaataataccaaaagttagtttttttgaaagaccaataaaattgacaaatctattttttttttttttttttttttttttttttttttttttttgggatagagtctcactctgttacccaggctggactgcagtggcatgatcccagctcactgcaatctctgcctcccaggttcaagcgattctcctgccccagcctcctgagtagctgggattacaggcgtgcaccaccacgcctggctaattttttgtatttttagtagagatggggtttcaccatgttggccaggctggtctcaaacttctgacctcaggctatccacccacctcagcctcccaaagtgctgggattactggtgtgagccaagacgcacagccagtttgacaaatatttaatcaactaacaaagcaaaaatgagggaaacttaaatttctaaaattagggatgaaagaagagacacaactaccaaccttgcagaaataaaaaggggctgggtacagtggctcatgcctataatcccagcaatttggtaggccaagagaggaggattgcttgagcccaggagttcgagaccagcctgggcagcatgatgaaatcccatctctacaaaaaaatacaaaaattagccaggcatggtggtacacgcctgtggtcctcgctactcaggaggctgaggttggaaggttccaggctacctgagcctggaaggttgaggctacagtgagccatgatagtgtcactatactccagcctgggcaacagagtgaggtctgtcgggggtagggggggcagcgggtggaacccaaaccaaaaaaaaagaaatataaaggactatgaaggaatacaattaaaaaaattgtttgccaaataactagataaactacattaaatgtacaaattcctagaagggtgcaaactactgaaatttactcaagaagtaatagaaatcaaaattagacctataacaagtaaaaacattgaattacccttcccatcagaaaagcccaggacccttgcttcactgctgaattctaccaaacgtttaaagaatttacaccaattctcaaaccattccaaaaagtagaagaggagggaacacttcccaactcatgccacaaaaccaagattactatgatactaaaaccaaatacattacaaaaaaaagttaaagaccaatattccttgtgaatatagatgcaaaaatctctcaaccaatatatttgactcttgaacaacatgggtttgaactgtgtgggtccacttatatgcagattttcttctgcctctgccacctgtgagatagcaagaccaacctctcttcctcctcctcctcagcgtgctcaacatgaagacagtgaagaagtttataatgatccccttacacttaataaatagtaaatatattttatcttccttattatcttattaatgacattttattttctctagcttatcttattgtaataatgtaatgtgcatataatatacaaaatttatgttaattggcaaggcttccagtgaacagtaggctattagtagttaagttttgggggacttaaaagttatacatggatttttgactgtgtggccgtcagcaccccaacccccatgttgttcaaggatcaactgtactaacaaattaatccagcaacatataaaagagaattatatatatgataatcaagcatagtttatctcaggatataaagttgtttcaacatacaaaaatcagtgtaacacattatattaatatactataagataaaaatcatacagtcatgttaatagatcatgtcaaatgcaggaaaagcatttgacaacatagatttaacacatgacccaggaattccatccctagatatatacccaaaagaaatgaaaacatgtgtttacacaaaactgctcataaaaagcagcattatttataatagccaaaaagtagaacccgaccaataaatggataaacaaaatgggatatatccacacagtggaatattattcagccgtaaaaagggatgaagtattgatacatactacagtgtggatgaccattgaaaacattgtgttaagtgaaagaagctagacacaaaagaccacatattacatgatttgatctatatgaaatgttcagaataggcaaatccatgaagaaacaaagtagagtagtggttgctaaaggctgaaggaaagcataattgggggatgactattaatggttcaggtgtttctctctagatgacagaaatgttctggaattagatggtgatgattgttgcacaaccctatgaatatactaaaagcaactgaatcgtatgctttcaaaggatgaattttatagtatacaaattatcagtaaaagaaaatggaatatctgtagagcaagatggaaagatagtaaaacatgtgctaaagaaacataaagtccaaccaagcagtggaagaaattatctagaatcttaggtgggagtatccatctgtgtgagtagacagtgaagtaggtaatgataactacctcctaatccaggagcaaacaaccccctttgaagaccgacgttttctaagagttgtcacaactattttttgaaagggcttaacttgtcaatgagtatctccaaaaattttgattgaaaagcaacccaagtttgggctgggcgcggtggctcacaacctgtaatcccagaactttggaaggccaaggcaggcggatcatgaggtcaggagatcaagaacatcctggctaacacagtgaaaccccgtctctactaaaaatacaaaaaattagccgggcgtggtggcgggcgcctgtagtcccagctgctctggaggctgaggcaggaggatggcgtgaacaacccgggaggtggagcttgcagtgagccgagatcatgccatggcaatacagcctgggcgacagagtgagattccgtctcaaaagaaagaaaaaataaataaataaataaagggaaaccaacacaagttcaattagatgggaacctcaagttacatggaattataacccctttcatttgggatggcaaattgtttccttaatgaaaagtctttttaccctggaagatttaacattaagagtataaaaatgattaaataggctgggcgtggtggctcacacctgtaatcccagcactttgggaggccgaggcaggcagatcacttgaggtcaggagtttaagaccagcctagccaacatggcaaaacactgtctctaccaaaaataccaaaattagcgggacgtggcagtgcacacctataagcccagctactcggttggctgaggcacaagaatcacttgaacctgggaggtggaggttgcagcaagccgacatggtgccattgcactccagcctgggtgacagagcaagactctgtctcaaaaaaaacattaaaaagtaaaattaaaatgataaaataaccccacaatattaatactttcatttaaagtatatgttacacatagatcaaactgatagattctctttgtgattctcatttagaatgtaccagaacttgagagtcatttaattcataaaattcatggaaaaaaattctaagattctcaaccacttggggatgttttgattgttaaacagttgaaatgcttaaaaagaaaactgaatatattaaacttataaatggaattataaaatgagttaaaaatgaacttagtttataaatgcacccaaagagtattcaaaggcaccataaatgtaattgttaaaattgaaaagatatgtagatagaatattaaaatttttaagtgtaacacaaaaatttcaggaaaagctaggcttcaggtggtgtaaatttaacaaactgtatattccttttcaaaactgcaaagtaacaataactagtattgctgtgcaccaaaagccatcctcaagggcaccaaaaacctcaaactgacaggtcactgaccacttgcctaatggggagtagtactaagggagttggtaagaaaacttcctgtgccctggcttgttcttgtggtcttagcaagtctctacatacacgaaagaaacacaggctaaacacagagaggaaataaaatatggctttctttaatgagagatgaccctactgcctgcttgactacagttcaaagcatccgaagtcgtaactggagcccagccaagctggaaagcccaaatcctctgtcccactaaagtgtgaactaaagcaggggagaggaagtctagcaatttgaggtcaaactgaggcacagaaagcctgatgccccaggctcctcccaagcactccttgggcctccctgctagacaaagcagaaggctacagaatgctttaggccaggggttgactttttattttctataaagggctaggtagtaaatattctaggccgtgtgggacataccatctctgtggcaattactcaactttgccactgtagcatgaaagcagccatagataatacttaagtaaatgagcatgctgagttctaataaaattttatttacagggaatttatggtgcctgggtgatgaggaggcaaccaacaatggcctctgctactaagaccccttctatataattcaaaagttgctcctatatcataagcgatccccttgaggtgataggaggacatcagcttggtcttaaaagatgagagagtatttataggctgatccttcccacctgtggatggaggcacctagggttggaagcagtagttggagcaaaggcctggatgcaggaatccctcaggctgtagagggcctgatagaataactggagtagagaagggtacagatatgggaatactggatgtctttcattagtccctgaagacaagaagcacccatacataactgtgcctctcatagtggttatctagaagtaagctttttggatagaagaataaaacaagcccctaaggcataccaaaaataataatttaaataaaaacagacatgtttgctctgtacttcttggtaatcagattaagcaaaaacaagactgtttttcagatcctaggtcctaccaccaaagctaatgggatcattttatttggctattctgggacatactaacttctcccgtgcattggaagactgggtttctacacaattattgtcacaacaaataaaattctatacatgtcggaggttactgattggggaagatgacttatagtaagagcaaggctcaatcacaggtgattacctgcaattatttgtctggttttcaattattcaggtaggctgcactgaactttagtatccttaagaaagaagcatcttatgagaactatacttttgtacttaccatctttttgaaataaatacgcacccccaaagtaatattgtgatattggttaacatcaagtcatcattttcaggtccttgttaagcactcagtaaaaagtgaataatatccattctgtgttataatattttggggactgtggcaagttggttttttatttgtatcatttatttctgcctttaatgacatatttagtacctttctaaggatttcaaaatcctgcaatgaaaagaggaacagctggtgctgctctctagactaacctttctttgaacaagctgccaagaatgcactctgaagaatcttaatgatgccctgccactttatctccagaccctgtcctggagccatggcgtgggcatggctttctctgactttggtgaaggttacccagttaagctggcttcatgagcctctgtaatgaaggcagcaaagctggagggcccttttgcaaatacatatacaagatgtatacactcagtagtgtgatggtaaatgtgactttgtttgtttgtttgtttgtttgttttgagatggagtctcgctctgtcgcccaggctcgagtgcagtggtgcgatctcggctcactgcaagctccgcctcccgggttcacgccattctcctgcctcagcctcccgaggagctgggactacaggcgcccaccaccacgccctgctaatttttttgtatcttttagtagagacggggtttcaccgtgttagccaggatggtctcaatctcctgacctcatgatccgcccacctctgcctcccaaagtgctgggattacaggcgtgagccaccgtgcccagcctaaatgtgtccctttaaaaagaaaaaaagtcctgatttgttgtactcgcaggtttctgtggtgtaaatactcaaaccatggccacgttcatgacttgtacaatttgacatccgtgtacctggagttggaaggagaatgcacacaatcagctattgccagccctatgtcagcgggccccaccatatcactgagaaaaatttcaatgcaaatattttccgctaatgtgacacgttcacacaataggtctatctactctagtgattaaagaaaggtgctaggacatagacaaggaaagtcccactctttttgtaacaatcatggaaaaggtcctacgaaattttgctgtccattcaggctctcttggcatcctattaattggagcaagaccatacttttactagagagtttaaaaccagtataggccaggcacagtagctcatgcctgtaattccagcattttgggagccaaggcaggaggatcacttgaggccaggagttcaagaccagcctgaacaaaataatgagataatgtctctacaaaaaataaaaaataaattaggcaggcatgatagcacattcctacagtcccagctacttaggaggctgaggtgggaggattgcttgagcccaggagttcaaggctgaagtgagctatgattgtgccacagcactccagcctgggtgacagagctagggcctatttctttaaaaaaaaaaaaaaaagtaacagtaataataaataaataacagaaccaatatgaatccatcccaaaaccatgattcctatagttctttgaaaaatacatgccatgcaatggacactgtgtatttaaacttacaagaaagcagtaatagctgcacgtggttcaagacagttaacagattctcttgcatcatcttccagcttgcccttctccctgtcacatcccacagttgcacttctttttcctggccttttgtatttggtttgagatcctcacccagtcatctgcattagctgacctatccccatcagtttgaaggagctaaagttgtcaacctagactccttcatgagacctgtttccttttccagagatggagaatgtgcctttatttctaaagtttattttaacagtcttctatccagatactttttattcaaattgagttctgtgatttaagaactagtctaagtaatcatatccctctttattggaatccattgtttttctgccttccagtggaagtaagtccaagtgctataaataagtgaaaaagcccttagtaaactgtgcagtattaaacggtcttttatggtcactaaaaagctcatgggggaaaaccctgtactcttataatacaaatgatgaggacagtgctcttctcagaccactgctgttgttgttttgttttcagtttgcagcatcgtgtcttcagtggagccccgtctgctggcacctggagtgctggcacccgagctgccttctcacactctccagtctcgttcaggacagagcggctgagtgaatgaagttatgggaagccaacttttagggcaaaactttccaaagctccttagatagatcctgaccccaccacaaccacctcgcaggcttaagaagggtcagttataatccactagtttttcacagagggaacataggcattgtgtgtagtgggtgatctgggggagaatggggaaagcagatatccagctgccatccccagtggtgactatgcagaaaaaataagctaatagccccatacagggtgagaggtacctgtatttcacatggcaagagcagcagttcccaacgggcaggaccacccagggaatgtgttgggcatgggagggtgcaggttgttttcatttctagcaatgactggttgttgcccatggcatctaactcagtagaactaggggtggcgtattctatgatgcagagcagagtcccacgcagtaaggaactgtcacacaccctggctctccatgtctcacaacacgttcttgtgggtcaaagctctgtttataaatatctgagctgagaacatgactctctttcacacacaaacactaagtaaaccctttctggactgttctgttcccctgctccccagaatgcttacaggaaaactagttcaactctgggcacacactactggtttaataacaaacagaggaaaaacaagcagcctaccattagaaataaaatgaagtttgcagatttttaaaaaggaaagacttgttattgaagttcaaaactgtttacatgccttctagaaatttagtcacaccaaattggcaagaactgaaaatcaaaattttgaatctcaagtgagggcaagatagggaaatcagagagcatcactgccccgttagagatcctggacctaggaaaggatgatactgtgatttcactgctcaaggaaacataaaggacatctcctacccaatgagtgggtctccagtgctatgtaatgtctcacaggtttaacagctgctacaaacattagcagcagtgagatggtgccgagtcgtctctgttatattgggactttacagtaaacgcgatgtgtgaataatggaacgcagtcatgccaatcagccggcagtggcatgagtggagaaaggctctggtgacagggctaaaataggttggctgctggtggtggctttgttttcctatctctagggtggacacatggctactaataaatgcccactctctgtggctttcctgaaaatagctaaatgaccacaggttgtcagacagctgtattctgatgtcattctcccaagtgccgtctccaaaggccaatgtgaaacaatcactatctccttattcaagaagttttcacttaaccgtgctagttcagcaacggataagtagtcaaaagatttaggttcatgttctcttcagtcatttttaagatgttcatcttgataagtaaatggccttaaaaaattgtatgtccatcataaaaaatagatcattgcatcacaggcagttttttttttaaaccttaaaaataacgtcagatgttaagtatatgacttacgttgttcaaagttaaacactattctttaaaactgtacatcaacatatacaaagacaaaaaagcaatggtgaacaattcaaatgtgactgtaattgttactgtaataacatagggaaagtaaaatttgaatttcagattgatataagataacaaaataaaaatgttatcctaggccaggcccagcagctcatgcctgtaatcccagcactttgggaggccaaggtgggcagattgtcctgaggtcagagttcgagaccagcctggccaacgtggtgaaattctgtctctactaaaaatacaaaaattagctgggcctggtggcaggcatctgtaatctccgctccgtgggagtctgagacaggagaatcacttgaacccaggaggcagaggttgcagtgagccgagactgcgccattgcacttcagcctgggcaacaagagcaaaactctgtctcggaaaaaaaaaaaaaaaaacagtcagaactagaacataaagtcctcatcttctcctctctgtactgtggtctttgtttttagaaacatgaaattccaagtaatgaaaagctaataaatgttccagcagcagtcactcactgtacttgaatactagtgaaatggcaaaactcgtttaaaaattgataccataaatgtagagttgtgtggaatcctgtggataccagtggagtgaatattggcagtgttagatacccacttaggtgatggatctgaaaatcttgaattacccagccatatttgtcagcttaacaccactaggcccctttatctgctgaccactctgtccctgtaacctccacttctttctcatgtttagtattcagcaggaacaacttctgaatcatgtctacctgcagacacctgtattatcttccatgtatgcctgtgtgatagactatattttcagttgcctagaaaccaacctttaacaggtagctgaacttcactgttttatgtctggtaggtattgtaaaatatcacatattactgatatactttgtgattattttaatccaatattgttttcaaattagctgtaaatatgctaccgggatcaattccgtattatttttaaattaaccacccagaggaagtattgttaatgagatgccttcctattattattattatttattattttaatattgaatttcttgtgaccagccctcttctcagtcattagcaatacttaaaatgctgtccttttggatttgggtttataatatgtatcagggacacaacttcctttatgtactagattttggatgttgcatacttcatctgatgggaagcattattgatcaaatactagattgcattgtaagcacagtggtcccaatttctgagctcagtgatacaacctgaagccttactttgtggcagaagcaacaagaccaacatctctgattttcagctctttggagcagcccccacctccttctaagggtggacttagccaggattccctaccagtccctcctccctactcttttttcccctattggccaatggtcccctactcagctaactggcagttcttccctctgcggagttgggttggtccctgatactggtctttgcaccaggaatttcagattgtcttggatgtcaatagttttcagtgccataaagaaaacaagctaaaagaatggagtttgtgttttcagtaagcaagaatcctcttaaagctgggcatggtagctcacgcctgtaatcccaacacttttggaggctgaggtggcagaagcccctgagcttaggagttcaagaccaccctaggcaacatggttagaccccacctctacagaagattttttaaaaattagccagttgttgtggcgtgcacctatggtcccagctactgaggaggctaaggtgggaggatcgcccaagcctgggacgtcaaggctgcagtgagctgtgttcctaccattgcactccagcctgggtgacagattgagaccctatctaatctaaaaaaataaaaataaaaaaataaataaataaaacaaaaaaagaaaaacaacaacaacaaagaatcctcttaacatgatttataaaacaccttgggcaaaaaattgttctgaagttgtatatccattttctgatctgcaagtgaggtgttcattactcttcagaatcagaattaatgaggatcttgtaattctcacaggttttttttttaaattagtgtttattatgaactttcagacattgataaggagactttttggacatacttggactataaaatgttagtatatttctggttcctaaattagcataatagcttagtatttcttatatatagatatatatgtcttctggcttatatgaaaaaatgtacaaacatattaataccaatttggatagcatatctctactgtcaacaaacagtagtctgcactggtactggcaaaataaaaccgtatttgagcatggcatttaaagtggagatacttttttttctaggtcaagtattgactaaggtaagactgtaatttttcatgacacatgagatttaacgaaatttgttaaccaagaacatctttgagcaatgtctcttttgatgttgctactaactgtatttgatgttatgtaaaactttgttgggcaataaatataatgttctacttttgtatgatacagtgtgtatgagtcgggagcttcctgaactttgtgttttatgataccttttgagagaagatcatcaatacttctagaagccataataatttgctatttattcacagccaggaattggtaatactaaatgccgttagtcagtatgctggccaatatagtaagagtgacttgtgactggttattaattgaacaggtttttcagcacatacctattataagttcttgctttttccatcctagaaaattcaggactgaaaaagaaaaaaaaaggtagaagattttacgcatatatgtaaatttatgtaagtgtgtatatgcatacaaacatacatacatgcagtttctatcctctttcctagaaaacacgctctcatgtctcagaagcagatactagaaatttgagagagaaagagaagaagattatttaaattagatttttgttgtgttatgtgcttgatggtcaaaataattgagtcttgagtaatcaatatagtacctactgtaagtcgtcacccatttaataagttggcaaggtgagatagtgaaagctactctgctaattattttgatgaaatcgaatcttttggtgtctgcaatgtatcttgactggtgccatagtgcaaataattttttctctgacttcatcagacctcccacgctgctaaatgtatgggtggaatggtggcttgcacgcagatcattcacctctaaagaaaacactcccaggtcacaatatataacccacattataacaacagctgcggacaggcatccacattgcaaagttgtaggcatcacagttcgtataaattccgcctcgaaattcccctactttatccctcagaattttgatatgagaaagtttctgatataattaataacctatttatctttattttttcctcttaagatcaaaaaatattttgaacttgaaccacttgcacgtggaaaacgctggattctacagccctgctcactggatgacatggatgcactgaaagacagcttctctcagctgattaatttgttagaagaaaaagaccatgaagctgtaagaatgtgaaatctggcaaagaaaacaggctcccaaaaggccttgaacctatcatgttagtttctcattttaattttattttggtatcaagactatattggcttcagtatctattttcctctggtcatttcagactctcatctctctattaaagtgaatattctgtagatcagatgaattatcatcggcattaacgtcaagtacacactactgagagagaatttattctctgtttaccactaattatcttccccgcatgtctcttccttctgttgttctaagcatctcttctatactctgtgctgaaacggatggaattcatggcttatggaaatcaaatcccttttgaaggactcagaaagactcacaagaccttgatcattttctctgggtttgggagtggagtattatgtgactgggactccacaaaatatttatattattttcaagacctattgggggttttgttttattttatctaatttttttttttttttggtatactgagcttatagactatgagagaaaagtgagcaccaaaaacttcattaatcaccttatcaggaaggaatatcctgccatagtaaaattggctctgaagagcttagaggcaagttacacaatgttttcttgattacatctgaagtctcttctcttttaagagcaaagacattgtttcagtttctgagagtggttagaggaaatttaggtacaatgcatgcatcacagactgtatttgattgattcgagtcttcaaatattgtttaatggaatgatgagcctgcataaagtgaagctgcaatgtaacataggtatctttttctaaaaacttcaagtgtttgattaaaatagagaaaataatttttaaaataatagataaaaattttaaaaacagccagaaaaagtataatttatactggttagggtttaagatggcatggatttgacaaagataacaaagacagaatcatctatatattcattcattacgtgttactgtagtttattggaatctgttaatgccttcctctagtagttaaaggtttatcagtatttctattataaacctctattttcaggggtttcaatgtgcccttaaaattgtgctggggctgcagcaaataaataatattgggactcatattcagtctttggaactagttttttttccatttaatttaaatgacaaaattgcatagggataaatgtacagttttactaaggtttagcacctttgatcttttctaaatcaggaaaaaaatctatgcatattgaggttcacagatgaaatattctttggcatactttgtagactttgaccacttaaaatactaagtggccaaatgataaaaaaaactgctccctgcacatgagtgtaaaaacatgtttgtaattttaagtaaaatggactgatacccaaataccacagactcacactatattacagaatgatgtaatacctggtaattctccagaagatagacttcagacccttaatgccatttaaatgtagtttttgtggtttaatcttatgagtagattgtaatgaaatcattacctttgaaacatcaaacacttctttaagctttttttttttaatgtcatgaatcaggaaggatacatagtgattcgtatacaattttgtctgcagcattcttgaatatttttaacactgtgtaatccctgagcagcacaaaacttttattccgatgaccagttacacaattcctgtttttattttgtcctgttgtgctcatcttctatgaaaaataaatgattattaggccttgctttccctgcaagttcattaaatgtagaatgttgtctttttaagacaccgtggctgagtgctcctaagccatctgttaaatgacttcccgtggtctgcgtgtgtgtgttcatgtgtgcgccagtgatgggcctctcctcaaacccacgactgtctgcagcgtctcagccgtcagaatgaaaacattatcaatcagtacccaacaacagctgtttttgacaagtttctgtctgacgcctaatgctttacaactgtcaataaggctccctctttgtctagcaggtcggagctcgctgtcttgctgcttccgcgcggcatcctgtccttgtaaccctagaatttgccatgttttggaaatccacgtgggggcggggtggggcctgaacgggtggggatgggtgggtgggtggtggggtgggtgggatggctgggggtgggagtgtaagtcccttttcctactttcatgtaaagtgccacaggtgtcttggtttgcatattcaaatattatataggaaaaacagtctgttatgtatttcttcacctagcttcttgtaatatttatggacgtttccagtttttgtaccttcttagctaaagcagttgcctttttgtaatggcaattaatttatatgataaaactttgtatccactgtagttgacagtattggttgctaattaactgccatattgccctgtctttctattaaaaaaatactgtacctgtacttagaggctaacagattcatgtggacatttaccaggcaagaccaacttgtattgtccatgatttctacgatttccactatcttcaaatgaaaaataaacgctgagtagaactggtgttttcagactaactcctttcaactttagcatttgggagtcccagatttctgtttacgtttgtgtcgcctgtttgtctccaaaataagttctgctgctcttgggtcaaaacaaatgattaattcgcatttcctttgaagccattgtgaaaaccttaaaagaaaaaaaaaaaaaaaaaaagcaagtatcttttccagttggtttgtcttcagcagcaatttactcttattgaagctgttccttcggagtgtgtgaacagactcaagatattattataaagcatcatccttcaatcaaaggattattttataatatgtgctgtgaaattaacttgagtggcaaagtttggtgcaatgagttatttcattcaatggtgattgatgctgttaagtaatatttttaagtgactcgaggaaatactgtgcatttacagatccatccttaaggatgcaggtctaaaaaaagagtaagaaagaaaaatcaagtggtagatagatagaagaagagagaaaaagaaaaaaaatacgtaattgaagatgaaaaatttaaatcccagcttttgcttggtcccaaatgcaacgttatcatcacttagtatttgactacacagagagcttgcaacgtttcacttctaagctgggaatctaaccttcattcctaggtttatttctagtgtaggcaattagcagttatcaacttcctaagcatctcagtcctatccaagtaaatgtgaacagaactgtaagattttgaagcaaatggggttttcttcatgtccatattgcatattcagacttgaatggaaatctaatattcgtgcctggcttcatcctctttataactttagagtgcattttcattaacctcctgacctaatggcgcaaacagaaatgaaaaggtatgtagggtggtggggctggaagtgggagttgccctttgggatccctcattttcaatgcatttggaagggagggtctgtgtttgttatgcagaaactttagaatgtagagtccctgtcttgttccccagcctgggtcctggagatctgaagttcatgctgtaaaatgcattaccacatcatgttgggaattcctggctcccaagggctcacagcatttggtcaccagtgaatcagcatgtttaaattatgtgcatctcagggttaaatgtttttcaactcagatgcatgaagtgactgatgagcccaaggtttggcaccctaccccacacccccttgtactaatttaggaacatgaaaaggatcccttagaagcctcagatgggatgtcagtttctcctcccctttcctattctctttgaattaaagctttaaatgacaaacttttcttccacccactgtctcatcagatctggaaattctgacttcccttcctggggtttcatctgtttgtaacaacttctccataatgtgacttactgtgaaaccaagcaaagaagttaaaagtcacaaagaagaatctctccaatacgccctgtctagcatcttcctttccttatgaaacaaagagaaattcaaagcccatgatttctctatcagatttttctctataatctcatctcacatgccatctctgctctgcaaagcatattgtattcactggctcctggtttagaaaggccaactacagggttcttaggcttagcctgccccttccctttcttgctgtacttctcaagtcctgactgcacacaggaatttccacagggcattctagatgaataatcactttctacaagggaatagtgtgggcctggtggctttcaaagaaacttcacttaccatatatgccttgtaagtcacttgtaccctgttgggagaataaagaaagtggtttctagatgtaatgccttgctaggctcagccaggtttataatccagtccaactccttatccccactgctccagctagacatagaccaacgtgggtacagccattccaccacacttttaaaaaacgatcttctgctaactactagataatggtgaattccctttttccttccttctttttcaaaaatctcttccttttatctgatgatctcaaagaatcctacataaatgtttcagcctagttttcttctagcagcaacatttcaaccatggaggtgagttggcaatgtagtccccagagatgctaacctggctcaggcccaagggaacaaatcaaaatgaggcttgaataagcaccaggttccccagactctctcattttcctgtttcttcatggaatatagggaggcggagggagctggttatttcaaaaagcctaagatcacttccatcacaggcaaacccctcctgaaagtgtgaaatccagcctacaatggactttcaccgacaagtgattcattgagacaaaggctagagttccagcatcaaacagatgtcagacaaagcaccaaacgcctataaatgattgctttgcaagcaagggaatgactggaagacctggcctaatgatgtaccccatgtctggacaagcttacagaagatggtggtggagggagctggtttttttttttttttgagacggagtctcgctctgtcgcccaggctggagtgcagtggcgggatctcggctcactgcaagctccgcctcccgggttcacgccattctcctgcctcagcctcccaagtagctgggactacaggcgcccgccactacgcccggctaattttttgtatttttagtagagacggggtttcaccgttttagccgggatggtctcgatctcctgacctcgtgatccgcccgcctcggcctcccaaagtgctgggattacaggcgtgagccaccgcgcccggccgggagctggttttaaacagagtctgtgaagaaagctgtttctggagagagaagtaagaccacaattcttacctgagaggttcatgttgaaatgaatgatttctggccagtttgcgtataatctgtgtaaaggtaaatcagaaaaatgtgtgtccagggcaccttgaaggccagagtgatgtggtatgatattaaatcattagacatataaatattaaaaatgagaagattttgttagaatggaaacggctcaccaaaaggcagagacaagaatgcaaacagtaagtctagctgtcattctctgtaatctggagcaagtcaggtttgtctctggaccttctccagttgttttacaactttctagacatgcagtgtatcaacccaacacttttattaagcagctttgacagggtttttgagatgacagctagtcgagattcaacttagcattgtacagttttatttcacaattggaactttcggttttaatacttttaggactttattcattaatgcaacactttttgttgaacacctactatgtaccagggattgatatagctgtaaatatgacatacttagtctctgtctttgtagtactttaattcctgtaacacttgttaaattggattatttttatgaccgtagagaattagagggggtgagggattttattatattaaaattgcaatttcagtctctagattttaaaaaatttgttcttggtcctaatttctgttttttagccctcctaatttagaattgtttttgggtgctgtttagcttctgcgaccattaataaaactaaaaatctaaccatagtgaagtttttgccttttcttaagcatctttgtaaatagaaccttgtaaagctagcaccttttattctgctattttgctgctacaacaatgaagcatgtgtctagcacacaaaggtgcttccaaagtgcaaaatcaaactcttgtcaattacctactgttcttttcatcctctctgtattcaaagggctttgcctcctctagaacagccttgtctcatcctgcctgttgatcaaacaaatgacttatatttgaaatgttgaatgtttaatctccaagaggaaaattcttattcagcagcagtctcttgtgttttattccacctaacagttaaagcggctgcatgtctgccacgattcacatgcccagacagaggcagtaacctgtaagcatataacctgctgggtttttttgttgttactgtttgacctaggaaggtagcagtgagttttaactgggtttcaagaggctgctttgattttctgtcattgaggactgggaacttggaaagacccctttacgcccatgatttattccaaaatggtacttgggcaaagtcgttcctttagcaggagttaacacattttggatttagaacatttttacaaaatctataccaacactgttcgcatttccttgaacacctaaaggccatattgttcctgctcaccagtgttaagccccatgctagatgtgacccttagagagccatgacacatcccttatgctgtttactggcccagatgttcaggtcagatcacaaaaattaactgaaatagaaacctctctatttccattccatttgttaatttcaaatcacccaatttttttttttttttttttttttttgagacagagtctggctctgtctcccaagctggagggcagtggcccgatctcggctcaccgcaagctcccgggttcaagcaattctcttgcctcagcctcccgagtagctgggactccaggcgtctgcctccccgtctggctaatttttgtatttttagtagagacagggcttcaccatattggccaggctggtctcgaactcctgaccttgtgatccgcctgcctcggcctcccaaagtgctgggattacaggcgtgagccaccacacccaaccagagtcacccaaattttttattttttatttgtatttatttttttgagacggagtctcactttgtcccccaggctggagtgcagtggtgcaatttcggctcactgcaagctccacctcccaggttcatgccattctcctgcctcagccttccagagtacaggtgcccgccaccgcgcccggctaatttttttttttttttgtatttttagtagaaatggggtttcaccgtgttagccacgatggtatcgatctcctgacctcgtgatctgccgcctcggcctcccaaagtgctgggattacaggcatgagtcaccgcgcctggcccaaattttttattttttaatttatgaatttattttttagagaaaatgtcttatgttcccccaggctcgcctctaactcctaggctctagcaattctcccctgattcagcctccagaccaaatttttaagtaaaacagtaggatccaacgaagtcatataatatcagcgattaatcaaaatgtgtggttcgtaattgggtgtctgctcctaatgaaataaggggcagtggtcatcagtgtctgctaatgtcacagaagcaaccaggcatagttacatgcttccagatagaagtgtgaaataccaccgaggaagtattcgtaccaaaaaattgaacctgaatctgatcaaccctctggatctaacaatttgtagaatatacagaaacagaggaataggttaaatgacacatggtgacacaataatcaaaatccagactattggaaatttaaacaaatgagctggtttactaaatggcaaggtggaaaaaagaaatagagggaggaaatctgtagattaaaagagtatgaagagctccatcaaccaattgcagagtatggggcttatttggattctgtttcaaactagcaaaatgtaaaagaatacaatttgagacagttggagaaatgtaagcacttgttgaatattttatgaattaaggaatccttgattactaagctcttttaggcgtgataatgaaattgtggttgtgtattttttaaaggagtccttatttattaggggcacatactgagatctttatggatgaaatattatgatgctcaagatttacttcgaaataatctattaggtgaagagagaaatagaagtaggtggggattagatgaaataagattgtttgtgagtgacagctgttgaagccaaatcatggtgaagggggatagtgatactttgttttctgtctctaaatgtgtaattgacattcccccacccccttttatgcctctgaatatgtaattgacattttccccaaaaagttttaaaagaaagaaagaaaagagaaaatgaagagagtaaaaagacaagccacagaatagaagatattttcaacacaaacccaagactgttaccagaatatttattcagagctcctctaaatcgctaagaaaaaaaaaaaatccatggaaaaattagcaagcaacttgaacaggcacttcacaaaggaagaggatatccaattggtcagtaagtttattagtagtgaggtgcaaataaaaactaccatgatctggcactgcacactcaccagaatagctagttaaagataacaccaagaaaaagaaaataagagggaaaaaaaagaaatgtgtccatctggcatgttaatcaccactgaaaatttgtgtcctgactccaagaaggaggtttgtagcatggtgactaatcccacagtgtttggagtcacccagaattggcttagagtttggctggactccttgctagttacgtgacactggacaaatcatttaaatgtttgtgtttcagttctctcgtccacagtggagataacatgccttcttcacaggcttatcatgaggattaaataaaatcatgcacataaagtgcttcttaaggtgtctggcacacaggaaacattcaataaatggtgacgatgatgattccagtaatgtctgtttgaaggaatctttgcatttccgaggtagaaagctctgcaagagctgaggtgggttgggaggtgcaaatggtgaggttttacaaccaattgaatttatataatggctacagcaacattagtcttggaaacccagtctcactggtcatggagcttttgtagatcaagtaaatacacctcgttccagtggcctcagaacttccatttttcatcatccaattgcccacacattgatttattcattcaacaaacactgattgaatgtatattatgtgcaaggcattgagctatatgtattaaagaaaggtaaaaccaaatacatttaatctgatatagtgctcaggactaaatatttgctatttaaacatgtttatttcttcagaggtcattggttctttctagtactttctgtgtcatcattcacttataagtcacagaagagcaatgattatgtctctttgttgccttttaaaatctacagcacttaataacagaaaatttcatgaatatttgtaactagctaaccacctcaagttgaaaacaagggttccaagtcatacattttttaaaaatagggctgggattacaaaaaggtgagctttaccatcaatgattataaaagagattcatgttcattatggaaaatacaaaggagaaaatagaaaataactaatcctagaaagaatcacattaacattgtgatgcatatccttttaatttttttatatacttttataaaatgggagtcatactatgtatattattttggaacatgctttttttttttttttgagacggagtctcgctctgtcgcccaggctggagggcagtggcaccatcttggctcattgcaagctcacctcccaggttcacgccattctcctgcctcagcctcccgagtagctgggactacaggtgcctgccaccacgcccggccaattttttccattttttaatagagacagggtttcaccgtgttagccaggatggtctcgatcgcgtgatctgatgatccacccaccttggcctccaaaagtgctgggattacaggcatgagccaccgcgcctggccgtggaacatgctttttatttactaacatattagaagcattttccatgctgttgaattttttcctaaaacatgatttttaatggctgcctagcactgagcaataccattattgcaatggttccatattgttgggtatttggatttctgttttaaatgtctttgtataagaatatttgtgcacattccttgatgctttttgtagaatggatacttacaagtggagttccagggtcaaaaattgtaaacactttgaaagcttttaaaacataattctcagattgccctccttagctgtaacaattcataattcctaccagtgattagaggctggttcctatttattacctgtgactttgggctatggaattattttaatctatcctgatttaaaaggtgaaagtgaaatcttgttttagtttgcttttctgataacctacattctagctagactttacacaaacaaaatagctttggtcatcattttctggggaagtgggagaactgaacaatatttaattctttttttttttttgagacggagtctcgcactgtcgcctggggctggagtgcagtggcacgatcttggctcactgcaacctccgcctcccaggttcaagcgattctccttgcctcagcctcctaagcagctgggattacgggcacccgccaccaagcctggctatttttttttttgtatttttagtagagatagggtttcactacattggccagactggtctcaaactcctgacctcgtgatccgcgtgcctcagcctcccaaaatgctgggattacaggtatgagccactgcacacagtcaacaatatttaattctgtgcactaaattgtttaactcaaacacttccctcccacctttacatgatgttgaccacaggatagatatgcaatatatgttatatatgtttttgtagagtggaaagacacaaataaacaccatgtacttgtgattaatccaatgtagaaaataagtgtgaaaggaggggaagaaaggaaaaagagtagaggcacaaaagaggcaaagatcatacatagtagtcccttgcccaaaaggagagaatgaaaacacaaaggggaaggtaggctgaagtcaaattgtggaaagccttgaatgccaggatgaggaagtgggatgaaatgtagtgggcagtggagacccactgaatgctttaaagaagagcagcataatcaaaacatttacttagggaaagtagcctgggcagagggtgggttgaaaggagaagctctagggtggtcacaggtaacagggaggcaaggaaatgtgttaatatgagaggtgtagcaggagaacatttgtcaaagggaacaacaaaactactaaggccaaactgaggagctgaggtaatgaagaaagaacatgaaaaccagcctccttgcccttgttaccaacccattgcttcacagccccttggtcctgaacaacaaacacaggcttggatgcctccggaggtgactgggtgaaccacatgatattggcagatgagcaaaggttctgcagggtgctattcccacccactcatggaagagttccagaggtcaaggagccctacaaactgcccagaaagtgctttgttgaacacactctagttgcctcagataatgggatttaattataagccaacaaataaaaccaccaacaaataaagtgggcaggtatccatttctgaggctgcataactgggctgttgggctaacaggaactgcatatttcaagaggcagcaggactttatatcatccaacaacagctagatgacaaaaacttctctactagtcattatcccattcaggtgcagcttcacaggtgtgcaacctagtgcaggggtccccaaccccagggccacagactcgcctgtaaggaaccaggcctcacagcaggaggtgggcagcaggagaccattacccatgagctccatttgctgtcagatcagcagtggcattagattatcacaggagcgtgaaccctattgtgaactgtgcatgctaggatctaggttgcatgctctttatgagaatctaatgcctgatgatctgaggtacaacagtttcaccctgaaaccatcatccctcacccctctctcccactgtccatggaaaaattgtcttccacgaaacaagtccctgatgttaataaggttggggcccactgatctaatgcattcacacaatgtcctgtgttcagaagggccatgtgcttggcttaatgctctgctgtcaccatcttggaattcttaataactttattatagcacttgtgttgtattataagtaaagtccatgggacaatggagccttcatgcaaatagagaagatattgcaatacgcatgttcttgtctgcctgttcatctacagcattttcgatgtcccctgggcacaggatttcggtggatgggcccgtgatggacaagagttcagcaaggctcaaaacagtacaaagtagttgtgttgagtctatgaccagaaagagaggacactggcatacctcagaggccatgctttccaactgaacccgaacttgtttcaaatgcagaaagaaggcaatggcattctaagaaacaccaacaagcaaggaagcctatcatatcccttctaatctgtttaacttccctgttttaaccaacctcttacactgaaaataatgccatggaaggaaggggaagacaggacaacccctagttcctgttcttttcttccttcctgtcagtagccaaaagtagagtgttggtgtaatatacatgtatcaagaagtcaaataaaaacagatgaggctgggcacagtggcccacgtgtgtaacctcagcattttgagaggccgaggtgggtggatcacttgaggtcaggagttcaagaccagcctggccaacatggtgaaacctagtccctactgaaaataccaaaattagccaggcatggtggcaggcacctgtaatcccagctactcgggaagctgaggcacgagaattgcttgaacctcggaggcaaagttgtagtgagccgagattgtgcctctgcactccagcctgggcgatagagcgcgactgtctcaaaaaaaaaaaaccaaaaaacaaaaaacagataagttagttttgtgcaaaatacaaatgtatgtatgagctataaaatctcaattgtgcaatttcaatgattctgcatatgagttacaactacaactggcatttaaaactgacattacacagtgaaaagatgaatggtaacatttatgctaataattttagtgtgtcatttttcttgatttagaatgacattgactagcaaatagaaattaccgtgactaggcaagatcaaaaccttggaagaaaagaaaaagctttatatcaatgtcactttttcccagttttttgaacaaggagtcccacatttccattttgcactggtctctgcaaattatgtagccagccctgtcttcaatacacatatgagcctgaaacaaactaactgggtttgaatttcagcattgaaattacttgccgaccttgagcaaattgttaaccttgtcaaggctcagtttcttcatctgtaaaatgagaatattagcaatttttttaaacagagtctcactctgtcacccaaactggagtgcagtggcatgatcttggctcactgcaacctccatctcccaggctcaagcaattctcccacctcagcctcccgagtagctgggattacaggtgtgcaccaccatgcttggctaattttttctttgtattttagtagagacggtttcaccatgttgcccagagtggttttgaactcctcagctcaggcaatccacccgcctcagcctcccaaagtgctgggattaaggcgtgagccaccatgcccagccggaatgttaacaattcataccacataactataaggtctttatataggttaaatgaaatactataagaaaaaaaaaacacttggcaccttgtctgcccagtagtagatgcttaataaatactagctcttacaatggctgtagtatggtagctcttacacactaaattgttagttactgcagttgctcaccctggtgtcccaccatatgacgatgctgatgcagtattgctgtgtgtactctactttgcctgctgacctccccttagctgacttcccctttctgtgatgcatgcaaactcagagggaagatataccagtccttctctaatgcagagcactcttgttggactgatcactcataaatcgctgctgtcttatagatgcaggttccatatagggcacccatccttagtcccatggactatggccaggagagcagggtcacatggaacaaagcataaaaaactccttgaaggaggccacaggggcatggcaatccctttgatacttcccagcaaggggcaaaataatgagcagacaccttgctctggtaacccatgacgaagtctggctgccctctaagatggtttttgaaacttttgggaattaaaaaaataggtccttttaatgattttgatgtctactggggatcaggaaggtgtgtaagtacacttccttaaatacaacacaaccctgaaatcataacacaaccttttaaattctcagaaaaaaaactacacattgatattgacattatactcttgacattgaaatagcattactccagtagacgtccagcaaggtttccaagggcgtggtctgtagacgactagcaaaacaacaaaaaaagagagcctggaatactcttacagtgcagattcctgggccatgctcctagatctactgaatcagaatctctgtgaatgggaggcctaggagtctgtattttaacaaactccccaggcaattctgaccatcactttttaattgtttgtgggcagcagagggcagaagagggtggacaatgatgaaggagaattcagaatagggaaatttgttttttctaggtgctaataaactcaacccgtaacagctgtgttcttcctgaagttgtggttgagcattgcccgggagttggagtatgcaggtcttctgtagttttggggctctgtgtgccacactgctgtgttgccctttggaaaagtccttctggaactggaatgaggatttggatctgaggaagaggaacagggtcatactgaggactctgaagaaaaacagtttatgactcaatggagaagattatggtatgctctaagccaacagatatgaaactatgttatacctacccttgtgttgtaggaagatgttccagtggacacaaggcaggatagttttatggaaaccaattgctatatcttcaactcacatagatatttgttcctacaattggtctgccagagattaggttggcgtttttccccttcgcctttccttcttcttcacaacccgtcttctcccactttggaaaagaaagaccttttatcatcccttggaattgatcaggcccccagtgacctgagagctgaaagactggcggtgttatggaaggaaaggcaactggcagagtgactctcctgaaaagaaattaatgctttaaccaaatgccactatgcactacaacaaccttccatccttatcttgtctcaaagactcctgataacttgcattttcacagttactctggccaaatcatccaagttatctgagtgtcaaataaaagcaaagaacaagggattctccaaattgtgaaatgcattcacattagaatgcattcatgaccccaccacctccttgcagtagacaggggcttgtcatcctaagcaggaatagggggctattctcccacttcaatacagtatctacagtatggggctggaaaagtcatcaaaggtattaggggtgtttactccacattcctatctatctactggccaattaacatgatttgcagctgagaaaataatactcttgtccgtcagagataaatagggtccccaaactgtgaaacaaaggggagaggagcaatgatgtttataaaagttattgcaaacccaaatgcacttcaaaaggagctgtggtgacagattctgtttcacagggtcctctcaattcttctcagcctctcaagacccttcctcagactcagctgggtgttttcaccactggcctgctgcttcaagatgtagtgcaatgtgtggaattaatctagtctatagcctagccctgctctgtccaatacagtagctattaaacactggaaaggtggctagccccaacagaggtgtgtgtgtatataaaacacacaccagattgcaaagacttagcacaaaaaaagtgaaatatctcatttttaatttttatattgataatataaaatggagctattttggatatgttggattaaataaaatatattattaaaatttatttcacctgtttctttttacttttttgcactgtggctactagaaaatttagaatgacatgtgcctcccattggtggctcacattatatttctattggactgtctgtcagtctggactgtgggttgagcagcctcagggacaggttgatggggatgtggaagtccaggcctgattggtaaaggaagttggggtgatttggggctggcagtgacccctcttgctgaaaagaggtatatttgtgacaattgcagcatgtggagcccagcctaacggattgtaatcctgccttccttctggttctaatacttaacctcaaaggaaccttaatatttaaaccaaatggcatgtgagatttcagtaagctgatggattgctctccactcagccatttgagaaatcctactgaggtctctgcacagctgagttccagttgcctccatatcccaatgaaagtctggcacagcactgatgagctgatgagatttttttcacttgtttgatattaaataggaaagcctttcgaattaaacgtttacagatagtgtgaaaattggaagtgtgagttttagctgagccaactacagcagatcgaaagactgcacttgcctgctggtgagagaacagtgcttctggctgccattgttagctccaccaccactttggggaagtgggagctggttgccagcttactcctttccagaggtgaattactcatatactgagtccaccaggcttacgctattgtgggtacaactctgttctaaacatcattacctatgacagcaacaacttactggcccaagccaagaatttagagcttttggatgatgaggctgagcccatttcagaacttgatgccagacattatgcagggcctctgcatgggtccctcaaataataatgacaacaacaatagtaataacagcaaatacatatggagcacttgctctgtgctttaaatatattagctcacttcatcttcagccctatatgacagaaagcgttttttacaaaatattattctgttttgttgttttgatttgttttttaagttgcctaaggtgacatagtaagtggtagagccagctgcaaacccagggtttctgaccaaagcccacactcagaaccatactgccattcttacagagaataaatattaaaatctcagcagtgattgtcagaaatggcaaaatgacaaattagaacatcttcagtcattcagggggacattgattcacatgtatgtgaatcaatggcccaaaggtaaatgctttttattccaatatggctttttggacaaaaaggaccagaccaagtctgatacaagtgatactagtaaagatatgagtgcacacagacctacctgagaatggcttccagagtttatcttagtagaatcttcctaaaattggaggtcacacggcatagacaaggcaatctttctttcactatgaaactctttcttcaaataaaatcacgtccttagattaaatgtaggtatacaaaggagagctactcagacctccatgagctcagctttttttttttttgagacagactctcccttgctctgtcacccaggctggagtgcagtggcgcaatctcggctcactgcaacctcggcctcctgggttcaagtgattctcctgtctcagcctcccgagcagctgagattacaggtgcacaccaccatgcccgactaattttttgtatttttagtagagacggggtttcaccatgttggccaggctggtcttgaactcctgacctcaggtgatccgcccgcctcggtctcccaaagtgctaggattacaggcatgagccaccactcccggccgagctcatctatttcagctcccacagtatggccctagggaaacatacacacagcccattggccacgccaaacaatgcaaaactactggggaactggattaggagatctagagttgaattctacttctgccacttaaccactcacatgggcctcacttagcctttgttcagtcattcctcccattaggtagctaaattcaaccacaattccttagaaaaagaaagttgatcaaattgagctttcctagaaagaatcttctctcagtccatgtgtgaaaaagggaaagtcttgtcttactggtttttgttttattttgttttgtttttttaccatgcctctctttcttgaattggagtaaatagccaatccctaaattgaactcttacctctgccaaagttccttgccttaccaattccctgtggagggtgaagtagaccatggcaaaggttctccaaatgactctttcctgaaaagaaacacagagcagtgggaaagagcacggggaaatcagagattgagcaaggatcgaagaggaacctgagagctaaatgcaccgtggagctgcccctgcagtcagaagactttttagagaggcaaaggaatttcttttgcacaccccttcaccagccataaacttccttttcttttccaaaattccccaagaggacatatcaggaagtgggtgctgtgaactattgggctccatggagaaaacttatctttttaaatcaatagaaagtgcctatggatggatgaacagaaagaacaacatttaagaaggctttagaatgaaagagaatccttcccttagctgaggagcttatagaagagcaagattagagctactgccggattaactttccacttccattgcccttgtgccggcctgtcatatctgataccaaattagaacaagaggagcttgctacatggtgtcttccatgaggcaccatgctcaagactgtcaaatctacaaaaacaaatacatatataaagccttaaagcatggatcctgatttgaggggtttgctgggaatttagacatagaaaactgaaaccatgcagggtgatgagaggagctgtgataactttttagggtacatgtgctgtcattcagagagtgcacatgcccagttctctagaaggatttcaaactatgataagatagatggagagttgtgcggtgtgttaggtgcagaccaagagggatacctaaagcctctgtcctcttggagtgcacacacctgtttttcatagatcccttcctggcttcccatgaactggtcaccctttctgtggatttcattaatccttctgggcctgccatgtcttacttttcaaagaatcgctgttggctatagtacatacagagtctcttcaataacttgtctaactcttgaatctttaacttttaagtaacttattaggtttgatgcaaatagagggagaaattgtgttagcctgttgtcaatacactgtgctgaggacattccccaacatgtgttaattctgcagctcacttaacttttccagatgtggctggctgggctgccaagttggtgacattgcagatggatggccacagcctcactgtaggcagatgaacatgggtacctttgatgtgatggggtgactcttttcatctattagccagaaggaaaagctattttcttctgtagagttctcagttcactcccacctcaaggagactgtataatcctcagcatactctagtactcaggactggggtctggggctctcatccctacccactgagtgtgtagctagtagctcctgtcaagtcagaataaaactaatccaaggagagctgtaagagaagcttcagagaaggctgttttcttaaagggggatgctgtttcatatatgaaaatggttgcatttcacctgtttaatcaaatgtcatcctaagcacaaaaaacaaggcacccatgtcctttacacagtagatatattttatactccctatatccacatcgtgcatatacaaatttcagagtataacgactcttctactccagggaggaaatcagtgatgatcaaaatctaagcaagagaaagtgctctttagccttccatcttcctggcagataaaggtagtaaaagaagtttcaggttttcttcttcagcaggatggggaccttctttaacaagaaggagaacatatacattacagccttcgtttaaaatatgctccattatttggtatgtaagcaaattattgaacctctagacactttggtttcctcatctggaaaactggagtaatactcactctgtaggaatatggtgagagcaaagaccacatatgtagagccacagcataatacttgccacataatgggtcctccatatttacagccatttgtaacagtataatggaaatcctttttttgcttctagttcagtacaaggttcataagactggtcattaatgaacctatagaagcttggatgtttagaagttacatttgggccaggcgcggtggctcacgcctgtaatcccagcactttgggaggccaaggtgggtggatcacctgaggtcaggagttcaagaccagcctgaccaacatggagaaatcccgtctctaccaaaaatacaaaattagccaggcgtggtggcacacgcctgtaatcccagctactcaggaggctgaggcaggagaatcacttgaatccgggaggtggaggttgtggtgagccaagatagtgccgttgcactccagcctgggcaacaagagcaaaactccatcttaaaaaaaaaaagaaaaaagaaaaagaagttacatttgaagactgatgcaaggcccacaacacagaatttgatgaggccagtggctattttatttgaggaggattatcttgtcccagcctttttctcagattgacagtaaattaaaaactatatttgtgcctggcgtggtggctcacacctgtaatcccagcactttgggaggctgaggagggtggatcatgaggtcaggagattgagaccatcctggctaacacggtgaaaccccttctctactagaaatacaaacaattagctgggcacggtggtgggcgcctgtagtcccagctactagggaggctgaggcaggagaatggt

SEQ ID NO: 5653 - DNA, 316970 bp, Homo sapiens
  ADAMTS19 gene - 128824002 - 129100971 of chr5; NCBI Entrez Gene ID: 171019; Build 35; sequence includes 20,000 bases upstream of initiation codon and 20,000 bases downstream of termination codon of the gene
ataggccatctggaagctgaagaaccaagaaagccggtagtgtggttcagaccaagtccgaaggcctgggaatcagggaagctggtggtaacattctcagtccaaggctgaaggctggagagcctaggaactgctggtatgagtcctagagtacaaaggtggaagacctagagctctgacatccacggacagacaagcactgccaagctctaggagagagtgtgcgagaaattctcacccttcctctctctccaatccatctggtcccccagccaattggatggtgcctgcccacattgagggcggatcttcctcactcaatccactgacacgcaccaatctcctctggaaacaccttcacagacacacctggggcagtctaatcattctaatcaaaagtaaaactacctgggtttccctttcagcagaagcagaatgggctcagtgcctattgaaacattgaaaacaaacaattcaacctattcattttaacttcaacctagtcaagttaacaccacaaatcctacaagcttatgaaaagtagccccaattcccctggcacccaccactgttgtaccagcagctttccctcagatcacgcctaaggttgtttgggggctgacttagtgtatgggtgcataatggatggtagctgaattacagcctaatgcaggggtgccctgagacagtggggacaataggtaggaaaaactttgttaattaacaaagcttcaaattatatgtctggtcatctacactgtgtaaaaagaaaaaaaggcctgaagactcactggcagtggaaaatgctttggatgtttgacacggaaaaaaaggaaaggaaaagattggaaagaaagctacaggaggtatgagatagaggcatatggatggacatatggaagcagcacagtgtgaatattgttacatcatatgttaacacccatgacagaacatcccccataaaagaggcatgaatttaaaaggatccagctggtggtgtcagccagcccatatcattggtcactccagtgctggcacaatgggcatatgcacaaagtggcctgaaaggcagatgtggagaccatctctgtgcccaacagcatgtgctcctactagatgacctacctaaggccaatgtcaaatgtccaaacagataataatgaagaccaacattgaatccccattttggcaccattccttgaggagcccactgaccaggtggtggcttattgaccaaatttggaaaggctagcagttagttatcaaaagaatagacattcagagtttgggtttgtctttcctgtatacagggtctcagctagcgtcactgtttgaagatatacagagtgatcaatctactggcagaggatctcaccaaatactgcaaaagaccaaatgaccaacttaagagcaaaaaagcctttgcttacctggcgcatacacaaccagatgctatataatgtaataagaagatgcagtgaaaatgttctaacaaattgccaaagaccaaacatggctggcatcagaatgtgtagcttctgggagctgcagcttgtcctccctgaatcccagcacgtgttcaaggtgaagattaagggaaatcctgagaaagcttccctagcaaagtcacctgggggagaggaacaattgcccctcttagaaattccaaacagacccatctcaccaatcttccttaaagaaaaaagccataatcttcaggggaaacagaaagaacaattgtcaccttaaggcactagaaaccccttgcaactaggaaaagggaatttaaaaaataaaattaaaagctctacgtggaggcggggcaggaatacttgctagtcccagtactacagctagaagagggatgagaatgattgcaaaggccacactccacaagctcatagagactgccaagactaaggtttaacgagtacattagagaatacccttccttcccagcttcccaccacctaggtaacaaacattgagtgaaaatcacagtggaacacaactgagagagtggcaagagacagattctcatcaggaagcagacattgagaagcactctccaataaattagcccacacctaaacatgtggtatcactaaaggcatacaaagcctttaagcactgagcatgaccatagcaacatcaaagttcaacccaaacccaacttttgactagatcactacaaactttcacactaaagctgtagaggaaggaaaagtatgctcacctccaagcataaaatacacttgcctcaaaatctgctctgctatagaacatgtctggcttccgaccaaaattacaaggcatttgacaagttgagaataaacacagcctgaagatacaaagtaattatcagaacaagactcagatgtaacccagatgctataaccaacagggaatttagaataactataattaatatgttaaaggtcctaatagaaaagttatacaatatgtaagaaaacacgggtaattttagcagagagatgcaaactatggggaaagaatcaaatcaaatgtaaatactagaaataaaaaacacagtaacagagatgaagtgttctatgaacttcaattttcagatctctaaaaatgaaatttagttatttagcacttcatacttctaccaatatgaaagttcagactgatttgacctatcaagtgtttttaacttactagtatctcgtttggattgcttgagtaataaaattaataaaaacaagaaaatccaccataaagttattttactgactcagttgtgtttaagacatgtgtatgtgtttgtgtgtgtaatatgaaaatgtaccttttaacttcattaaatttaatcaaaatagctgaattaatttcttcatatagcccaattttgagtagacatgttggggtgcaaagacgggaaaggcctttgtgtctgaaactaagaatgttacttattctataaatttctgcatatcacggaagtatgcaacctttcaggcagcaataattttctattacagccgaaggtaaacttcctggagaattctgttaaattaagttgttctgtgagaacacaatactctacgtgatataaaacagcctccagaaatttactaaatcgctttctcattaagctgtattttggaaagtataaatgatcagtttaagcatttctactcagcagagtgcacataagacaagatcaagaaaaacttggatgacaattcaattaatgttctgtggaatagtgctgttaaaatacaataatcatgcaagttttgcccacaggtactgctgttaataatactctttgtaatttgttaagtgctgacagtgagcaggcacagcccctgccctgggacgctataatatagaacttagacagccaaggaaagttgaataaactataccagttaatgttaggctttggggcttaggtccgtctataaatttgtctttcttttctcttcatttcctcccctttattcttgtaaaacatcttatataaaataaataccctactgtatatttttttcaggtttctcatagctagtttacattaaataattcatgagctaatttataacatgtaaagtcctttacaattgtttaaggcggtatcgctcaaactccgtgacaactttttgcagaaagaatttgacattaaattcataaacattggtaaataatgaaatatactaattactaaaattatcctatctcattgtcagtaaaggggttctattttataatagttggaaaacaaaaaagaagaaaagaaggaaataagacccgttaacaacactatttgttcacagtcgttgatatctttgtttcacctaacaagttttctgtattgtatttgaagtggattttgttctaaagtgagtttgccttaagacgttatttttaaagtctttgtttgaagtaatctcaaacatacacatgtatatttataattttaaacaaatcttttatttaagcacataaatatagagtagaattagacattgaacatttggaaatcatgagtttgatgttaattactgtttagataaacagaaatacattgttaccttcatagaagagaactataccatcacaaagccatttaaacaaaaaccaagatctagcacatataagtatgcttctaggatgaaaatccagcttataatctatcttcaatttttatgagcttatttatcctgagataacatttgaaaggctttccagaaataggaaagcacacgtttctggttctaatttaaatagtcatatgtgaccttaatgtagtaagaggtattccagccagggtagtttcttctatggatcaagtatatttttgttaaattgtaaaaatttaaaacaaatgtctcccaagctgaaaaaaaatcctcaagggcatcatcagtcataggtttaaaacacatgcccaaataattaacagccaaatcatagtagaaaaaaataagagcttttcctgaacaatttgtggtattatttaaagtcttctcttacaaggaaattgttctagaatgactgagtttctctttgcactttcactcaataaacattaatgagtcgattatgtaaaagtaaagaaaaacagagatgcattgagcacttttgtgattttatcctttaaaaattctttagatttttttaagttatagagaattaaatgacacgatagaaaatattatttaaaaagctttcctctccctcaagctccctttgatgcccaacatacattcccatcttttcaggtgtttcaacagtttgttgtctattccccaattcctttctacatactcatacaagcatatacacacacatctcaaaggaaatactatgtgtactgcattgtgaattcattaaaatattgtgatataatttatactcctttccatatcagtagaaaatgtccattattaaaaagtaatcgagaatttttcataataaggtgagccataaattattcattcacctactgacaaatattgtggttttcctctagtttcatgccactatgaacaatgagcaataaacatccttgtacaatatccctatgtgccctgacttatgtatctctaagatgggtttcttcaggtaatacttctgaatcagcagcatgtgtcatttaatttttttaaagatggccagttccgtttcccaagggggttcagcacgcacttgcagaagcaaggtatgactactcccacctctcacatcctcatttccactgactcctgtattcattttatttcaatgggtgaaaaaaaaatcaaatcaagatgttttggctataatccatattattctccatggtgaagttgggaaacttttcatgtgattatttcatgtatgcatttcctgttccctcaatggcttattctatcctttacccactttcctttttgactactgctctttcaaaactaatttataagagctctttttacattaaagatattaatactttgttttatgtgtttttcttacttttcaagtgtgatatgttataatacacacatttttaaaatgaagtatattttttaatgacttttagtttttctatattatttcagaaggctttcccaaccaaagattattcaaatattccctgataatgtaacatttgtgtcacttgcatattagggaatccaccataatagagactgtgtaaactttagtaaggaaagctgacatttgagagtttacgaatagcttccatacattgtcacccatgatatttgctcgcactctcattgatcaaagacaaataagtgaagaaagaggctggcagatgtcctcaaagagtactgtcctctgtaacctaagaatgagcacctctttaacagagggaagttagaatgaatggaagttagagattatttagtccacttattgagtggacttttaaggagtatgcatatggggcacaaatgtcttctactctagggccacttcaaagttcaggtgcataatgcttatgtgggtttctttctcagcatcctttgattgggttccttcttaatttcttacaaccttgggaaaccataaaccgctgttcattaatcagtatagaaacttatttcataccaaccctctttccagccaggtggacaaaaaaggtgtagatttgatattccgtgggggatcttcaggactatcctggacacggctgtagcattgcaacaacgcactagtggtttgttgaagacagcaaatttcagagaaatccataaacagaattgtttctattgctgtagatttttagagtttaagagaaaaaattcccaaatccatagctgcgtattaattattggaggctatacttgtttgcccaagtaaaaaaaaaaatcacatctagaatagcaattaactttgattacatttacaacattccattattattctccagggccatctgtcatctgcacaggtgagttaagtaggaatgtggaaaaaaaaaggcaacactcttgcatctttgaagccttttacagaggcactaatcactgcggtttcctcagtaattcagggttgctttgatttattattttggtttggagaaggagttctaatggtttacatttggtgtctgatcacaatagttcttaccttatatgtcaggaaaactcctgatcttccaattccatagtatttctattcatagtacgcattcagcaactggagaaaaaacatagcattgtgacagagattgcaacatttttaccaaaatacatttcccgtttctccttgagaacatgttagtttatatttcctaccctcccatgtaatcagattttgccaaaagaatgtgagccgccattatgtgtgccactttaaggtattttgaaaacaggtctacttccttttgtgccttccccttccacaggctgggtgcagacaacaagattataggagatgagtaaaccctaagaagaaaggagcttggttcctaaagcataaggaacattgcctggtttgttacaaaattgtgaaataaatttctatgatgtttgaaccactttatattgtttgttaccattgcctaatgaatgcagaaaatatatttttgttgtgtttcagctatattgaggattatatttgttactatcatgaatacagtatagattcaggatttcattaggcctatcatatcagactcagatcaaaatacatttttgactttcagaagtccccacccaagcatgtaaattgccacggatattgagtcttcaggtattagtgtgctcggagctagtaagcaacaataaggcctaaaagatctgagcagtagtctactcctcaaagcaaagtgatcttagtagtaccaggttctcttctgtcaggcaaggaggagggttcacttacaatattatcatcaggtcttctcagggccgtccaggttttccttcattcaagggcctgtggactatctgactgagccaggcttgagaattcagtaataaaacgattatcttctcttataatgggtggtcagacctagaggatatttttgttttcttgttctgttttgtttttatgtttttttaacccagaaaaaataggtggctctaggaagctgcctgttcattttgcctctaacaagcctatgatatattagcaaccacccaaatctctgtgggtcaggccatttggattatcttgccagtaacaaatctactttgcctctgagattaagtgccgctatgtcacccaggattttaattgccacattggagtcagggagaccatttcaactgcatcccatatcagcactggcagcctcaaagaggagccactagtgtatttttaaatatgctgataagcctctcatcaactcctgtcatttctcaaggccttggagaaaggagtagtttctagaccttcttgagagtcataaatttcatatgatcaatgctctctagcatcgcaatctcctggcctttgatttttttcttcaccaatacaccaaggaagttctgaactgaatggaagttagagattatttagtccactcatagaaagcccgtgagtttcagcacgcgctttaagctgataactttgaaatttgggcctctcattggccttttgtaaggccattagaagtagatacccgaccccaaaattcttatattctatatggcaaatatatggttgcagataattctgctttcagtgcattatttaattccaggagatcgcagacaataatttaaagaaaatctttgtcatgatgtgtcatggactgacagattctcagtaataaatataaacaatattcttggcctccaactctaactacatacaactccctggatttttctgtggtccctttgactgcaacctgctccccgatactaacttgtctaagtcatggttcttacttgtagcaacagaactggattccggctcaccttggcaaaaaacagtttaatggaatgacgtcattgtgtagattaaagaattgatggaaggctaaaaaaaaccaagctgtgaaacaaggagaaaccacaggaagctgtcattatagccaagcccctgccgctggaacagctggtgaagatgctggtgcattgtctcaggatactaaacaaactactggcaccatcaccaccacaatccctggacaattctgttgagaggaaatctaaagtgctcttacctttgtgttacttgtttcagatttgccacctatggacattctattagctgaggtcataaacctgtaccccagtagataatgagaatgaaaacctagactattataatactctagtggaaatcaatccccatttaccaccccaaaccagcacaattcttacctgtgggattcctataatacataacatgggaaggggattcccataattctcatctgtgggattcacataatgagaaaagaggtcaaatagtggtcagccaaaaccttaacaaatcaaatgtcacaatatcctatcgactttaaattctattttcatttcatgctaatggttaccttcccatctctagtcaacaaataaagggagtactgttcaaactttttttctttgccaatggacccctttttgtctaagaataattctgataaccatttttactcacccttctgtctctctctgtctctgtttctttctctgtctcttacacacacacatacacattttgaatacctgaaataatcatagaactgtaaacaaaaaaggcctatatcagtctcatgtgagtcaacctcttacctctgggaaaacagtgacatggatatggatggcattgtctttagtttcagtcattcaattatccaataaacatttattgattatttagcaaatgagggcattccttctaagacttgacactacaaatagtgttggaattaagcatcttgctaactgggagaaaggtatcacattgtataatgcaagaagcttaagatttgtgtcagacacagtgattttaagtcttcaggtaatgatcattatagtgatgatcattggtactcagtgggatgcagctcaaaggaatgcaatggaaaagtccaagcagggagctcttggccctggatcagtatttcttaatcttggaattggagtctcaacggttctgtgtaaattatgagtgaaactttcagtagcaatgaaattcctgtatataagatctaagtggtatgtggaaaggcctaaaatatggccttatattttcataaagccagagaactttattataacatactttactgctttgagaataacatactttattgttttgaaggttggggattctcatttttagatttttaatcttgacctcttttactattgagaggatcttaaatacctatttaggcagaacaaattcctatattgagttttatatgtaacccaaacaaacctgagacagccatgtgctacgctcagaaataaaacacaagtcccacatgcctcctcctgtcccaataagaatagaaataaatttcatatgccttaaatgcatatatgcataactcataacaaaactttgtaataatctcttttatttatcactttttccaaagcccttttatcactgcatagaggttgcccctacaacattttgtattactttctcgaaaatttcaataaaactctcaaaactcagttttcacagactattttctttcttgttctttttccttccttcccagtttttttattttcatttaaaaatattgctcttcatactaataggatttgaaagaccagctttcattcttttcacccattacttggcccaggtgctgagcaggggggatttaacatgtccattagaaggcaaaagagagggaagcctatatatatttctatcttttaattttgtgtgtcatatattattatgctgacactcgtcaatacatttttctttcataatagtctggaaggcacaaaacagtgattgcatctagggagcagaattttgggatggtgagggggtaggacaaagtcatatattgaaatgacaattattaggttggtgcaaatgtaattgcagtttttgccatttggtgccatttgcaccagcctaatataaatagatgctatatcagtgaagactgaatagaaacaccacgtgctataatgacataaagcagcaatgagacctaacttggtacttctgatgcttgcgaagaagaaaggtatgtgaagaataaggaggagttgtcattgttaatctacaggatgagaagggacatgtttccattagaggaaatggtaatgtatacacagagacaggaaaaactatagtatgctataagaatttagaaaaatccaaaagggaagaatagaatgtgatgggactgaaaatacgaaaggactgggatcacgcagggcctttagattttgttaaggagtttgaattttgtcctgagagtaactagagaatgactggaggattttaatcagaggatattattttcattttaaatgatcactgtggccacagagtaaagattggaatgtggtagagcaaagtggaagcaggagaaaggttaacaaagtgttgcagtggtaccacggaaagatgactgcatcagcttagtgctagaagcactagagagaggtgaggaatttaggagctaaagaaaagaaaaagagaacacacggacacagggaggggaacaattcacatcgggccagttgtgggttggggggcaaggggagagcattaggaaaaatatctaatgcatgcggagcttaaaccctagatgatgggttgataggtgcagcaaaccacaatggcacacgtaaacctaagtaacaaacctacacattccacacatgaatcccagaacttaaaaaaaaaaaaaaaaaaaaaaaacccatgacttgactggttggatgtgagtgataaaaagatgcatgagttggccgggtgcagtggctcacgcctgtaatcccagcactttgggaggccaaagcaggtggatcacctgaggtcaggagtttaagacaagcccggccaagatggtgaaaccccatctttactaaaaatacaaaaattagcctggtgtggtggtgggcacctgtaatcccagctacgcaggaggctgaggcagagaattgcttgaacccaggaggtggaggttgcagtgagccaagattgcgccactgtactccagcctaagcaacagagtgagactccgtctcaaaaaaaaaaaaaaaaaaaaaaaaagcatgagtcaaggacggcttcttaggttcatggttcgagcatttgggtggatgatagtgactctcacttacctgtggaatcttgaggaaggtccctattcccttaacatttagtcactaatggctaaaaatgaaacactgagagtgtcacatatttagcttaagtctttctgtaaatagagtcatcgagatataatttatatacaaaacatttaaccattgtgaagtgtactatttgaatgatttgtgaaaaatatatacagttgtgtaatgagtaccttaattgtgataaagaagatttttatcacctaaaatagttccctcatagcccttttccctctttgcccccaagaccatccctagctcctgggactgaactgctttaattacttcagtattatcttttctccactttcatataaagggaagcttctttcacttagaataatgcttttgcaattcatccatttttgcatgcatcaatggttcttttcttttcattgctgacttatgttctgcaatctactacaatttgtctatctattcatcagttgattgacatataggtttttagtttggggccattataaataaagctgacataaaattcacatgaaagtcttgtgtatacctacattaatttttcttgggtaaatatctaggaattgtgttggtgagttgttgggtaaatgtatatttaagaatcataagaatctgtcaaactgttttccaaagtgtctatgctaatgctttcacatgaacaatgcatgagagtttcaggtgttccacacccttgcaaacatttggtaatgtagataatttttattcactctaataggtgtgtagtgttgtctccttgtgggttcaatttgcacttaacgtgcattgtcctagttactaataatgttggctatctatatacaaaaatatgaaccttgatgcttatcctacctcatttatcaaaattaggtcaaaatggataatagtcctaaaattaagagtaaaaattttagatctagaaaaaaagtaggagaaaaggatttgatcttggcttaggaaacacttcttagaaaaccagaaagacattctataaaggacaaattaataaattggacttcatcaaaattaaaaacttttgctctttaagatatcatttagtaaataaagggcaagctacaaactaggacaaaatatttacaaactatgtatctgttaaaggattttattgagaatatctacatacagtcatgcaacacttattgatgaaaaattacatttttatttatttattttttgaaatgaagtttggctcttgttgtccaggctggagtgcaatggcgtgatgtcagctcaccgaaagctctgcctcctaggttcaagcgattctcctgcctccacctcccaagtagctggaattacaggcacccgccaccatgtctggctaattttttatatttttagtagagacgtggtttcaccatgttggccaggctggtcttgaactcctgacctcaggtgatccacccatcttggcctctcaaattgctgggattacagggatgagtcatggcacccagcagaggatacattttgagaaatgcatcattaggtaatttaattgctgtttaaacatcatagagtgttcttatacaaacctacatgatgtattctatgacacacttaggctgtatggtatagcctatatctcctttgctataaacctgtacagcatattactatactaaacgctgtaggcaattgtaaaataatcctaagtatttgtttatctaaacatacctacagagaaaggtgaattaaaaatatgatataatattatgggaccactgtcatatatgtgttctgctgttgactaaaatatgcttatatgaggtacatgactgtatatgtcttcttgtttgcataagttttgaggagaagtttgctgtcattcttaactttgtttctatagataatctgtctttttcctctggctgcttttcacattttctatttcctttctgtttttagcaatttgcttaagatatgccttggcaaagttttattaagtatgttatgcttgcatgtatacattatagttttcatcaaatttggaaaattttcagccattattttttcaaatagtttctcttcccatttccatttctcctcttcttctaaaactccaagtacttatatattagatatctcgttattatcccacagttcaccaacactcaagtcaactcttatctttttctttctgtgcttcactttggatagttagtttcttttgctatgtcttcaagttcacagatactttttttggcagtatctaatctgctgtcaataccacccagtacatttttcatgtaaaatattgtattttccatctctataatttcaaattgggtctttttatgtcactcttgatcaggttcatgctttcctctatcttcatatacatttacagcatatctgtaatagctgtttaatgtttttgttggcttattttattacttctgtcatgtctggatctgtttttactaagtgacttttctccttgttatgagtcatttttttcccatgcttggaatttataattggatttccagagaatgaaaactttacattgttgttgttgttgttttaaaatattattattcctagccaagtgcggtgtcgcatgcctgtaccctagccctttgggaggctgagacaggtggattgcttgagtccaggagtttgagaccgacctgggcaacatggcaaaactccatctctaccaaaaatacaaaaattaatcaggcatggtggtgtatgcctgtagtcccagctactcaggatgctgaggtgaagggactgcttaagcccaggaggtcaagattgcagtgagccatgattgagccactgcactccagcctgggcaatgaagtgagaccctgtctaaatgaaaaagtatatatctatatatataataataattattaagtaaaatggaccttgttctagcaggaaattaaattactaggaaacagatgaaccattttgcagctatcttttaagccttgttgagataggcccacatgaaaccttaattacaaggctaatttaattttattactaagcagatgcttttctaagaacattatctagtaccccttgtattatgatgaccttccactctagccagttggaactcatcacatttggagtattctttggcctttaacgctttatgcctccccgtcccaccactcaccctatgctgtaggtggtttcttcacatacatgtagaaatcagaacatagacaattaattcaaagttcttccagaaaacatccagaattctcccttcctctctttgtcatagcgaatattagagacatctcaattggttcaatttacattatcctgaccaaacaaattaaaattgatcaaactttccacctgatggctgccaaaaccattgcacccagctcagctacaaacaatagcagggctttcaatggaaattttaaatcagtggtaccaaaacactgaagcatttctttgatgaattgcaaaaggaaatggaatgtggcttccccagtaaaatcctgaagacaaagcacaatcaaagcaatggctaccaagagggggaagtggtccattcaaagcaaaagcagaccaattaagagcaaaggtcatggcaacagtttttgagatgctcaaggaattttgcttgttgactttctggagggccaaagaataataacatctgcttattataagggtactttgagaaagctagctaaagctttagcagaaaatctctgggaaagcttcaccagagtccttctccaaatgacaatgctcctgctcagtcctctcatcaaacaagggcaattttgtgagagttttgatgagaaatcattaggtatccaccttacaagtcctgatttggcttcttctgactttattttctaaccttaatcttcaaaaggcattcaatttccttcagttaataatgtaaaaaagactgcattgacatgggtaaataccccacagctttcagttcttcagggatggggtaagaggctagtatcatggcttacaaaagtgtcttgaacttgatggagcttatgttgagaaataaagtttatattttttttatttttgccttttacttccattttccacatactttttgaagttctctagtaatttatggtcaaggcagacaatgatggttttaaaaatatgtccacaaattctttgatatttccccatttgaatgttggctggacttagtgacttgttttttatgatgagaatatgatagaagtggtggtatgtcactttcaagattaggtttaaaaagaccatggctatattttgggtgctctctctctcagatcacttgttctgggggaatgcatgtaatgagcagcccctatgggaaaacctgtgtagcaagatgctgagcttcctgtcaataaccaagtgagtttgaaagcagaacctcttcttccagttaagtctgctgaaattatagctctggccaagagtttgactgcaaacttgagagacagccttaatcagaaatacctgggcttatccaggcttcgattcctgactctcagaaactatgtcagatgataaattgtttgttgttttaaactgctaaggttgttatgtagcaatagataactgattcactctctgtgtagttccctcctttctgatactctgccctataaattctagcctccttctctgcctcctcaactcagcttgtcttcagggctctgtttggctttcttctctctgtgttaagtcctgaaactgcctccaggttgtaagctggggaaattgtagtgatcaattcatttacttctcttctctcctaagtcataaccctaggctgcctgttgtccaatgtctaaaaacttttattatgttttctaatttcctaaggtgagagttaactatggtccctgtaattccattatggccagaactagcttaggacttgatgtcaatttagatgtgagttctactgggagttggtatcttcatggaactcagtgaaagggttctttgtattttctcaagattttaagaatttggttgggggagggcgggtggatttaagattagcttaggttaattttaacctagggtaagattaggttgtgaggggcttagtaccagtgagtgaagagaataagggagatttgacagcatcaaggccaactttctatatggagaagcctggattataaatggcaatatcagcaccaaaacagttgattccacttactctgatgctttgtcatttacctcttctccttctgtccttattctgagaacacaaaagcagtgctctattggtgctagctaccatctggtgacatatatagtgatctgtcttaccaacatatttttcccagctgctcttttctttcctctaaggttggtaatgcacacacatgcctcagtcctgccttttcttctctatttcaccacacacagtttactcaattccaaattaggctagttctttcttttatatacataggtacttgaattcactttaacggacgctctcacttgcatatctaagtctctcctagagcacaaaaattccccacacatttctctcttaggcctgttccttctgtaaaccagataagtcatgttgatagttgctaatcaccagcagagttagtgttgcaactcctgatcaaggaattcaaattggaacaaaataccatagacaaatcaatttctatcactttctaaagcaccttggagagaatttcctgataatttctgaacctattcagtgtaaatccttgaattagtcagggtgatatataaaagaaatcattcctacctttcaaaaacattgatagtctagtaggagaaataagtacataagtcattaaaacccaaatgacttataaatgtctctaaaatatgtaaataaattataacagtatttcaaaagggaaaaaagagaagagttatctgggaattagacaaatctttccataacaatattaacctttaccatgaaggattggtaaagattatatattagtgggaaaaaaaggcagcaatgcaaacttacattggtaagctgtgcttctgagtatatttaacttagttatacaactcatttggttttaaaaaatcatgaatgtactctaataaatatatacaatttaatatgcattattccttcagttctgctttttgttgttgttgttaaaatatgtgtgagaaacgtgttaagactcatctcctactggaggtgtttcattgaaattagctttcaatctaaatagcttgctatactcaaaaaataaactgcctctgattttttgcctagctttaaatctgtaaaattgagtctcatgaaaaaaagcatttaggtttctaagtaacccagatatttcttgagcatctggaaacccacatgttagttactccagcattagagattttataagacagcgtttagaggcagatcactcttgacaaagtcaccttgagtgtttttgcctttgtttctaaactctggacaactcaaagaaagtattataggactcagctaattcaaacaatggctttcctttgaaataagatcgtctgcttcccttaaaggcatagtagtcacctttgacacaaggaacagaaggtaaaataacaaaggaagtggtgaaccaacctcagttctggaattaaaaaaaaaaaaaactgatttgcattaattatcatttctaggtgtctggcctagtccagaggatgcaaatggcagttcagatcaatcatccttaaatcggatgtgaacgctttgatgtggctgagggagagttgtggaaaggggagtaggtaccatgaagagaattgcaacaaaggaaaaaaaaatatatggggttgaattgccccaaagaggacagaaacagcaaaaacatatttttttatgtacaagtaaaaagtacagaagacaaaataatctcacctggtctgagatctttagaatataatgtttaatgttgattcccttactcttactccttttaggactcgtgtgtgtgtgtgtgtgtgtgtgtgtgtgtgtgtgtgtgtaatggggtggggtaggggaaggagagaaactgatagtactgatgaatggggagctagaaagacaaggaaggaaaagaggctctgaaacctaagggtgcctactgtcctgggaaactttaaagcatattccatgacgaattacattatctccgggcttagaaaattccgaaaaagatgggaagacaaatcaaaggcctttgataaatgaggcctcagttttgtggtcaagtctgcactaatttttgccttgtgtgatgtgcgaatttgacaaaaagaggcgctggattgaggagtgggatgggaagggggaggcacctctacctgcacacgggggcaggggatggatgcaaatcaggccttcccgagtggccaatcaatagtcaggtgagggattttgggtccccaccccatcccaaccggcgtttgagcacgtgcacggtgttctgggacctttgtcccgcaaagtcacgcttggcgggcaccccttggtccctttttctggtcagatgtgcttgattcttttctgctctacaacccacctctctagtcgtgtcttcccatctccctactcattccctcccgcgccgctgcgggtgagagccttcagcggtgcgtcctaaggagcgtgaggagtgtgcggagcttggcacaccaagttgctgagactgtgacaccagcctccgcccgttccgcgcgggtgcaggcggcgagcctcggctcggacaccacagctctcctgcccgcgccgggcagtcctctgcctgtccagaggcagcactcccggctctcggctggctgtgggtctgtcttgtggggctccagcactagcctgctcggcctcggaaactcctgcagcgtccagaacacagaaaatagactcatctcctaattcgccagggagctcgagggctgcggggccgcggggctgcctcccccgctcctcccccaacccgaccccaccccacccccgccagggcttcggcggcctcccggagtcacacagcctacccccccaccccaacaccccctcccccggcagacaaagggcctgggcaaattcgccgcccggcctcctagcgctccggggaggccgctgcgccccggagtggatcgcgctggaggcgtgcgccgggcgagaagccgcggccgcgggagcgcagtatggggaagaaccgcgagatgcgcctgactcacatctgctgctgctgcctcctttaccagctggggttcctgtcgaatgggatcgtttcaggtaagttcttccgtgactttctcgcttcctttccagccatcccagcggagaccgcgaacgtacgggtcggcagggctggtgcaaccggtgcgtggagagcagggctcagtgggtagcaataaaaatgagcttgaggtgcaggttaaggggtcaagttcggaaatgaagcacacttctgccggcctcgttttaaccgtatgtggaatagtttccttctaattagagcaataatatttgcaaaggtacgtttacagcacctggaggaaaattagaacgtacctaagttgatagcaacgctctgctctagcatacacttcagaaatcgtttactcgtgctggagtctttgcatcggttttcttttcaacaatgaagtgcggtcaccaaactttgattccccctcccccgcccctaatataatcgtacttttactctgaaaatgctggggtctgtaatctgatcgcaaggcttctggggttgcagagtttcagggtctagacgggtggtctccattgcattcaacgcgagcgccctgtatctatggactgtgagcttggaaatgtttgtgctactggaaccgcggcactttaagccccgcacttctgtctgccccgcccgcagagctgcagttcgcccccgaccgcgaggagtgggaagtcgtgtttcctgcgctctggcgccgggagccggtggacccggctggcggcagcgggggcagcgcggacccgggctgggtgcgcggcgttgggggcggcggaagcgcccgggcgcaggctgccggcagctcacgcgaggtgcgctctgtggctccggtgcctttggaggagcccgtggagggccgatcagagtcccggctccggcccccgccgccgtcggagggtgaggaggacgaggagctcgagtcgcaggagctgccgcggggatccagcggggctgccgccttgtccccgggcgccccggcctcgtggcagccgccgcctcccccgcagccgcccccgtccccgcccccggcccagcatgccgagccggatggcgacgaagtgttgctgcggatcccggccttctctcgggacctgtacctgctgctccggagagacggccgcttcctggcgccgcgcttcgcagtggaacagcggccaaatcccggccccggccccacgggggcagcatccgccccgcaacctcccgcgccaccagacgcaggctgcttctacaccggagctgtgctgcggcaccctggctcgctggcttctttcagcacctgtggaggtggcctggtaagcgccttctttccctagctctccattttcccctgctgctcctctccttgcccataggtcaggatgatttgcatgcaccttctcccctttcagtgtgctccttttgagcttggccctagactgcacccccaggtgtctacatcgtttgcctcccatggaacatctccagggcagttgtgtaaatcggaagtttaattgggtggataaatggccttctccttccagatggttatgtgtctttcaaaactgcgtgaaactctgccttttcgtaacttcttcccaatggctcaacttctttctgttctccagagttttccaaactaagcgctccacgtgatgtcttttaggaactcgaaagacaaccagtcggctcactgatgaatctccttcgtgtttgcgccgcactctcagttcctcatctgttatcttagagctttttcataacctacttcaaagttgaaagaacagttctataggggattactctgacagttgtctagaatttaaacacatccagagtcatactggacacctgttcactgttcttgtgaaaggagttgggagggactcaactgagagactggaggttgagtaacgggtgacattagaatccgatctgtgttcaaagggttatggttctgtgatttacatttcatttgacagtagttccttttcttctttccactttttggaggaaaggagcaaggtggagagccttgttaaaaggcctgttgggatggaaagtaaaagccatttgctctgtcaatgtagaacatcatttgatttttctccctctgtcacgattcaggggttgggacaagcttctataagttgacctttgtgtgtgtgtgtgtgtgggggggtcaaatatgcataacataaaatttactattttaactgtttctagatgtacaggtacgtggcattaagtacattcacgttgttgtgcaacaccaccatgtcctttatggttgttgccaccaccataggctttactattaattggtttaagacaaaactcataaaatatcaaaaatgcacttgtgatttgtggcttcattttgctgttcatagtgagccactgagaaatccacaagaacttgcatggaagcaaactgctcatttggagaaaatccaacagcagtggatagcagaaaatatcagcacaatcaaagccacccaaaactaccacctcccctgacccaagatcccatagtcaaatgatgtaaactgttggacagtactcataatgatgaatattcaaatacgggcatttttaggcataattgaaaaaaattggcatggaaaaattacatgagaagcttttattaaaaggttttatgtggaactgatgtttgaacatttcactggggaaaacattttgtggagatttcattgtccactagcttttggctggggattaaataatcacatatagaaagttcctggtgtggtagtagcaatgggggataaagaatttcactgtgttgaaatgtgcacttttggtcagattttccaaatgacctattccttctctccatacttaaggaagcaaagttagaattataagtaggttttttgtatgtaacaaacctgcaggttgtgcacgtgtaccctagaacttaaagtatttataaaaaaagaattataagtaggtttttcatagactgaataggagtttgacatacatccctgtttatcatgttggacttttactcactgttcctattagctacatatgtatatgttctaaactgggaagtctttgttattgaggaaaactgccattgccagtgttaggagttagattttcagtaaaaaagttaagcaaatagccaagaagggtgggtttgttactctagactctaacatgccagccctgttcccttatgagctggtggataaggaaagagtgagctgttatctgtactctggaagaggtttgttccctgatgattgacaagctccttatctctttaggcttcagtttccataagtaaaattagagaattagatgatttaatttaaaaaattgaatgatgggattaaaattctattggatatttaatgtattataggtcccttgtttaggggatagaatgttctgccttttaggggctcacaagttaagagaaagatatcacctgtaagtggaaatgacacaagtagtcacaagacagtgacagaccagcatgatgaatcaaatgttatgctaaggtaaaaatcccttgggagaggtggggaatgcttcccaaagcagaagaagttgaactggattttaaaacatggagaggatttcaccaggcagaaaaaaaagctggagtgttgtaggtagagggaggagactgagtgcaggcatgaaaatgcaggacctgtcaagggaatgataaagaatgtctcctatgactaggccagaagatgcaatagagagaaatgatcttaaaatgtctagagatcaaacttcaaaagccttgtctgcaagaatatgggctttttctaactgaatagtcatagaacttcttacctcttcctttatatctcaagaattctgtgatcctgtaattctaatgtgaggaattatgatgcctttatatagagatggtgaatcatttataaatgcaatggccatgagtttgcaacaattattttcttctcagggaaagctttcttattgtcagttgcagagaagagggtagttcactaactgtaccttcccttaccctctcttgatagtaagctttgcctactggtacctgaacttttcaatatcttttggattattaaatatttaaaaggatccaaaagtctgtaccaaaggaaatagaacatcagctatccagtaaagtgaacatttataagattgaccatttcactctccaggtactactctaacttgtgttatcaaaggataagtgccagaatggagattttggatacaggggcaaagcctgcctcttcaaagtttttaatctttctggatctcatatctggatctctctctatataaaatgtacaaattgtacttatatatctagcaattgatctgtgaagtgttattatttttgtttgttctgattagtgtattattgaataacagtcttatttgagtcatatattagatcttataagcatgcaaatatactaccactaatcaattaaacatttattgaacaactcttatgactaaggccttttccagatatagagaatacaaaaagaagatgaagcagtctcgatatatttcacagggccctcaacctaacttgccagttaccaatgaaaacagggaaatacaataggttgagatacgtgaaaatacacttataccatgagtgatctgatgacactgtcttgttcatctcttttcatttccaacactttactttttagttggcactcaataaaaatcactgaataataaaatacaacacatgaagtactttatgctactttaaaatcatctttaaaaattaaaacacacaaaagcaataaattaaatcccatgaaactgtgcaacaattatctttgctcaaagttaacacaatgtttttttttttttttttctaaaaacatgcttataagcgctgggccaaaataagctatattagtatatacctggcctattttttttttaatggactattgacatggcagactacttagattattttttccagatgatgaagtgtagatactaaaactaatgccaccttttcctacttaaattaagagttttatacagtagtctttttgattagcttttgatacagaatctggagccttttgtaaattcaattattttttatcttatttgcattaaagtattgtattctgtggaaagttttaaacaattaaatatttttgtgactcccatttagacaaggcagtatatcagttagcagtgtgaaagctgctgtcagggcaggaatgggtaaagagaaataaacacataacgaggagaaccagtggaatcagtcaacatccaaatgaaaaaattaagattacagactgacctcatatgtctactttcttcattcaagcaaaatcttaggaatgatagaaaagatattctaaataaatataaagcagtattagaagagaatgtcatcaggacatcagatatttcaaatatctcctgaaagattgaaacagtttggcttggattaagggaaacatatagactttagaaaacatctgtgacttgcaggagccatgccagaagtgccgctgtacatgcagggaaaggcaatgcagtgagcagaaacgtacctagaacaagagcaggatttcttttttctgttatcccattctgccaagcaccggaagccacatatgtgtcgctaacacaggaacagagaatagaggcagagcttacccaggcctgtgggtgacacccaggaaatagtctctactctcaaaagatgagctgttggcttcttgcactgagtcaaaggtcccatctgtctctaactcaaggagagctgagtaaactgaactagttacaacagataggtgagcagggaaaccaagaaaagatgagctgacacccaggaatattacattttgaagaaaataatattaagagtctcaaactcttgttaattaatacaagaagcaaaaaattaataaatagaataacagaaatctaatgcccagaagaaaaagagcaggtatatattcatggaaaaaataaattaaaaaaataggaacaaactgctatccataaaaaaaaggttagatacaatggaactgaaattatatttttgttagaataaaaactcaatagatgagttgataggtaaatttgtgatatggaagatcaaacccagaaattatcccagaacacaatacaagggccaaatgaatataaaataataataataaaatagttgtaagccattgattaataggtctagatcaaatatttctctaataggaatgcatttaaaaaatcagtataaagactgaattgtaaaaatacatgccgttatacgctacctatcagttacactttggatgtgaggccagatattacttctttgagggtagagggtagatgagataagtggtgttctggatgatccttgctcagcatacaccaaaagcaattttcaacacaggtttccatatttggaattaaaaataaagacatggaaagcagtttatgtgtagaatgcttgattttaaaaattgttattctttataattgtttcatttcaaaattatagcaaaatttttaaacaactttcttatttttccaaagtgttcacagaaacaaaaacgtattttgcactcagatttaattatttaatatttaaatattgattaaattatacaattacagaatgttgtacctacctgtgttcagacaaatatggctgactcttgtcacaggctgactggtggaaatggttgtatgctgtaagacaaaggaagcgtctgctagctatgagcattcagcatgctgtatgcctcagtgacatattttccagatggtgtgtggcgtattaagtcagcgattctagttgattttgttgatataaccaagattagttagggagaggttaagagaccagtggttctaattgaattggttgatataaccaaggttagttagatagaggttaagagacccctttttcagcgtcagaaacaaatttatcagaaataagacacaaaccttcagattgaaggaccaaccacaaaactcagcatggcataagagggacccaaatctagatatacattcacagaatattagaaaatcaaagagaaagagaaaatcgtatgcatttaatagaggagagatgatctacagtgggatgtgtgtcagattgactttagaggattgaatcagtaatactgggtgccagaggatcaggtaacttcaggattctgaggaagagtcatttaaaatcctggattatatggtcacacaaaacaccattcaaatctgaggccaaagtaaaatcatttgcaaaattataaggactcaggtgttaccacacagaatctccaaaaaggtatgcaatgaaaaatcttcctcaaatacctattccccggttagtacttagttttccatcctagaggtaaccagggttatctgcttatagtgtctgatctggaggtagtttatgcatagacaaatatatatacatgtatacacttacagctttttaaaaacccatactatttacacacacacacgtggtattaccacaattgagtgtgtaaagagattcccctttttttacgtcctcttatatctgattgcaaggatcttttgtaatctacctaatgagtttggtgttcctggatatttgattgaatacaatattttcctattaagaacaaggctaaatatataggattctgtagaaaagctgttttgcctctaatgtatatctatgttaaagggcatgagtattggtaattcggagagagattgcttaattgtaccccatagagatggtgctactttacagtctcagaccaggagagtaggagagtttctctttcccatgtcctgttaccagtatggacgttattattaaaatttttgacctttgtgaaatctaatagataaaagatgttattattattattatttttgagacggagtctcactcttttgccaggctggaatgcagtggcacgatgtcggctcactgcagcttctgcctcccgggttcaagcaattctcctgcctcagcctcctaagtagctgggactacaggcgcgcaccaccacgcccagctaatttttgtatttttagtagagacggggtttcaccgtgttgcccaggattttctcgatctcttgacctcatgatccgcccaccttggcctcccaaagtgctgggattgcaggcgtgagccactgtgcctggccaaagattgatgttatcttaatatagttgtaatttacattttttgttgttatggtgaggttgagtgtctttatattttttattctcatttcctttcctgtagactttccattcatatcttttacttattattattattattttaatgatggattcttgttctgtcggccaggccagagtgcagtggggcaatcttggctcactgcaacctccgtctcctgggttcctgccattctcctgcctcagcctccgaagtagctgaaattacaggtgcctgccaccacacccagctaatttttgtgtttttagtagaggtggggttttgccatgttggccaggctggtctcaaactcctgacatcaggtgatctgcccacctcagattcctaaagtgctgggattacaggtgtgagtcaccacaccaggccatcttttacttatttttctattatatatttttatttctaattccaaagttctttatatattagtattttaaaaagacaaatgttaattacaaaataatatattctaagtataggacatttagaaaatatataaaataaataatctgtaattttaccatccagagatagacaactaactttttagtatttatgctgaaaaggacataaacatataaaataaacctcaattttcagaagatttgttggtaagctagaaaaagcaaattttctcaaacatcttttttggtttataagattggcacaaattatgcagattgagactatctagtggacataattggggaacatttaatcttacaccttgtaggagagtaaatttgtagagtcaatatatacttttgtgtagtatctattagaacattaaatatgcttacccttctttttagcaattctgcttatagttgtcaattttagagaaatatctatatatgtgcaaaaggtttatgtataaacctattcattgcagaacttagaactctctagatattcagcagtaatggactagttgtatctatatattatgctgaaggccaggagaatgaaaagataaaagaaacagttctttgcttcaaggtgtttacagttttgaaggaaccattttctttgtctcaactttttatccttttagagttcatcacagttattcgatttagtaagtactcaatctctccttattaataaaataactggtttttaagtgtacctacctttatggcattctgtggatttccagtttagcattagagtggcatggataatatagttacatgtgagagaagtttctggattatgagaggggcaatatgtagatacatcagtcttcattaaaggaagctacatagtgaataaacagaattgtgatgctgatcgaataagctacatcgtacattaaaaataaactatttaatcatatattaacctatgtcttcattctcagagatttgagacatgggccaattttgtgagaagaaattttctttatttaataatgaataaataattgtatgcatttatttgaagtttgttaactgaatcatatagtattcttttaaataacaaaattctttataagagcctgaaaatatgtttatgcaacactaaaacagagcacatatttattgagttcatgcacaattgaatgtttccacttatttgcaattacatttttaacccagagggttttatgtctttgtatttgcaaaatgaagaagaatcagaggagttgcaggttcctggtaggtgggatatgttttggagcagtgggagaaccagtagtcccccttgaattatgatttggaggtttcctgaaaggaagttttaagattctcttagcaaagtgagaaccataatttgatgcagagtgcatttagggtgcagctatagtgaacacatccatctcatcattattctgatgccaagccctagactgagagaagtgagaaaatgggagcttagccattccagtgctacacagatatttttatagaattattacatggtggtgttgggaagtaccttagggattagatagtttagtgcctgccttttccagagagagaaacttgacttcatctcataattaatgtgcctatatctgcaataaattattaactctttagactctaactcagatgatcagggaatggtgctggtgagcccaggccagtttgggcattaccaaatgcttctgcttttctattgttttccgtttaaaataaatgaaatctaaatatgtttttttttccttgagcacattcaaaggataaacataaggatattttgccctcaactctttttgtagtctactagcctcagcctggctttacttaaaataagaccacttctgcagtgaggctacatcatcagccatttgaccatgctccttgatgtcctgtttcttcaagtgtggtgtgtagatatcaggatcaaaatcaggcggtgggatgtatgggggcgggggtggtggggggtggtttggtgaggtagaggtagttggtagaggaagtctctattaaaaataaggcttccagactgaatgacaaacctaaaatatgaagttaaaaagaatctaagataaaaataagcctggggtggtggcacatacctgcagctccagctactcaggaggttaaggtgggaggatcacctgaagccaggagttagaggctgcagtgagctgtgattgcaccactgcactacagcctgggtgacagagtgagaccctgtctcaaaagaatgaaagaaagacagagaaagagagggatagggagggaaggaggtagggaggaaaagaaaggaaggaaagaaagaaaaagaaggaaggaaggaaggaaggaaggaaggaaggaaagcaggcaggcaggcaagactctgtctctaaataaatgaataaataaataaaaagaatacaaggtactttttttttaaactttcaagttcaggggtacatgtgcaggtttgttaagtaggtgaacttgtgtgatggggatttgttttacaaattatttcatcacccagatattaaacctagtacccattagttattttttcttatcctttccctcctcccaccctccaccctctagtaggccccagagtctgtagttcctctctatgtgtccatgtgttctcatcatttagctcccacttaaaagtgagaacatgtggtttttgattttctgttcctatgttactttgctaaggatcatggcctccagccccatccaggttgctgcaaaggacatgatatcattcttttagggctgcacagtgttctatagtgtgtatgtaccacattttctttattcagtctaccattgatggaaagttaggttgattccatgcatttgctattatgtatagtgctgcaatgaactcacacacgtgtgtgtctttataatagaacaatttgtattgctttgggtatatacccagtaatgggcttggtgggttgaatggggtatttctgttttcaggtatttgaggaatcacttcactatcttccacaatggttgaactaacttaaactgccatcaacagtgtataagcattcgtttttctctgcaaccttgctaggatctattttttgactttttaataatagccattctggctggtgtgagatggtatctcattatgcaagctaaaatttgagggcagccactccagtggctctgaaaacagcagagctcaagattctttcctactggatttgcatccactaaacttcataccctaaggatcttgcatgaattttaatccgtatatactctttttggaaagttccagtaatggtaaaattagatacgtcctgtccttacttaataatatcctcccagaaaccgactcagatgctagtgagctagaaaggattctatggatttaaaattattaatcaacacgttatacatgtgaactagttggaagataacacaatggaacgttaatgccagcataagtgttttcccactcttcaaataaaaagaaagcaacagttgaaatctgcttcctattctagaatctggaaatattaaatagaagtaagtagtttcagtcatcagcaattttatcagtaaaattgtagcaggagaattactccagctgtttcacaatattattatagttatatatttatgttattatatttcttaaatacaattttatatttatgtattatctatacattatattattatatttgttataataaaatttatcagaaatacaagaagaaatataccttcagactgaaagggaccaaccatactaccaagttcagatgcggataaaggaagaccgaggcacattgtagtgggatattagaaaatcagtggtgaagagaaaattgtaaactctttgtgagaggttatctatcctggaatagcagtgcagtatgttcaggttaaaaggaccttgaaaatgcataagaattgaatggtaaactctctcaaatgacaaaaaaataaaaataaaaataaaaaagcaggtcttttctactcattcacattccaggtatttggatgtcaaatgtcctgtaaaactcattaaaataaacagtaaaaaaaaaaaaaattaacctgccaagagcagtggacaggcaggtgattatatcagctaatcagattaatgcatttggtctttctccattatgattgggatttgaatgttatgtaaaatgtgataggtacatttccattataagattattatgttaccaacaaatatgttagtctgcccaatttatagataggcaattaacttactgacagaggaaattgtgtatacttaacatatctagggtgtttgtgttgtctgactctggttatattcttacagatgaagtaaatagaactttaaacttttattacaagatagaaagtttgagtaattcatcatggaaataatatttgtatataaatataattgacacatttaaaggttgagtaactcattgtgaaaatagctgcctgttcataaatttaattatttagtgccccattttgtttgctaacatggataatttctctgtagattgccacttaaaattttgttagttcaaaataggtggttctatttagtaatattttaaaatatattgaattgatattttaaaatgaaagttcctatgtagaaatttttccaggtgcaccctaattatctctcattagtaagatacgttcatggatatgtcaggctgattttttcagggtaaatcagtatttaaaatgtaacaaactaaaaaggatattgcgaatgcccttttttccaacatcttttttgaggtataatttacataccctaaaattcacccagtttaagcataaaattcagtgttttttagttcatttacagaattgtgcaaccatcacaacttagttttagaacagttccatcaactagaagggtccctcatccccatctgcagtcactgtgttcctatctacagtcccaggcaaccattcatctactctgtgtctctatagatttgtctttcatataaatgtaatcatataaaatttggtcatttgtgtctgtcctcattcacttagcatgatgatgtttttgaggttcatccatgtggtagcacgtatcagtagttcattctttttttcttcatggattatttccactgtcctgaaataccacattttgtttattcattcatcagttggtgggcatttggattgtttccattttttggctattatgaataatgctactatagatatttgtgtacatgtctttgtgtagatgggtattttcactcctgttaggtagatacctaggactgcaattactaggtcatacagtaaatttgtttagtattttaagatactgccaaactttttttcaaattactatatcattttatattcccccccagtaatgtatgaggattccagtttctcaacatcctcaacaatacttgtttatataccacaaaaatctcccaatttaagtgtacaattcaatggtttttagtacatttacagaattgtgcaaccatcaccacaacttagtttgggaacatttctatcaactcaaaggctcctttataaccatctggagtcactctgttcttatctccagccccaggcaaccattaatctactttgtgcctctgttgtctcttttggattacatttgtggatgtgcagcggtatctcatgtggttttaattctgttttcctagtaactaattatattgagcataggttcatgcgccagttcatagccattgtaatatttgtcatctttggtgaaatgtctactcaaaacttttgccaacttgttaattagtttttttctactatttagttttaagagttctttatatactctggatataaatattttatcagacaagtgatttgctaatgttttcttccagtctctcgctatctattcagtttcttaatggtatcttttaaggccaatttttgagacttttgataaaaatctagtttatcttttttttttttaatggaacatgtttttgatgttgtatctaagaactcagtgtctaacccaaagtcacaaggacttcctcctgttttcttccataatttacataatttaaagttttacattcaatcctatgattcattagcttttgtgtatggtgttaagagactgtaaatttttctctttgcatgtacttctccagtggtatctcagcaccatttgttgaaaataccatactttcctcatgaaatgccatagcatttttgttaaaagtaaattgaccgcaaatgtgcgagtttatttttgaactacttatactgttgttttgatctatatttatcttcgtgtcaataccatactgtattgatttatgtagcttataatattttttgaatttgggaaatttaagtcctttaattttaattttctcttttcaaaattgttgtggcctgccagacacagtggttcatgcctgtaatcccagcactttgggaggccgaggcaggcagatcacttggggtcaggagtttgagaccagcctggcctacatggcgaaaccccatctgtactaaaaatacaaaaattagcagagcagggtggtgggcacctgtaatcccagctactcaggagactcaggcatgagaattgcttgaagctgggagggagaggttgcagtaagccaagattgtaccactgcacttcagcctgggagacagaggagactccatctcaaaataaaaataaattgttttggccattctggcctctttatatttctatatacattttaggatcagattgtcagtatcttcaaagaaacttcctggactttgataggagggtttaagcttaatctgaaattcagttttctgaaattccattttggaagagattttatcttaaacaatgcaaaaccgattatttttttttctctgtgaaaatgattattactagagaattggtagggtgtgtttttgaatacgctgtttatttgtttgcttgatttgaaccctgaccctaacaactttggtctttttcatagcagtaggcctgaaacacaatagtggagtcttgattaaaaagaacaaaataagctactggtagtccatattacagtatttaaaatgaacaatttcaaaccactaacaagatttaaattccataaaggatttatgagaacaagtaatctaagctactcatttggaggcatacaaataaggaatacaaaataggaaatcacacagatagtgtttttgcaggattaggacatgaacccaggattcagactccagattccactcttatttcagtcctactgctatgagaaagaccaaagttgttagggtcagggttcaaatcaagcaaacaaatacggacaaatgaacaaaacccaaactaatcttttcaggaagtggatttcactcacaaacattcagagttattctctaaatgtaagcttgtacaaaattattgtatgtgtttagttaaacagaaccaaggatatcagtacagtactttttattaaaaaccaaaccaatatctcctctctggtaatgtaagtttcaagagttgtctccagaccacaggaattatgattgagtaaatgttagggaaataaagacccttagatagttaatccattagtattaatttattaatgagataaagaaacttagtaaaggatagaaatgctgtatttagttaattccaatgaaaattttctcattttagtagctcttacatagaggtgtgttatgacactaatgacatcctggagttatgaaatttgatatgaaagcaaatgtggaatcactatcatttttggaagtgaacatttataaagttctagttgcaactgttgccctggaaacacttggctcaggaagtaaaagggaatgctatctgaatggttatatttaagtcttttgctttagaataataatatatatagatatacacaggaaatctttataatcttttaaataatatgcttgaatttcttctatttaagttgactgtaggtgaagattaaatcaaaattttattcctgtatgttttacactcagtttgagctttaagggataaaatgatgactaggaattctatcaggagagatgttttcgaatggtcagagggaaacagccaagtatcatttgaaagtcagttccaaatcttagctgataaaacagtaaattaaagaaatagatttcattactaatttaatgtccatggttgtttattttgcattttcaatttctgtagttccttcttttgtcaggccccaagagattacacaatttgtgtgaattgatacaaccttcgtatgagggaggcagaatcaatcataaaggaggttagtgggcggaaagatgaaagaggaaaaataaagccactgatgtgtatttagagtgtgttttaagtttaagaatatggaaacccctattttcatttgaaatgctttggagtaacatactaaagcatccttggggacaccctaacactgcacattaatatggtttaaaaggtctccaaagcatttgcctatagttagctctgttgtagtattttagtaagtgttctaataacttggctgctcttgcctttggctgtgaagtcttcacaagtgcacagtgtccaatttttgggtccttggtcacatggtcttacatgttcacgttctgaacctattaataactcagcataggattgtaagaaaatacatcagactctatactggaactgcataatcaactgtctacttaatccttctctcatttctttccattacctctcactgtagaagatacacattcaaccatgtgttcagtgcctgtttccccttctattctcagtattcttaaattgatttccataaattagccttagagagttaaaaaaattcaatataagtgaaagagaaagcggagaaccatcacaataatataaatggttataaccatgatgataacataggtttttaaagtatattataaactgtatttacaaattcttatggctgtagtaaggttacatactttgtagaaaacagctgaccggcttgaacaaatgcttgtgtgtaaatctagtttttagaaatgaaattatattttatgggctctatagggtgttgctatgtaagggaaaccaattgtgatttttttgtcattaataaaataataacctagaatttagtatcagttccttagcacaaatctggtttgcacatgcttattttatcttttaataataatgtgggatactcttagacattttgaaggtgctattaaaatttaaaacatatatgaaataattaaacagctttctatattatgtcagtggtggattttaaatagcaaggaacatatctgcaaggaatgggaaaagtaccacattctccttttaatcatacctacaaggatacgtagaaagtggaacccctacctttttttgtttgtttgtttttagaaacagggtcttgctctgtcatccagtctggagtgcagcggtgtgatcatagctcactgccacctcgaactcccatgctcgagcaatcctcccacttcagcctccccagttgccagactacaggtgtgtgccacagctagtttttacatttttttttgtacagatgaggggtctctctgtattacccaggttggtattgaactgctgagctcaagtgatcctccttatcatctcccagagtactgggattataggcatgaaccactgcacctggccacctctacctttagtaaaaatcaaatcacaagaggaaaatcaatgaatggaggcgctgtagttttcatttgcattgatttttaaaaacaaagaggaccagaatataatagccactgtttattcaacactgctatatgccatatacatattgccataaggtatggcaaatttttcacagaaacccactaaggtacgtgtagtcactcagttttatagataaggatgctgaagctgagggagattaaatgtcaccctagaggggaagctgatgaggcctagaggtgaaatttaaagccgtatgtgtgtgtggtgtgtatgtttgtatatgtcatgaagatactttgttgcttcagtattatttatcagagatatataacacattcacatcattttaatcctttgatccaagatatggggtagaaattgatgtggaataagtataggagtagaaatagtagaatttaacatagaaatttgctgatttgtaatgtaatctatcttctctttctctttctgtttcctttctgatgttggtatatttaaaatttttaagtaagaaattatcacgttagggagatttcctaaaaaataatcctggcgcagtccaatatcatcagtacttctagaagcaaggaactcactaaggcaagaaaataaataaaaggtattcagattgtaaaggaagaagcaaagctgttttttattcacagaaaacatgatggtctatagagacaatcctgctaaaacaaacgtgcgaggtttagcaagatggcgggatacaagtttcatgtacaaatacgagtttttttatagtactaatgaacgattataaattaaaattttataagcacatttacaatactataaaaacatgagacacttaaacataaatttaacaaaatatgccctgcacctgtataccaaaaactgtaaaatattgcttgaatattataaaatattgacagagattaaggaatatctacataaatggagatacatacaaagctcatgaattagaaaactcaattttaagatgtcaattatttctgaattgatttatagatttggtacactcattttttaaaaaaacaagctttttgggtagaaattgacaaatatgtttatagttatggaattccagagaacttagaaaagccaaaacaattccgacaagaacaaagttggagaacttacatgatcttattgaagtgataatgttaaagctttaaaatccaaataatctgatattggaacaaagaggcatatggaacataagacggaatccagaaatagttctacttaaatatggctagttgattttcaagaaagttaccgatgtaattcaatggaggaattctagtccttgacatatggtgctggaagaatttgacatcaatataggaagaatgaatcttgacagctgcctcacaacagccacaaacattaatttgaataaactataaatcattagaagaaaaccttcactactttgacataagccaaaaatattttaggtaggatacaaagctacaaccttaaaagaaaaatacattacataatttggacatcttaagtattaaaatcatctctttttcaaatgacactgatataaaaacataatacaaaaagtgggagaaaatatttgcaaaagatatatctgataaagcatttgttaccagaatatgtaaagaactatcttcattaataagaaggcagacaacatgaaaaataggcaaaatgcttgagcagtctgttcactaaagaagataccagatggaaaaaaagttcgtgaaaaagatggataatattattagtcattaagaaagaaataaaggtgaatatccacataaaagttctcaaagattcacagcagattttttcataacagcctcaaactggaaaataaacaataatgtgttattgtcctacagtagagtactactcagcaaaaatactcatatattccgcaaaatggatgaatgatggaagctaaacaccaaaaattacataatattttattctatttgtatgagattctaagaaggaaggacaaaactgtggatcagtgattgacaaaaaccaagtaatgaggaaaaataattcattataaaagtgcaccaggaactctaggggtgataaaaatattttatataataattgtagtggttgttacatgactgtatatgtttgccaaaacaaacgaaaagcaacgtgcagccttttacccctgtattagtctgttctcacactgctataaagatactacctgagactagttaatttataaacaaaagaggtttaattgactcacggttcagcatggctggggaggcctcaggaaacttacaatcatggcagaaggtgaagggggaacaggcaccttcttcacaaggtggcaggagagagagacagagagtgcgagagtgcaagtgcagggaaaactgccacttttaaattatcatatcttgtgagaacgccttcactatcactagaacagcgtgggggaaaccaccccccatgatctaatcacctcccaccaggcccctcccttgacacctggggattacaatttgagatgagatttgggtggagacacagagccaaaccatagcaacccttgattacctaaccatcctctgattaacactcttgctcccaggataaaagcaagtgtccttaacagtttcctatctttttgaacctggaggtacaggtatagtctgataatagttgtagtaacactgttacatttcttaacaatgcattttagtggtgcgatctcaggtgatctttgcttgtttagcccacatttcacctagtctgacagttcttttaaatcaaaacattaaaggattgttttgtaaaatagtaaaacaacactgaagtaagtatagaaagagaatccccagttcccgaaccctccccaaaggtgacttcagatagcagcttgatgtgttttcatggaggtctttatacacactacgtataaatagagtgcaggtattacttgaaggcctttttgccctaagatctccaggaaattccttgaagcccacgagtgtctaaggccttgaatcaagatttctatccaagcttggggtaaggagttaaaaagcatggacatcctttctgagctccttccctcactctgcacctgcatgcattgcctttgcttcctctgcatcagctagcatagaacatttaaggacttcactgctttcccaaaaaatagtttcagaccagtcatttttaggaattataggaaattttgatgaagaactagggtgtttgaaaatacaatatattggaagacctcagccttctagtacttcattttctcccatgctttctccctgtccatctgtgctctcccccttttctttcagtgttgtttccagatattctgaattcttcaccctctatcacgcataattattcacctcttcacttctctcacccaacaaactttccatctcaaatctgtcaaggtatacagaagaaaaaagggccttccagtcaatgaaattctcttataaggagtcagtttgaattaccaccttcctctttggatttttgctgttccatatattttataatagaagatatttcatgtgcaatattttggacctgtttttctccaaattaagggaactaccagaaaataggtttcttaattcccaaattaattagctaaagtcaaaatatctaaaatcaaatcatttaaaatcaattatctaaattatacaaattaatgagctacaaagatgagttatcatacatgtttgcaaaattcagtgaagtgttttaagcacttgtttatatcacaacagaacttataacaagcaagacctgtcatgattcatgtgctatcaataatgtcccatgatatcactccatgaccatccctgccattctcctagttattaccaacttcttattcacatttctatgttcacagtatcaccatatgctcagtcccatgtcacatatttcttcagttatctttgtgttgagagtttctaaatgaatacttatacaaaattatccttttaggatacttccattcttattatattttggtattatagggtcataaataacaaaatcttttcacatacaaaattttgctcatataatataaatgggattacatattatatgtgttccataacttttttacttgtttattgacttgtaagagatctttatacagcttgaatactaatcttttattagctgtatacactacaaatatcttctctgtgacctagagatcatttcatgatatttgtatacatctacttttttaaacagccatataataatccatcatatgagaacacaataatttatctaggcttcctatgtaacttcctttttaagagcaagaagctctgcctcctattagctgtgttactttggataagatatttaatctctctgagtctctgttgcttcatatttaaaatgaggaaaagtattttctacctcatatggttataggtgagattaaagaaataatgcaaataaattattccagagctgggtttctcaacctaagtactaataatattttggggcaggataattgttgtagggggctgtcccatgcattgtaggctatttaacagcatctatgacctctacccctagatgctcagttgtgacagcccagaatgtatgcagacattgccagatttctccctggtatgtgtgtgtgtgaagaaggaggcacaatcacacccagttgagaaccaatattttggagaagggcctggcaactagtgtcagatatactactacatgaaagtggacataggcacagccaaaatctgtaagatgctcttcatatggattacattatgggtagctcttgctgcagttgtgcatggttgtggccatgaagaaaggtggccatattgctaggcttttaggtttgtgtcatttttacactaaggcaaataacaataatttcataatatacaactaattacatagatctttgcatgcctgtgtgagcatgcctgcaagagatattcctgaaaatgatgtctttgaatggggggtggggagacacagggcttgcgttattaaaagttttatatattctgccaaatcaacttctaaaaatgctagaccaagttacactctcactaactgtagttaagagtgcctttttcctcatatctttatccatagtgaatattaacacagttattaaatttaaacatacttcgtgaatttttaatgtttatttccacaatttacattttttcttttgtgcattacatcctcatcatcctttttatatgtttctgttaatcttttagtctttaaatgctgtacccagatctcgaattataaaactattagattacacaataaaagcacagatataaatataggtaacacccagatttcatgaatgttaacattttattttattatttttgcttaagacctttattttaaattctgcacatcatgttgaagccctcagggtacttctctccaaccaattttttatctgggtccccagatgtaacaacgattccaaatttgcctatatatttccattcatatttttataattttgttaggcatatatgcagccataaaaatgtacatagcattgttttgtttttaaaatttgcacaaatttagttgtactttacaaatccttttagaatgccttttaaaattcaaatcatatttttaaggtttgttcaggtggatgcgtgtagttttagcctacggtttaaactgcagtgtttatataatttttgaatattttattcattaccttattgatggaggttcattttttctcattttcttaatttttgggattataagcaatataataatgatgatcctgttgtaagtcttaagtgtacatgtgcaagagtttctctttgggtcatagctatcagtaagattttggcttgtgaagatatacatcttcatatttattaaatgccatcaaattgttcttcatggtgattataatacttcatccagctgtttagtttttgacatccataccaaccaactactggtactttcagtctctattattttttcttctaatctttactcatctctcagtaatcggtagaacaagcaaacagaaactcaaaaacaaaatttaaacagggaaaacagagcaataccatcaacctacttaacctagtttacaattaaagaaaattttatatctattacacatggaacagttatcaagatagattatatactgggccattaaattagtctcaacaaacttgaaataactgaaaacacattggtgtaatcttaggcaggagtggagatttaatggaaatgaatcacaaaaagatccttaaatattacttcaaatttagaaataaaacaatgcgctactaaataacatgagacaaagaagaaatcccaaaagaacttataaaatatttgagcttaatgaaaatgagagcaaaatgtctctaaacatgtgggatgcagctaaaacaatggttatgggaaaatgtatagcattaaatacttttgttaggaaagaggatgggtccatcctaaatttaaaaagaagaaattaaacctgaaatataaagaataaaggaaataatatagataagagcagaaatcaatgaaatttttttaacctggaaaaacactagagaaaaattaatattctgtaatgaacaataaaactgataaatttccagctagactgaacaaagaaaaatagagaaaatacaaactattaatgaaagggagacatcactatagtttctttgaaattaaaacaataataagtaaatatttgaactcctttatgttgagaaagtttacaactttggataaaagggacaaattctttgaaaaatacatattaaaaattaattttaaaaatgtagaacatggtggagctgtctctaattgaatgtgttcatttatttatttatttattttgagatggagtctcattctgttgccaggctggaatgcagtggttgatctgagctcactgcaacctccaccttccaggttcaagtgattctcctgcctctgcctcctgagtagctgggattacagacgcccaccaccacgcctgaacaatttttgtatttttagtagggacagggtttcgctacgttggccaggctggtgtcaaactcctgacctcaagtgatctgctcgcctcaccctcccaaactgctgggattacagacgtaagccaccgcgcctggcctataattgaatttctaattaaaatttctcccacacagaacattccagacccaaatgacttcattggtaaactttgtcaaacatctaaggaagaagtactagaaattctttaagaaatttgaaaggagggaacactccctattattacttatgaggccagaattattctgatacccaaaaagatggattaattataagaaaaatctacattataattctacatgaacatagacactaaaatccttaacaaatattaacaaatcaagtccagcagtagataaaaagaataatacattatgacaaaaaaagagtttatcctaacactgcaagggtggtttaatactaaaaacatctgacagtgtcattcaccaccataaatgaaataaaaaagaaaaattataacagtgtgaattacatgcagaaagataacttgacaaaattcggcagtcatttatgatcaaaactgtcaacaaactaggaatagacataactatctctatctgttaatggacatttacaaaaaacccatggttaacatcattcttaattttgaaaagccacttacttccccctattatgagaaataagacaaggatgtccattctaaccacttctattcaacattgcaatgaagattctagccacaacaataagcaaaataaataaataaataaataaatacagtaaaataaattaaaaatcagaagcaggaggataagaaaagaagtaaaattgtgcttatttgcagacaacatgatcatgtacatagaaaatattaagtaatctaaaatagcaactagagctaacaagtttagcaaggtcacaggatgcaatgccggttcatcagaaataaccactgagtgtgcatgcacatgcatttatcacagtccttctctcctttatttctggcatcctcttacccccttcctgtcaggttcacatactatttcagctttctacatgtgaaatttgaatgagaaatgttttccaagaataatttttaacaattagggtaaagttagaggtaaccaaaacagaataatttcttccttagaagaccatataacctagtctttttatttatttatttttttacatttttaaggcatggaagagtttattttcttcttttcaaaggaatacttgggcactgccaagatatggataaaaatttcagtcagggcttaaaatgcaggatggtagtttttcaatatatgatgctatattttgtgtaaacaacaatgcatttcgacaataaatttaaaactcttaccattttaaacttctaaaattaataatattgcccaaaaatacactctgtagcacctcaataaaaatacttttattcactcaatggcttttgaggtctatttttaaatttaacaagtgtgttttataataaacatatttttataataatattagggaaatcctggcttaccactttgtataatatataatccacttgtaaatatcagagttctatttgtggatcatgatagtacatatatatgtgtgctaattaattaatgcaactggatttagaggttttgtgtttctctactttttatgtatgtaagataatgaacacgttgatctgtttccttggcactcagggactgaactctaaatagcgtaatattttctagatgtgcttttttctatacataattagtttcagtttgtctgtaggagaggtctgtggcattactaattaagaatctaattcagcaaaacatatgtcttcaattctaaattaatttactctggtacatattgaattaatgagaattgccatatatacatatttctttgggtagctgttgaattaaactgaagtgattcatatccatgtatggatttgaagtctacatgtgggataagttgaataaataataaatcacagataaattgcaagatcaaaagaaagtaacgttgtaactctgtattgtgtgtgtggtacgattttatctctctggttttacttcttttgtgtaagagaccctataaatactcacagcaaagaaaatacaccgagattttatgttgaattgaaaatattaattattcagagataaagtacttgtgcagggctttgtgagatagaacaagaatagtgtaaatttgtacttgtaaataatgtactttctatagagatttatagttgtacaaattgttcacatatgtcatttcatttcacgaacaaaaagctgttatttgtaagataggaaagagtcactttaatttcagtcttattgttacctttttcttgactaaactttacacagaccactcacacccatttatatttgccgacacatcagcccaggtcctcaggctgaaaaacaaagtaatttggttttttcaaattgttgagtggtgtttaagaaaattaatctaagtatagaatatatttttaaatgccacaaagcttcagtgatctgtaaagatcaggtttttaatgttacaattgagcttatttagctgtattttatagtctcagtttactacccaagccaatagaaaataattctgaagtcattgtcatcaaaggcccacatttcttgagtgcccattatgaaaagtaaaatgtgatttatacatttgattataacaatttgtggcactttttatcttaaagattattacctgaaaaatgacatggtggaagtgaaaggaaaataatgactactgaagaaaagggttacttggaatttctactttctacactgttttttgtatttatctgtcacttgataggaacatgctagtccataaggtccttatggtccctaaggtgatctcatcttagcatacgttgggatgctgatgttgttcaaaaatatattggcccaattggcttcagttttcaaacagaactgcagacacttaacctttcctttcttaataatttgaaatcttccatcttatcttttatgagaataagaacagttggctcttagttttctaggtgcgtgaacaatttagctataatttcctgagattgcttgtttttatattttctaggaactaggaatcatatcatcagttgtgtaaatgttttagaagtgtccatcttttgtaattagggctttggcactgttctttgggataatagtagatagtatgtgttttgtacataatagttgatgagaactttttatagattaaactatttatttttcagatagcagtgatcaacaagtcttagtagtcccatgttaacaataagaaaaataaagaccaatgtggttatattattgctttaaagacatacaggtcccatgtgacagaataaatactgagtttggtcttccagtgccacatcttcttcctttccctttatgcataaggtttcctctggttaagttgaattgtatgaaattcttgatatatgaatatttgacctacagtaaaacaaaatttgtatgctacaacctacaaacaaaacaaaacaaaaaactgccaattaggaaaagtacattttacatatagctaaaactgaacaattttttaaaatgttcattactattagtaagtttgagggggaaaaagacttagacattaatgtgtgaaaatgaaaggccagagcaaaaaagtttacttttggagtactctgggctctcttaaattaagagtgtgggctcagcagccagagtgtgcagtttcaaatccaagctcctcaagtaacttgctatgtaaccttaagcaatttgcttaacctcccagtgcttcagtttattcctattaagaatcagtaagatacttagaacagtatctggcatcattgcaaatcctgtaaacatatttgttaattaaaatgaaaatgagaagtagagatagaaaatgtttccttccatgcattaaataattttctgaactttcaaaatgctacctattaggtactttggaattaattaaattaatgcagaatagtaaatttaattaacccaagtaatattgtactcatgggcaatttgtacattaatttttcaggcagatctgaaagaaaatgtatgaaatgaattactcccggcattccaggaaatgtctgttggttggctgagcagttgaatgaagttttgtcactacagttctcctcccaaaattcttttcaaattttaagtgctgaaaagccatccaggaactgatttctaacaggactctaatgcttccccattctcttacagataagtgatatagtaacttcccatggccaagtgatcaactgtaaaatgcacacccatgagatgatgggttgattggcttgttttcctataacctccaatttcctatgtggcttttcaaaacatcagaagaatgtgtaggaaacagaagtgagaaaagaatatgcattggtagcctgctaggggctgtgctaagtacattataagataagaattaatttgtaatattgtgataaaaggcaactaaagctctctaattcctatttgtttctaggaaccaaataaaatcaaaggtatatagaattattttcagttgatacatctactatcctgcttgtgaaatatagaataaatactggccaaaggaaagtaaagtctaggtaaataatgagacaagagaccctaagtcttcaaataagcccattttctggtgcagatgtgtcagtttatcccagattactaagagaatttgcagagtaaacactgaactgctctcagttatctttgtaaaacaggtattttataacgacttcattaaaatgccacagtcagaggtcgcttaggttgtttttcgattttttttttggtaaattatgagatacagtttgcactgccaattttgtactccctcgttctctttcgcatttgtgcaaatattttcagtgaaactgccaagctgatgaataaacatatattgttgttagagataatgtggaattgcccctcagtgttttttctgagatggagtctcgctctgttgcccaggctggagtgcagtggtgtggcacgatctcagctcactgcaagctccacctcccaggttcacgccattcttctgcctcagcctcccaagtagctgggactacgggtgcccaccaccacgcccacctaatttttttgtatttttagtagagacagggtttcaccatgtcagccaggatggtctcgatctcctgaccttgtgatccactcacctccgcatcccaaagtgctgagattacaggcgtgagccaccaggccgggccactcctgagtgtttttatcactttatgccactgataatgtttcggagtacctgtttttctaattacctctaattaattgtctaattttacattttatttccaagtagatgactgtgaaaagcattctgttattgtttccattttaatttccttgcttattggtcaggttgaccatcttttcatgtcatcagccattagggtttcttctattgtgaatttcctatcatttaatttggaatccttctactcgattaactttgtatatcagaattattttacaaatatatttctttgttatatattgtacatattttcttcctgtctgccaaatttatgactgttttgtcatgaaacagttttacattttaatgtggtcaaatttgataacactatccaatatgattgtcacattttggcattccttaagaaggtttttcttctccaaagtcataatcaaatctcactctactattctcttttaatacttttgtattgctgaggttcaataaaaagcaaattacagagtgatacatagattatgttacttaattattatttaaaaaaactcacaatatttgcattttcttgtgggtacctatatgtgtatgcataaagatataaacatgcctggaagaaatcacatcaaattgataataatgattacttttggagataagttgtattcgtctgttcttccattgctgtaaagaaatacctgagaccaggtaatttataaagaggtttaattggcttatggttctgcaggctgtataggaaacttagcaatatctgcttctgtggaggtctcaggaaacttacaatcatggcagaaggtgaagggcagcatgcatctcacatggcgaaagcaggagcaagaagagatatgggggaggtgccacacacttttaaatgtgcggcagatctcctgagaactcattcattattgtgagaacagtatcaaggggagggtactaaaccatgcacgagaaatctgaccccatgatccagttgcctctcaccacctccaacactggggataacaattcaaggtgagatttgggtggagacacagatccaaactgtatcataagtggaggggtctaagattgagactggtggtcaaagagattattaaacttactgataaatttgaaaaaccattttgacagagagtactgatgtattgcttgtataattaaaggtcagtgtgtgtgtgtgtgtgtgtgtgtgtatgtgtatatatgtatgtatgtgtgcgtgtatgtgtgtatgtaatgaaaatagtgtaaccacaccacataataaatttgaaaaaaaagagggacttgcttatgttttcattacctataatcactatttgaattttgctatactgctttaaataccagtctgttttcctgtgactgtattattttaaaataaattcaaatcatagtgtatataacttttcccatttttaaagaaacttatcacacacatttcgcagtattgccacataaacttcagtaaagccagatttagactatataatgtgtttttcccgaacatgccataatagagtttaccattttcttaattgtggatgttgagatagtttctgtttaaaattatgaaaagtgaatattacactatatagttgctgctttatgtgcttctttaagaagaacttccctactccaaactcataatcagatcttctctatatatttttctgtaatacttttatactgttgaatttcataaaacaaacaaaggaggtctaattttgaatttaacccaagaataaattacaagaagtgtaatttgtgaacccagagtggtaagtaacatggttcttcaaggatttcccagagggcactgatttaatgagtcatcagtgaagtttgaaggtcccaggttcacttcatttttatcaactatatgttataattttatgtgctatttttaattgctatttgaaacattgaaattgtgcctgattgttagaatttacattcttttaattgctggccaagaatgatcatgattccacgcccgtttctctacttgtttttatttttttgtgaattatatatatcatttactcatttggctactacaggtgtgctataatcatatgtataccaaatgttttctcaattcattttgcatttcatctgttaattcccctttcagtattttgaataactttcaactaagatgctttgtaattttttaaaaaagtaactgtttaatcacataggatgagagtatttggtagatttctagctatttaatgaagatttaatctcaactatgaaagagattgctaggaagcatcatgattctgtctttgactctacctgttcaataatttcagtcagtctcttagataagaacattaatgtttctaattctgttaacaaatgctaaaaataatttatgaatagttattaattccttcaatgaagaaatcagtatcaaaaatatttttaacgtcttggctgcatatagcagttaaaacttgcaaggatactagagaagttctaccattagtttaaataaagctttggatggatgaactcattctttatgacaaccaagatggaagacagagatgactattactcacatattgtctatttcataagaatcacaccctagttacatttctgtttgttcttggtggattgctctcaaatattttattttttatatttcattttcctttcaaattacaaaacttctatccattaatattaaaattataaagtccgtatgtatgcatgatgaattttgaagttggatattttccccatcttccataaaaattatattgcttttagtattaatgaaataaataatggaatggtagttatatttacttttttcatttgaattataaacagagaaatatctatatttcaaaatacttaattatgaaggatagaggctatggagctgctggggaaaagtattcctgtggggctactgattttcagtgcttagcttatcatcagtaacactggaagtagctgatcatgccttggttcttgatacatgtttttgtcattggccatcctggacaccacatgtctgactcctcccttttagattgttttattgattattagttttctctgtgtatcctttacactggcatgtactagtgctcagtcttaggccttcttttcttctctgtctacagtcacttggtaatctaatccagtctcatggcctgaatgccaactatctgccaatgacttcaaaacatataactctagttcagacctctttgtttaactctgtgattgtatttccagctacctagatgaaatttaaatatgaaatctaatagacacaccaagtttaacatgttcttaactgaattggtctcttcttcccctgcaatctccaattctgctttccccgcattattctctatattatcgatggccatattgacatgggccaaaattatattgtgatcctcatattgtgaattcttctttctttcaaattacacatccaaacatcggttcattctttttgttctaccttcagagtttatcttgatactgaccagagggaactcttaaataagtccagtcattttcattgcaacatttggcaaagcatatgtagtgagagtaaaaaaccatgggtgcaaaaaataccaccatcttctgtgtagtaattacttttgagccataagaaagataattggctttgggaagttgtatagggtccacttcaactgaatcaataaattgttttttattttttttaaagatctgtagcaaataattattaatatttgttaaatactgagggtggatatgtgagcactctattattgtacatttctgaaggtttgaggaattccctaataaaggatgattaaagacaataaattaaaacactttccattttgttatcctgtgccagtctgcaccaggctcctaaaggcatgcttatagtctcttatttcaacgcattcttcattccagagacatttttcattcaacattcattgccctaatttagaatcaaaggaaattgaatctaagaaaagcattcatacgctacagaacatccaagaaaaatacgaatgaagaaggacaataagcccatctcatatcacaaatggttatactaacgggaccatgagaatatttgtcatatatttgaagcagaaaaaggtgcttaagatacagaatcagaactcagggtatatagttatggtgaggaagcattctggaccttttataaaaactttaatggatagtcaccactgtctagtagagagttgaattgcctcagagtagtgattactctactggtgactgaaaggagtaaacagaattttaaatatttatcagtaacattgatgaatggttccttctttgggttgaatttggaaccaacttacccctaatttcttttgatgttcttctgtttataattgtctttcttaaaacgtgatgcatggtcatgcatggacataatagtcttgacgtggcctggtatacacagagtgttttgggattgattcagggtttataccatattatatcagctctttaggtgtatgatctcctatagcagcctctgataaatcagcaagagattacaatagatttttagcctctgttctcactggtgggatatgtataaaagggagagtatggaaaggctgggaagaaaaaaaggtcaaatgtgttctttaagttctcctttcatagctacatttgtatttgggaatgtcatgattgggaaacaggccatgaaagaaagaattttgttggtacaaagtacattgttccttttaagggggggcacataattataatttcttgggttttatttatgtcatttagaatgggaattggggagaattatccaagggttctaagtgggggaaaaacacaacaccatcaccacattttgctgatggtgcaagtggtaacgaggacatgaaatccataataagtaaatttcttaattactgtaaagatatttaagattgtcagcctgtattaaaatgactgttttgcacattgctatatttcctgcatctggaacattaacacagagtatacactcagtaaatattgttgaatacattattgtattcatttgacctttaattgaatcatgaaaataagttgcagcagattttccatttctctgactaccagtgctatggtccttgagtagtttgctccactaatcttgtttccatggtaaaatgaatttgcatctactctctaggggtatgtaggaggttggcaacatctctgtcaattgtgaggtcaccagtaagacctggcagtgatgagtgcttccccaaatcacagctgtgcagctttctcagtggtctcattctcttctacttaaagcacataactaggctggaattgcatgagataagtgctgcaaaggctcatcaccatggtgaatggctccaaaaaatcactgagtgactaaccctttaacaactaggtgtacaattgaatacacaccaactcattaagtgctagggtgggtggcgatttggaagccacctttctggttaagaaataatataggtcaaagttagttaatagatttaaattcttctcttaactcaacaatatggaacatgtaaaattttctcttttgcaacaaaaagaagccacgttgttatgactttggagaatcctgatggatgaagacatggaaatgtttctttgctcagctcttgctattgaatttaacaacagcatgaacacatgtgtttgatcatcttgcatagcactactaaaattttaagcctgagcaatgtgggttagacacgggcaggagcttcctccgagtgaactaaaggagagcttactcttttcttttcttcaaagccaaactgagaaggcattaattctgattttgttttttgaaaaaaaaatcaaccttatacaagctttcactttttctttaacctcactagcccttcctccacaatctcctttgctttttctttctcttcttcccagtgttagggtcctcagggattgatcttaggccctgttctgttctttctctatcctcttttactgaataatatcattcagtcttagggactgaaaaatgatcattattttggcaactgccagatagatgtctctagcataaaactatccactaagcttcattctccaactacttgacttttccctttggatgtctcacaaatatatcagagctgataagtgctcatcagaaactttgattctctatccctaaaatctgtttcagctccatgatttgacttttatatctcaattacaggcagctgtctcttccttcttaagtactaaagctagaaactttggagtaatcctcaattcttctgtgccactgttcccccatgtcccaatatcacaccattaatgcatttggatgattgccatctggtttgggtgagaatccaaaataaatgtcagatctgtttacttttttccacatccttagtccagtcaccctgtgttgcctccttagcctagccactgtgatcttgcacctggattattggaactgacttcaaactggcctccctcattctacttttggtcaccctagaatctgttttctgaaaaaaagcaagaatggttttcttcagatttacattagatcatgccatccaccatcatttgcttccaattacacttcaaataaaatctaaatggcttagggtcttgagagctctacatgaatcatgtcctgccaacctgtctgctctgtttttgctgccatcattgtttatgtatgactcctatcactgcctcagtctccacaccacctgtcagtttttaactgagtttggcttgtatgtaggttttcctaatagactttacactaatgacaccattatttattgctttaattactgtagtagcctcccaacaagtcttgtgtctctccatttcaatctttcttttaaattaatctaagtcatatgtacatcatttacaaagctaatgcttactataagaaagaaaatatcctgccccttctccccatctttgacttctgccctacaggagcaataccatttcttgtggtactaagtattctagctatatttattctttatttttcattttgaaaaatgaaagctttataaaagcaatcctgtttcttctggtactaagtattatagctatattacttattctttatttgttactttttgaaatatgttttgctgtgacatatacacatgggacacaaacatgttgttataaatgataattagaagtgtacacctttgtgaacataaagtacatttgttgagtttctcccacatatcttccagaattacagccttggtttatggcatcgctcacctgggacaccatcttttcccaatttaagttcgttttcatatggcaggctccttctttcactttagttattgcttcaaatgccatctccttagttattgagctaccctttctggcttctctagcattcactctatttttttttttttttgatctttctttgtttctttaatactgctttttacaatttagaatttcttaagtgtatttttctgaatacctgatttttgtctgtccttccctcatcatccccactaaatatacaaagtccatgaagacaggggtcattctgttttcatctttgaatcctcaattacttgcctactgctgcatggcaggtatttaataggtatatttataatgaacattaaataatcatcaggaagttacaatggaacataatagatttgggctagactggtaaacaactaagaagtagattttaaaataaattcgctccctatatttaacatgttatttctctatttaaagaattcatagatagcccaaaataataattacaaattattacatgtaacaagattacagtaaggtgaatggatacaagaaagtatatgaaaatagcttctgttgatattgagcaaaaattagaatatacaatgagaaatgagataactatcagaacaagagcaacaacaactaaagcagtcattttgaatatctaaatgtgaggatggggcactcattttccacttgaccagtcttcaccacttcctttttacttcttcaccacagaggccaaagagtagcttctatttattctcatacttgtgatgttgtatatgatagagttgaaaaggcacattttgaatcttttaaaatctctatctctattaaatgtcaaaggaaaagatagaaaaggccagcagtttacaagaaaatgaagagcagccatatatttttcatttgtaggagtgaacttgttcctgtgtaattatgtaagtaaaatatgactgtgttgaaagatataccacaagaagccctcatgaagcacaccatgataaaatttgtaagcagtgtccaagaaaatatagatggtttaaaaaacaaaggggacattcatcagggattgtttttgaatatgaatctagtaagtgaatctgctatggaatgcccctgggtttctttctgataaccatttcacattcccacttcccatacatgaagtctcttctctgaggtcccctcatttaaaaggccatttctacatcactctgtaacccattcctagtacttggcactacttgaattcatattatacatgtatagcttttcattaagtaaataagactcaagggtcataataaaactcttgcccgcccctcctagttttatctctgttgtttatttgtaggttctgagaagacttctggtaaatttagtcacaaaattctggatttaatctttcaagtatttattatataatcatcaaactgtcaaaattcacataaagttaaaatgaatcagccacatgccctccgcattcaggctttcttagaagaaattacatccagtgaaaaagggagaatgaagtcagagtccttgtcatttctgcacctatgactttcagtcctcctattcagtgcactgggctttctctggctcctctagcattggaactgttaacggacacccagaaggaggggcaggttcttaggtgacagatggcattttgggatattattgctgagctccgcatttgccaagtgctttaaatggagagtctttcatgggtcacatttgtggcttcttgggagactcttttcttcagagatgctcctcagtctctggggatctcagtcttttcctgtgaggatggtgaattcatcttctcaggtagtcacttgcaacgcctgccttagtctttgggtatctgttgggatactttctggctatattttcatctttgttttaattgcaaaatagaacacagacagaaataagattacaagtaatcaacataaagcttagcaacagattatgaagcaaatatagatctttttgacccagctggataaatggtgcatcattttctttcctagagtgtaagttgatgatgggccttgaccaccttgttcactactgttccctgagctctaactgtacaaagttgatactaataagcatttattgaataaagagttggatgaaaaaataagtaataaaattatgatatatttagaggataaactattatttggcaattaaaaaacacacaaagatcgcataatgctattaagaaacaagcttttcttaaatgggacaaagtagaatataaaattctaaaatatatctatgcctgtgtgtacatgcaaacgtatgcccacacacagatacatatacaatacaaatatatatgtgtatttaaattgactagaagtatatacatacattcatatgtaattatcctgtatgataggatttagaagaattttttaaaccatatttttatgttccactacgtttaaattctggttgtatgatcagaaaagattgtaggaaagaaaatagaaaagagaattaaaagaaaggaaaaggaaaaacaaaaaccttgaaatattctaccaagtctgccatgggagaattgttggggcatccaccactgaaggaagcctggaggtgaaaactcagtccacttagaaagccagtgtgcctttggcagccaagaagtctgatcatatagaacagtcagctcaagataaagttcagagccttaatgtactatttttgtcttttgctttgggagggatggggcctggcctggctattgatatcaaattttggatagctaccatctgtgaggtgttatgcttgacgtccaaacccttagtgtacaattttttaaagatgaggatttttttttgaaataacacttatatggcaggcctacccttttgcagaaagtttcacaaaggcagtatgtgcttgaaaccagacagcctttcatttgaatcctgtctttactacatactgatttgtgatcttaggagataataaatctttttgaagctgacttattttttttcaattataaaatggatgaaattagcgtgtgtccaaggctttatttatagattaaatgaaataatgcatataaaatgccttgtaaacaggcctattattatattattgttttcttataaatagttttaaataggcttgaaaaagagtaaaggtccatataatttttagcttgggtaactaaaaaaaggtacagccataaacagatatacaaactttgagaggtggcactagtttggaaagaataatgatatgactgaagtgaaacaagggaagtgagagaggagagttaatcttgaagggtggcggtggactatgagtgagggggttggggaatcatctccataaaggaggttataaaaccattgagtgtgatagatgcagagaacaattgctgatcaaaaaccagccttgggatgagaaacatgacctgtttaagggaacagaaatagtttctagaaacgaaaaggaccagggcagtggaaattcaaggaggagaaaagtgggcaaggatcaaatgccgcagagaggggaataaaaaaggaaattgtgagcaacctcagaaaaatttctgaagtttggtgatttgggggtggggactagaatgtaagtaaaaatttaagtagagtgtaagtagcaagcaaagatagcgtgatgtgtcaaaaccaaaaattaacatggaaattgggaagcctacactctaggcctgacattcacattaactctctgtataattttaggcaagccacgcaatatttctaaggattgattttcgttattttaaaactcctgtaatgctcagatgatttctaactttccttctatcattggagttttatgattctctttggagccctttggctaggaaagaaaatggaatgaggttaacaatgtgatcatctgaaaagttttcctaaagatacaacttgggcacacaaggaagccaacattggaaatgcccagtggaagaaataaaattctaatttcctcttatgaaatcacaggtggagtgaatacctgctcttcagagcagtgatggatacattttctgttatctcaagaaggaagactacatttgagcacctgttatatattagaccttatgtattgaaggcatgaagatgagcactattccaaagcctcaagtagctcatggtctaatcagaaagacatgaaactataaccacagtagacatattagtgcaacaacagaaaatgtctggtgtagaattagagagggaaggcagtggttactttggagaaaggacagggtctgcttgattttgaagaattgatagctcttcacaggcacaatggcattctggaaagagaaggcagtatgtgcaatatgccaagatgtaatcatgcaactaaaggttattttgaaatgtgtttgttcacatagtaaaagcttgtctgttattgttatatatgaagtttgagtagtaaaagtaaaactggagaggcagacaatacaattctcatagccttataggcctcgtataccttcatgaaggattttatctttctgagcatactgtggaaacattgaaaggatcatcaggaagagtgttttaagatgataagacaataggatagatatggtgtcagaagtgtagttttatacagatttatatgtagatatagaatacacaaatgcatgacaaatcactcccatttacagtaatactgaaatgatattttatttgaatatatcataagaaaaacatgaggtattataatttatgccaagccatatgtcatgcctacactttgaactatataatgctttataatgagatatattaataaactataaccttatgagaaaatacttaagaaaataaagccaggctgggtgccatggctcacgcctgtggtcccagtactttgggaggctgaggcatgcggatcacctgaggtcaggagttcaagaccagcctggccaacatggagaaactccatctctactaaaaatatgtgggtggtagtgggtgcctgtgatcccaactactagggaggctgaggcaggagaatcacgagaacccaggaggcggaggttccagtgagccaagatcatgccattgcactccagcctgggtgacagagtgacactccatctcaaaaaaaaaagaaccttacatagaagttcagatcatgtactgcatcagacatttgtctaacatgtttttacaagcatatactgattctaaagcctttaagcaacttctcttaccactgtttacaaccgaaacacttctgcttcttcgagtgtctcgctaattctcggatgtactttatattgggacaatagacttatatcctaagatattcaatattcaagacattggctttccttgtcctatcaagaacattgtcatattttttcaattatatgagtttattttattttctggctatattttcccatttctttgctcaaaccagacatcttccacctgttgcctagactctccatcctatttgcccccactcataatgcctcctctataaggagcatccttgcacttgtcttatgcaaatcctgctgtctctcaggacctttctcagatcttaaatttataatgatctatcacctttcacatgtccatgagcacttaggacatttagttattatgatatgctatatatttttaaattactttaaatgacaaaaattacaaatacatacatcacaaatgcacatatttttggtgtgcaaaatgttttgatatatgtatacactgtgcaaagattaaatcaattaatgtgtctgttatctcacatacttatcagttttttgtgatgaccacatttaaaatctactctcttgacaattttcaaatatacaatgcatcatttttaattacagtcaccatgtcgtgcagtaaatctcttgaagttattcctcttgtctaactgaaattttggatcctttaaccaacatcttcccaaactccctttctctccttctgctgaccaccattctactctctgcttctatcagtctgacttttttagattttacatgtgagattgtgcagtatttgtctttctgtaccttgcttattctacttaatataatgcccttcacattcatccatgttgtcacaaatgacaggattttccttattaagtctgagtagtattctgtctacacacacacagacacacacacacacacacacacacacacacaccattttttaatccattcatctgttaatggacacttaggttgattccacatatcgactgttgttaatagtggtgcaataaacatgagggtgcagatctctctttgacatactgatttcatttcctttgaatatatacccagaagtggaattgctggatcatgttttttaaaaataggattttatcacgactgttacaatattaagtacctaatgaattctcaatacgtatttgttcaactgagcctcaaaacataccttaagccagttcagtgaaactttatctaaaaatctgaggttcaggaacatgaagaaaattgcaataaatgagcatggaagaatgaagagaaaacttcagataattgtagtagtactttggttatgtcagtgatttggaagtgagatagttgaagcgaaatagtcatccccatagaagtggggaaagaatggagagtgttatattgctttctgttccttctaactttttagttagctcttatatgctgtaggatctgtttatctatttaatagcccatagttaacttgaatttgaataaatgaaccatttataattaatgaggtaaagtaacaatatatgaacatccctgtacattgtccaaatcaaattttatgttttgattagaagttggttttagtgtcagcacatctacatggagataaaagttaatggttattttaaaaagcaccgagccacataaatagagaaaaagaaatttcaaccagtaagaaaagaaatgactggtagcttattttcacaaaagcaatgctaaattgcaaaatatggaaattcttactaaattgagaaatcaaataacattaaatgacaaaagaacagatgtcatcatataagaaaatgcctatgaagatagaaataaattagaaaacaactgttaaaccttattttacatccagatatttacatgaaatgactcgagttaaaattattttgaaaaatttaaaaaggaaaatatgaaaaacacttatatactctgcatttattttagatagtgcattgtgtcatattaattcatataatcttatttcttgctaaaattcagaggacgatattcgcagtaaagcaaaggctgcctaattgtggattgcccagcacaggggcacttgtgcagaaaggttaatatgggttcatgttctttcatagcttgtaaaatcacattgcagataaaacaatttattttgttaatggaagaagtgagccctttgcggggacacagaaaacctcaagatttcctataattctgctttaatatgagccagtatcttgaatgacacatattcatgctagggcactttgtgtgccataggatagtattctaggcccagaaagaaagttcatggtatgactcttggtgctaaatatgccagagtgaactgagttggaacacagtggtcagactataaacatgtattgaatgaatgagtcaccacttataattattccaacttgttttttcctttttaaaagtagctttcttgtttttaaaagtagctttcttgttttttttttattatagtttaagttttagggtacatatgcacaatgtgcaggttagttacatatgtatacgtgtgccatgttggtgtcctgcacccagtaactcgtcatttaacaaaaagtgtctgtagataaaattctaatacaacagaaaatgttatgtaatgaagaagcttccaaatcctaacaaaacaacaatataatttatttcagactaatttacctgctaacagggatacaaaatttaataaagttagatcctttggactttgtgagtttttcagcctgtactcaaatgtttggatgcttatatttattatgattgtccttattattaaaattaaagtaacagcaaacatttattgactagttacccattatcagagcattacccatgataagagcattgctttctgttccttctaacttattagttagaaggatatgtgtatttttaaaatatatatatattttttaaaaagttatcctccaaataaccctatgaagttggggtttggataaaggtgctgtaactttcccatagttacacagctagcagtaagttatgaacccagttcagaatcttttcttggagtcattaaattttatgtgatagtgtgcaattaaattttataaggtttattgttataaacctaaccatgtttataacctggttgaaaggatgtatagaatcacaaatttatgattttcagaaactgagcatgtttgcctgagctgtgctgagcagcataattcttattttaatcatcagcctcactgtcaattttattggcaaccttgaaaacttaatgactctcagaattacactaatccataagacaagaataacatatttctttatttttagcctagatcaataatgtgtaacacaacaccacctattctcaatttatgtgtagatgtactacatctttaatggctattatttaataattttatctttaatattttcttgtttctcattaaattaagctcaagggaaaaactgctggatttgatgtaattaccttaaaattcaagctagtttcagactgagagaagtaaaatatgtatggaaaatgaaagaacttacttgaagttatttgaaggcatattaaaattatacaaatatttggcccacatatgtgtctagtattttaaaggttcattagagtaaatctttcttaattatccctacccctgaatatatttgtgtgcctgtgtacgtgtgtgtgtgtgtgtgtgtgtgcgagagccagagtgagatctagagcgagagagagagagagagagagagattgagacatagggaaagcaatagaggcagagagagaaagaaagggagagagaggagggggacagatcgaggtgataaaattgcttattctcgttcttgataattttttagtgataaaactcattcaataaaatgagattgattaggattttaagatttaccctcgatttactttatttggtacagaatgcaatgaggtagaatattggcagtggaagatgcaatactaataattcaaacaaattaaaaaaaattctgctatacttccaaagaaaacatgcatttccttcaggatatatgtatttgtttaattttcactttagaaaataattatattattattgtgccacttataagtggatcaaattgaaatgaaatatacataaaattcatattgataattcaaaacagaattaagaactttgatattagcagattgggtattagtaatacaggttttagtatatgatttattcaaaactatttgctaaagagataatatagttgaatgtatgctatctatatgtattaattatacagagttaaatactaaaaatggaaaagatcaagtcatagcatgttctttcatgtggaatactttcctagttataatgtaaatttatattctagaaaaggaaaggaagaaatgactaggcttagcctcaaaatattacaagtatacctacttgttataagtactttttattgatcataactgtattatacagtttcaaccctctgtctcacaattggatgacttttaaaacatgtcactatgtgaaatgaaacttgtttatgtaagtaatgcttcatttttctctaacttattcttcaagggcttttaaaatacgtagtagaagactttaaggatattttatatattaatttgatgcttcttgcatttgtctcttgcatttgtcttaatatgttatatgaattactttattaaataatgactgtcaaaaatttggactgtgccatgtatgcaattaaaaactgtattgctctttctgtacatgctgtacatttaagtgaccccatgggtctcccaaagtgagcctttaacattccaaaatttttactgtgcatctgttgctggcgtctagcctcccacccacacggattaagactaactaaatgaagtttatgttagtgcaataaagtacataaagatgaagtaataaaatgggaagatagttaccttgctagtggggttgctaagttagtttcactagaagactgtatgcatgtttgttaacaaaaacagaatgtatgaatggaagaatctaaaagtattttttcaaatgatatttcttacatatctttttgtgttatatattccagatgggatttatacagctcaatgaggacttcatatttattgagccactcaatgatacaatggccataacaggtcacccacaccgtgtatataggcagaaaaggtccatggaggaaaaggtcacagagaagtcagctcttcacagtcattactgtggtatcatttcaggtaaatgccttctcctgaaagagttttaagtaaatattcaatgtgagatgactactttaaaaaaactctctcgtctatttactagctttacttatttttaatgtagaatcttttaattagtaacaattaaatgtatcaattataggattatcttttagttttttatgaagcactacattttaatatcaaaaagtagaactcaaaaggactttagagatgaacatataatatatcctatacttttcttgaattgtaaagtgttcctcatgggatactgttcactttactggaatagaaatgacacagataattccagataccctgaaactgaatactgtgagctcaaagccttaatttagtccacctctgtgaaagcatcatagatatctcttggactagaagcatcctcatcttctctttctttttcccatctaaaatcattttggaggttaaaattagctgcagaataggaagaagagtaaagatttatacgttcgaattttgttctcagtattcaaatcccttaagtctggaacttttcagaggctcataaacattcccaaccatcaaatccttggctctttttgtctgccagttctttacaggaacaaaatgagggtgactgtttcatgtactttcttacttcccttaggcagagatctgtggtgtttgcaagtatggtgaggaaaatgaatgaattctgttacataagtaggatctgaaagtcatagctaatattcagaaaaaaattaaaagttttcctaggaaaaatttttagacatggaatccagacatctcagggtatttactgatctaagaaatatttccagttagaatctgaggaaatataaatttattgaaaaattttcagtgtaaggactttaaaatttgacttgcagattttaattgtcaatgtagcttgtatcaagatatcaattctaaaattgattatgatacttgaggccagattagatatgtgcatggtgacaataaatcacatttgtagagaccagaggatgtctatatcatcgattgcctaggatgttcggattcagaaaaatattataatatatttctatttagaatatatttttatctcaaattaatctgttacttctgttttcttttgtaaaaagtcatgatgtcagtctgtacaagaatcatcatcaaaagcagttgagtctctctccacgtcacagtattccatgtccacaaaatcaagccagtttaaataagacatatccctcttctctattacaaacactgtagatataaaggagaaaaagtcagctgaacaaaaagtgtagcattacgaacaagcaaaagaaaagcttctgtattgggaaatgataaaaacgacagctatagtttggatttagtccatttaaggagattgctttgtacgagttatactgaaaatctgcactgtgtaacttttgaataattgttaagttccagctgttctaattactcatgtactctgatgacacaaagcaggctctgtatgccattatgcatagagaaaaggtttctagaaaattctgaattatataggttaataaaggataaatacagagttcatgtttggcaaatgttgtgcataaagtttctgagatatatatatatatatatatatagtaggcatgattgttacatgtaaatgttgacctacttgggccaagaacttgcatgtaaggagtgctaagctatcatcagctaaatgatttactgagcttacctattttcagatgctttttgagggctcagaattttaaaaatcatttaaaaattaggaatctgtgaaataaaatatttatttacgggtactgacatgtccaattgtagcctttctcttcttacttcaggctgttacagtaacaaattaataacatggtccaaattttgataatgttgcagtatttgactctggaaaatgagattattaagtttgcttgtcttcaacttggtctttgtactctcttagtgttttcaaggttttaggtagattatgtttatatgtattgcttacatgaatatttttttccaaacagggattttcctgttttaaaatgactttgttgtgttattgtactagaacataatgtaaaggaggggaaagcacatgagttttagagtcagaggcctcaggttcaaggcccagctttagtctcactccagcctaggtaatcttgagcaattcatgtaacttttgaaacttagcttttttgtttgtaatataagcacaaccagtcaccttacaggaatgtggagataaatgacacagtttctattctcaagaggtgaagaatatattattttaacaaactggtaactcagcaattacaccatagtgtgataagaactacaatagacttagcatacaagatcccaagctcctgaaaatggacaattgagtctcaaagatcaggtaaaacttattaagactagagggagaaaagggaacagagtccaggttgagataatggacttcgggatcagactgcctgtgttcatatccctatctgtctgtgatcttgggaagtttactttctctctcaaaagattcacttatcatatacaaaatgggaatagtgatacttcaacctcaagactgtcctcagaattaagtgacattatgtattaaaagtgagaaacatgaagtttttagtgcatgctgttacatgttaatgggtcaagaacatttcaggcagaaggaataacacatgaaaaagtataaaggcatgagaaggcatcaagggaacagaaaccaagtttctgtacttgataagacacagccctggaaaagtggtcatggaccagaaactgaagggacttgagtgccctggtaaggactttatcttcaagtgacattatcagtttgtattaacattttagtataaacgcatgagtatgtctaagactcagtaggaaaagagaagagatttacagagctgaagacaaaggtttaggcaggatgtagagatcatctatctccattcttcgagctgacttaaccaggccactactgaactagttcccatactccaaccataagtattgtggagattattgtcaatctgtggagggcattagagagaacacacactgagtactggtgaataattctacatttcttctctgactggaagtgtacggtatcaactgtgttgtttttatacatgcatttggatacaacatggtctaaagatttaggagatgaagaatgagctctgcataattgtacataataaaaacatcaaagagagcaacttaataaaaagattacttcaatatgcatgattttcacagacaatggataacttatatggcagagtcagctgtgaagttgagattctttagaaacctagaatcttccaggtagcctatttaagtgaaaataaggacacaggaaactgacagattggggccaacacagctgtcaccagctgggacactgagggaaatatacttttctaactctctcttacctgatctatctaccactcttggtacagataaaaagcctctcattttataaactatccccctcattttataaactatcctccttttacatttcttacatctccatctctgtctcttctatgggaatgtcttcttccatctgtttacccctgaatacaggcatttctcaggacttcccttttttttctacttcctgttccacctactttcccaggttgatataatccgaagccaatgtgggttcagctttacattgattaattccaaagtgtctccatttcaatttttctcctgacttccatatatatgtaatagtaacttctattcagatgtcatcaagcatctcagatttaataactctgaaactgaacccatcatctctcctcccaaaggcctcttccaatatcctcgactatttatctagtcacttgaaaattaaaaataaaccccccaaccaaaacacaagtaacaactaaaaaaaaaaaaagtattaatctaaccttctgtctttgttcctctaagtctgattgagtttactcatgatgctgtctacctcctaatattttgcctgtcatctctttctaccacttctgtgttattattataataagaacatttatttagccagtcacagtggtgtacctatagtcctagctacttgggagcctgaggtgggaggatcatctgtgcccaggagtttgaggctgcagtgagccatgatcacaccactgtactccagcttgggtgacagagtgagacccgatctcatctctaaaagaaaaaaaaagaaaacacatttctataaaatgtaccatgtgccagttcatgtagttatgttacatgtgttattttatttttatgttttctataatcctttgaggtagatagtatttgtatcctcatttcttattttttttaaatttttttgtgggtacatagtaggtgtatatatttgtcaggcacatgaaatgtcttcatataggcatgcattgtgaaacaagcacatgatggcaaatggggtatccatcccctcaaccacttatgcgttgagatacaaataatctaattaaattatttaagttatttaaaaatatacaattaagttattattgactatagttaacctattgtgctatcaaatagtaggtcttattcattttttctaacttttttgtacccattaaccatccccacctcccctcaaactcctcactacctttcctagcctctgctaaccatccttctactgtttatatccatgagttcaatagttttgatttttagatccgacaaataagtgagaccatcccatgtttgtctttttgtgcctggcgtctttcacttaacataatgatctccagttccatccatgttgctgcaaatgactgtatctcattctttttgtggctgaataatatttcatttgtataagtaccacattttctttatcagttcatctgctgatggacacttggattgctcccaaatcttagctattgtaaacggtgctgcaacaaacatagaagtgcagatatctcttagatacactgatttcctttcttttgggtataaacccagcagtgggattgctggatcatatggtagctctctttttaatgtttgaggaaccttcaaactgttctccatagtggttttactaatttacattcccactaacagtgtacaagggttcccttttcttcacatccttgccagtatttgttgttgcctgtcttttgaataaaagccattttaactggggtgagatgatatctcattgtagttttgatgtgcatttctctggtgaccaatgatgttgagcaccttttcatgtgcctatttgccatttgtatgtcttcttttgagaaatgtctattcaaatattttgcctattttttgattggattatgagattttttcctacagagttgtttgagctatttacatattctagttattaaatctttgtcagatggatagtttccaaatattttctcccattctgtgggttgtctccactttgttaattgtatcctttgccgtgcagaagctttttaacttgatgtgatcccatttgttcattttttgctttagatgcctgtgcttgtagtgtattactcaagaaatctttgctgagaccaatgtcctggagattttccccaaagttttcttgtaatagtttcatagtttgaggtgttagatttaaatctttaatccattttgatttgatttttgtatatggtgagagatagggataaagtttcattcttttgcaaatggatattcagttttcccagtaccatttatcaacaagactatcttttccccggtgtatgttcttggcacctttttcaaaaatgagttcactgtaggtatgtggatttgtttctttgctttctgttatattccattggtctatgtgcctgtttttatgccactaccatgctgttttggttactgtagctctgtagtacaatttgaagtcaggtaatttgattcccccagttttgttctttttgccgaggatagctttgtctgtttggggtcttttagtgattccatataagttttaggactgttttttttttctaattctgtgaagaatgtcattggtgttttgatagggattgtattgaatctgtagattgctttgagtagtatggacattttagcaatattgattcttccaacccatgaacatggaatatctttctactttttggtatcttcttcaatttccctcatcagtgttttatagttttcattatagaggtctttcacttctttggttaattcttagatatttaattttatgtgtggctattgtaaatggggttatatttttaaatttctttttcacattgttcactgttggcatatagaaatgctaatgatttttgcatgttgattttgtattctgcaactttactgaatttatctgttttaatagttttcttgtggagtcattaggtttttccaaatataggattacattatcagcaaacaaggataatttgacttcttcctttccaatttagatgccctttatatttttctcttgactgattgttctagctaggacttacagtaatatattgaataacagtggagagagtgggcatccttgtagtgttaccgattttagagaaaagtctttctgtttttcccctttagtatgatactagctgtaggcctgtggcgtatgatttttattatgttgatgtatgttccttctatccccagttttttgacagtttttatactgaagagatgttgaattttatgaaatgctttttcagcatcaattgacatgatcatatggttttctccttcattctatttataagatgtatcatgtcaactgatttgcaaatgttgaaccatccttgcctcccagggatattttccaacttgtcatgatgaatgaactttctaatgtattgttgcattcagtttgctagtattttgttgaggatttttgcatcagtattcatcagaaatattagcctgtagttttttttttaatttatgtgtctttttttcttttcttttttttttttgtatcagggtaatactggcttcctagaatgactttggaagtattccctcctcttatatattttttggaatagtttgactaggatgggtattagttcttccttaaatgtttgacagaattcagcagtgaagccatagggtcctggacttgactttacgggaagacattttattatggcttcaatcttgttacttgctatctgttcagatttttgatttcttcctgtttcaatcttggtaggttgtatatatctaggaatttgtccatttcttctacattttccaacttattggcatatagttgcttatcgtggctactaatgatcctttgaatttctgcagtattggttgtaatgtcttctttttcatttctgattttatttgtttggaccttctctcttttactcttagtctggctaagggtttatcaattttgtttaacttttcaaataaagcaaccttctgttttattgattttttttgtattttttatttcaatttcatttatttctgctctgatctttattatttcttttattctaggtttaagtttggtttgttcttactattctagttcttgttaggttttttgagatttttcctttttttttttttttttcgatgtaggcacttataaacttccccctgagtactgctttggctgaatcccaaaggttttggtatgctttgtttccattatctttgtttcaagaaattttccaatttccttctcactttcttcattgacccactggtctttcaggagcatattgtttaatttccatgtatttgcataatttccaaaattccctcttgttatcaatttctagttttattccattttggttagagaagatgcctgatattatattacttcaatttttggaatggtttaatgcttgttttatgatgtagcatatggtctttccttgagaatgatccacatgctgaggaaaagaatggtattctgcagctcttggttataatgttctgtaaatctttattagagtcatttggcctatagtgcagattaaatctgatatttcttggttgattttctgtctggaagatgtgcccagtgcttaaagtggggtgttgaagtcttcagctattattgtattgtggcctattctctctcaatagctctaataatgttttctttctttatatgggtgctccagtgttggttgcatatatatatttaaaattgttatatcctcttgttgaatggactcctttatcattatatagtgaccttctttgtcccttacagtttttgtcttgaaatctattttgtctgatataaatatagcaactcctgctcttttttggtttttattggcctggcatatctctttccattattttattttcagtctatatgtctctttataggtgaagtgtgtttcttgtaggcaacagatcaatgggtcttattttttcatctatttagccattttatgtcttttgattagatagtttagttcatttacatttaatgttattattgataagtaaggacttatactcctgccattttgttatttgttttctggttgttttgttgtcgtatcttccttgtttcttttcttcctgtattcctctagcaaaggtgattttctctgattatatgatttagtttcttgctttttattctctatgtattcaccatatgtttttgggtttgaggttaccatgaggttgcaaatactatcttataaaccattattttaacctgataacatcttaacagtatttccacgaacaaataagcaaaaagaaatccaacaaaaactctctgccttaactttgtaccccaactttttaaactttttttgtttctatttatatctttgtactgactatgtcttgaaaagtttttatagttattagttttgattgtgtcattgtttagtctttttacttaggacaaaagtagtttgcacaccacagtaacagtgttataatattctgtgtttttctgtgtacttactattaccagtgagttttgtaccttcagatgattatgtattactcattaatgtccttttctttctgaatgaagtacctccttaagcattttttgtaggacaggtctggtattgctgaaatccctcagtttttgtttgtctgggaaagtgtttatttttccttcatgttagaagggtatttttgccagatatactattcaaggggaaatttttttttacttcagcacagtacatgacacgctactctctcctggcttgtaagttttccactgctgccagtgtattggagctcaattgtatgttttttgtttcttttctcttgctggttttaggattctttccttatccttaacatttgagattttgattattaaatgccttgaggtagtcttctttgaattaaatctgcttggtgttctataacctttttgtatttggatatcggtatctttttctaggtttgggaagttctctgttatttctttgtaaaaactttctacctttatctctttttctacctcttctttaaggccaataactcttatatttgcccttttgaggcaattttctagatcctgtaggtttgcttcattgttttttattcttttttgttttgtctcttctgactgtgtgttttcaaatagcctgtcttcaagatcactaattctttcttttgtttgttcaattctgctattaaaagactgtgattcactcttcaatatgctaattgcatttttcaactccagaattcctgcttgagtcttcttaattatttcaagttcacttggtgttctatcactctgtggctctgctggtacctgaagccagtaagtctcaaaggttcacccaaagtcctcgatgtagtacctgggtgtcactgctggttattcagcgcttttcagttagtaggtggcaaatactgccaggactgggttcctttcttcaaggcagtgggttcccttctggcccaggggatgtctggaaatgtcttttgggagctaggacctggaatggaggcctcacaactctaactggcaccctatcctgtgtggttgtgctcatatcctagatgtaagacaaagtcttccacacgtttccctctcccctcctcaagcacaaggaaggagtctctttggagccaccagctatgcagcctgaggttaggggaggggtgatgccagaactcccttggccatcctagctggtgtctcagtatattgtgtgtacctcctagtccactgtctctagcacttgcctaagagttgcagtccttatggcctagcctgcctttcaagttttcttggaggctcagagtgctgtagcctcagtatcaaggtttataggctgccctccctattctcattttataggaaaaaaaaaaaaagagacaggaagcggaaagatttttaagaaatacacaagggatgatgtgattcccactatgccattttgcataccaggagaccctggacccttgactctacagccaatttatatattgcttggattactgcagtttattgccttctctgtgtcttcttgatttccgtctaaccctctcataatctagtttccaatttttctaaaaggtgcattttctgggattcttcacaacttcagagtaaaattcatactcttcagctaggcgcacaacaacctgaatatggtaagtagattaagtgcaccaaaatcacctggagatcaaagttaaaatgaagatttctggatcccatccagatgcactaagtcagagttactgaggccgggacccaagagaatcagcattttaaacatggaccccgaaatgtgatttttgtgcatatttagagaaacatctgagtttatagagatctttcatttctatccctatgtaccatactccttcctgcctctaagtctcctggttttcttcaaaactttctcttcttttcctttaaccttctcatcctccaagacttagtgccttagggaagtccttctgaaccccctggatgctactttccctaagcctttccaagctattgctttgtagtgctaccattgcattttgtgcatgtggtgttacacactagggagcctagtaaaatgctggatataaagtttcttcacgttaattccataaatattatttactgcatgccataccctggacacataaatatgagtaacgtcagcctctaaagacaaaaatatgggaagacacaatcttctttgtgaaacctaagagagtaagatgacatttcaatgataggaaagataaacaatgtttgtaaacaccttgaggaagaatttgtttccactaattattattatttggacaataattattcagagtcttactctgttaagagttgagataaatacattttttccaccagatattttgctatccagttgtatgtatttggacgagtcatttctctgccaattggagtagatacccatgattctgagattcatttacatgatttctaatgagtctgaagttgtaaaattgttgtattttattatctcattttctaaatctgcatggttttctcttatctgctgaagctcatcgctcaggaccctaagtctcagctctgaatgagagctcaccttttttctatctcctgtgatgccagctccatgccctaatttgtctcttctctgaactccatgaggttttcccagtgatactgtgaatgagatggtcactgtagtgatatattttatatgcttatagctttctattttatagccttctagaatggaatccagttttctcttttacaaaggaaaacatctttgaaggaagagattttcatgcgggctgtggcattattagattgcttaaatattgcagtaacaaaatagttgctgtaggaattttcttgagttctgactatcaaaaaatagttttaatatgaccagtgattatttactctaggttttagtaaattttatttgataatcaaaatgtaatagtttgttaaaagcaaaatttttaccgagagcacagagtatacatctaggtgtacctttaaacccatgtaagtgtgcatgttcccatttagagatcaaataaatatgaagattcatttccatattaaaaatgtcatcctagtagctaacatatttcacatttaatatatgaattagatattgcaataagcaagttacatatacatgctcacatattcctattcatatacaatttttatctatacaacaaataagtagaaaagtaagtttttgtcccacagtcccaaagctagtaagtagcaaatccaagatttttatctatgcattttgaccccaaagaattggtttaacatcccccagaaatgttatcttccaatgtccacctaagctctctatacttcgtctagcttctagcctataggatgaaggaaggaaagtaggagcaagcaattttctttaaagggtgacccaaaagttttacatactagttctgttcaaattccatgttttactactcagtcacataattacactcagttgaacagtagactgagaaatgtttctgggtgcatagccacacatctaaccaaaaagcagtggttgagtggggatgtggttaaggagttttttattactaaaagtaagaaagggagaatgaatactgatagacaattaatagtctctactacagcatctcatccagcaatgaagacaggaaggtgataactggaagaaagtaaggaaaatgtggaaaagtatctaagtagaaggaggtgtctctttttagttattggatgtatccatattaatctcattcacttggcagaagttgacactggtgagaagctatcacttgtcacagttggtgaatatgtgctggataatactcagattctcatttcccttgaaggccaattatatatccatctagaaaggtgatgttgaaaaaaaatatatatatatatacacacacatatgtatatatgttagaatgtaagtatatacacacacataatatataaacaacatatgtatgcgtagttgtatgtgtgtgtgtgtatatatatatatatatacacacacacacacacatatatatatatatatatatatatatatatatatgatcagtttggtctttggtattaactgctggtactgaatctggatccataaagtttacttttaactatagtgattctgattcagatggctagtattgtttttgtcatcttgcattgacttgttatatgatataaataaggaatatttgcattaattgttacaacacttcagttaactttgttaactgattatacatgatatttgagtaaaactggatttattacatatttttaaaatctccatcattgctagaaaaaatgagaaacagtaacttatggggatagtctacataagattagtttccagcaacagtggtgggatccggttcttattagatcacagagctgacaggtgggcatagaagtcataatacaaaggaaacagtaactcaagaatccaagagataaggctgggaacagtggctcacacctgttatcctagcactttgggaggccaaggcaggcagatcatctgaggtcaggagtttgagaccagactgaccaacatggcgaaaccctgtctctacaaaaactacaaaaattagctgggcattgtggtgcatgcctgtaatcccagccacttgagaggcagaggcaggagaatcacgagaacccagaggcagaggttgaagtgagcggagatcgcgacactgcgctccagcctgggcggcagagtgagactccatctcaaaaaaaaaaaaaaagaatccaagagaagataaattaattctgtaaaaatgaaaatatgttagaggtcaaagcaaggtaggatatgtggttagtagaataggatagaatagaagagaataatagaatagaataggcaagctaaaacccaggtacctggtataagactcaaggaatttatcagaaaccataaagatagattagaactgtgagaacacatatcctgaattcaaaacacagttagagacatacagggaatcatgactaattgaatatacatgtttcactccactcttgaagagacttcactgaatttgtattaaatagtaaagaaatataaaaggtgccagtcaacagtgcaagttgtggaaagatgatagcagcttagagacatcaacagaatatgataaatgacaaggagaggggcaagtggtagctgatttaacaatataccatggagattattcttcaactgtagaaaattcttaaacttgattgtacacatgaatggctgcataatgtgacatgtaagttacacctcaataaagctgttataatcgcaaatttattattgaagcaccatgtgcatacaggaaattgcagaaacagtatgttcaactgctgaaatttcccagtgtgaacataaccaataactaccactgggatcagactatagagaatacctaggaattcaacttgcaagggacatgaaggacctcttcaaggagaattgaaaactactgctcaaggaaataagagaggacacaaacaaatgagaaaaaaaaatcatgctcatggataggaagaatcgatattgtgaaaatggccatactgcccaaagtaatttatagattcagtgctattcctatcaagcttccattgactttcttcacagaattagaaaaactactgtaaatttcatatggaaccaaaaatagctcgtatagccaagacaatcctaagcaaaaagaaaaaagctgggggcatcatgctacctgacttcaaactaccacaaggctatagtaaccaaaatagcatggtactggtaccaaaacaggtatatagaccaatggaacagaacagagacctcaaaaataacaccacacacctacaaccatctgatcttcgacaaacctgacaaaaacaagcagtggtgaaagtattccctatttaataaatggtgctgggaaaactagccatacgcagaaaacagaaactggaccccttccttacacactatacaaaaattcactcaagatagattaaagacttaaatgtaaagccccaaaccataaaaaccctagaagaaaacttaggcagcaccattcaggacataggcatgggcaaagacttcatgactaaaacgccaaaagcaattgcaacaaaagccaaaattgacaaatgggatctaattaaactgaagagcttctgcatagcaaaagaaactatcatcaaagtgaacaggcagcctatggaatgggagaaaagttttgcaatctatccatctgacaaagggctaatatccagaatctataaggaacttaaacaaatttacaagaaaaaaaaaaaacatcaaaaagtggccaaaagatatgaacagacacttctcaaaagaagacatttatgcagccagtgaagtggcacagcacatgtacacctatgtaacaaacctgcacgttctgcacatgtatcccagaacttgaagggaaaaaaaaaaaacgaaggaaaagaaaatatcaacaccacagatatctcccttgtgcccatgcccaggctctaatttctcctaccctaagatattcactgagttggtttttaagagcatttcttcccaggctttgatgtgtctttaaatggaatcatactacctaatcttttgtacttggcctcttttcgtcagtattatgtggatgaacctcattatttgtgagattcttccatagtttcacatgttacagcagctggctccttttcattgctatatagtattccattatatgactattctaacatttctttatccatatactattgatgattatttgaattttaaaaatagtgccactctgagtagtttgtacatgcgatttgtatgcatttctgatggctgtatgttttagatcattgattaataggtatgcaaatattcaactttagtagaccctgcaaactaggtttacaaagtgtttatcccagtttaatctctcagcgtgtatgcatatgatgcttctatttgtccccacagtcttgtcagcacttgatatagtaagtgtctttaattttaacttattccagggattttaatttatttaatgtattttggttttaatttgtatttgcctgaagaccagtgaggttaaacattttcccatgctattaggcatttagatatcctattgtgagaaatggttgttcaagttctgcccatttttcaattagactgtcattgatttagaatagctctttatttctttattctggaaaagtattgcaactatcttctgtcacttggtggcatgatttccactatgatagtggaaatgttttaatagaacattaaacatttaatagaacaataaaacatttggacatgttttaataaacggaagttcttactttttatgtaggcaaacctatacatgatttttgtttctgctctgatttggcttcatttgaggaatctatattcccaagcagttatagcttctgtaagatcctgatggaaagtggagctgaatcctttgtaattcatgcatagtaatttagtaatcaggagcacctgcctgaaattaggatgtgtggtggcagtcacttcaggcacttctttcaactaacaagacctttattttgccattgatgtcaaaaagaaaattgcagtatcttttatttattgagttattttgtttatattggagctgtttgctagaaatctaattaatgtgatcttattataagccatcaacaactctgaaagataggtgttatcattatccactttgcagataaggaaactcaggctgactgagtgatgttagtttgctaaaatggcagaactaataagtgggagaagttcagtctgtctcattctaaagtcatatttcaaagccaaatgccctttaagattttatgtgtgtcgggaacttatttgggtttgctcattattaaatatgtttaatattattcactttgccaatatgaaggtgcattgaaaaattcaattctctgttgcagataaaggaagacctaggtctagaaaaatagcagaaagtggaagagggaaacgatattcatacaaattacctcaagaatacaacatagagactgtagtggttgcagacccagcaatggtttcctatcatggagcagatgcagccaggagattcattctaaccatcttaaatatggtaggcaaactttaaagtgcgcttggaattttttcaagaaaactctaaggaagacatgtgtgagtatttataatgaaattctttaaaattaactcattactattcctttctcttattgtcatcagtaaaaaaatacttaggtatataaaattgatccatctcaaaagcaatatcaaaataaaaattcacatcttgtaaacccttgttaattttgatgtggcaaagctctttctatgttactcttttctctctttttttggtactgttcttttccttttttaaaaaaatgtttctagccccattttatgtatgtatttatgtctgtctgtatgtatgcatgtatttatttatttatttatttttttggtacatagtagatgtatatatttatggggtacataagatattttgatagaggtatacttttggtgaaattatcataaatattttaatatatgtttatatatgtggccccacaaaaggaccataggttaattatgatgcgatataaaaatgaatgttggtaatccactgacctattatatacgtatgtaaaatttgatgtcagatatgattctagttgatgagctaaaattttaaccaactaaatcacaggtggcctactggagttgatgatttctgattgtagaaatcctagtatctatcatgttagggatgcttattaccagattaatcctttgacttaattgtgtactctgttgggcaaacctcattcaaggaagaatcagaaggttgtagtgaagagtgattcttcaatgagaataaacagaaataaatgttcaaggcaaatgtccatttataagtcaattaccatttaagaatggctgatgtaaggataaatatagtcccattttttactatctttgctatcatttggctgttttcctggggaacagagttttttttttttttacactttagatatttctgtccatattccattacctcctgagcactcctctaaaatgcgatatgtggtagattaacactgcctaacaaccagtcttttctaagtagaaatatctctgaaagcatgggtttggtgtgtcagttatatattttctaatacaagttaaatcaatactaagttttcttttaaattcaatgtaacaaataaaaaattactttgctttacaagctttttttttttttttttaaaaaaaaaaaaagatgtctcaactaaattgagacatctccatgtatgggccttgagaaaaattaagatgattttcagtttaattttaggatttttatttttatttgtttttaggtatttaaccttttccaacacaagagtctgagtgtgcaggtcaatcttcgtgtgataaagcttattctgctccatgaaactccagtaagaaagtcttgagttttttattaaattaaatgggggagaaattttgttcagaaacttttaagtaaagggaatgttaaggatgtgcttaaaaatccagaaatatccactgaatcacttaaagtatacataaaactggcctttagttttggttaatgccccgatcttatttaaaaaataagatgtcgttagtttccaagaatcctgaaaacaaatcttaactttccaaagtataattttaagaagtcattttaagtgacagttttattctattatttagatgtctacttttaacactttttatttattttaaatgggaactattctgtgacatcattttgatatgctgcttaactggcactttagaaaatggtgttctacatagaaaatgttgttcttaaattgtagaaacaagttatttaagtataaaagttccatattcttaattgaacctctttgctttttcagaataccattaaacaaattttgtaattattacaccttcaccaagttttaagcttttaagctcagggtaaattaaacctgcatgtcttccaggttctaattaatgttatggtcagcagtttgctttagtaattcaagagtgcctttgttattgttgttgttgttgttgttttgtatatacctaagaataatatgccttgtgatgagctctgttcttttgcagccagaactatatattgggcatcatggagaaaaaatgctagagagtttttgtaagtggcaacatgaagaatttggcaaaaagaatgatatacatttagagatgtcaacaaactggggggaagacatgacttcagtggatgcagctatacttataacaaggtaaattttccaatgccaattaaatggcattcctaattcaatcactgcactgttgatcccattaatcccttaatagataatgtttttatttcagatttcgtgtttcaagagtgattttggcataatgatgttagtcatctccctcaaatcataataactgatttgtaaacagctaaatattggatggcatattgacaaaaaatttggttagttaattctaaaaaattacccaaaatttttgacctcaaaggcatagtcattgataatgataagctaaaactatggtgaattttgttgtaagttccaaattatgaacgtagactgtatgtttttcagtcatcaccatataaagtaacctaatatgttaaattcagcaattgaaaaactttctggctccatgtgagaaacaatttcaattaagtctctgactgattaattataagctacattgtgaatgtactactaacaaatatttttaatatagcattaagtataatatgtaaataaatgtaagtgaaataatgagcaacaatatgctctatatgattactatatttaataattatacataatttgtcttgcttaaagctggtaaaaataagtaattcattgtgaactagcaatttaattttagtcatcaaaagtgttagcgtttcacatcacagtagcgtaaattacacatgattttctgaaatgaaatcattgaaatcattgtagtttcttgtaattaatactaaaggcaaataattcataaggttgaaaaatctctatgcaggaacacaattggacttctactttcggctaagtaggtaaaactgttactgagtttctgcaacaagcaatcataacattggaaaataagaagtcactgcttttagtcattggagaatgaacagcataagactgcaattcctgaaagaagggaaatttattatgcaaacatcgcagtcaacccagctttttccttgggaaaaaattcttaactagcgtagcaagctagaatctaggtagagcacagtgatcctgctgaggacaccatagataaaagtcttaggcatggagaggtgccatgaagtacgtgtgctgactgtacgtgagaacttggcaagggctggtctgaagataaacagatagaggaaactgccccaaatttaccataggattgctgctatggagttcagaatttaaaaagataagaggaataagcaaattcaaagcacaagagtggaacaatcttgtgacaccttatcaacatttttagccttaggggagacagagcttggaggttgaataccaccaatttacagaggcttgggtatcatcttggatttttgatagatctcccctaccaaagaataaaatcaaatttatccaagtgcaggatgatgagccagtaattgaactgcctcctaaaacagctgtaagcactcttcagaggaagataacagaatagcaaatctctaaaaatatatcatccacaatgtccagagtataataaaaattagtcaagcaaagaaacatgaaaatgtgacccatggtcagggaagaattagtcaatagaaactgacctcaagatagcctagatgttggatttagcagattaatgttgttgtaattggagtctccgaaggagagagtaagaatgggtaagaaaaattatttgaagacataatggcaaaaatttctgcaaatttgatgaaaggcaacaaatatggacctaggcacatcataggaaaattgctgaaaaccaaagaaaaacataaaaatttccatcagccagtgggttgagcgttgtggggagcagagggaacattgaacaggaggaacaatgttcaaataaatgactgacttcacatccgaaaaaccataagttcaaaagacagtgaaacaacatttctaatgtattgaaagaaagtaaaataaagaaatcctatcaaccaaaaatacttattgagttcttgaggtactatcttaatctctgaaagggtatctatcgaaacatatatctacaactaatatcacagcaaaaggagaaaactgaacattttctccttacaactgaaagcaaggtaaggatgtcccctcttaccacttctatccaatatcgtactgaagatcataaccagtgcagtaaagcaggaaaaaaaaaaaaggaaaagcatacatatttggaataaaaagaaaaaatgtctcttattcacagatgatatgaaatggtacaaagaatatcttaagaaatctaacaaaaatttgctagaatttataactgggttttcaaggccacatcatgtaaaatcagttttcaaaaaccaattatgtttatatatactggaagtgaacaattggaaaaaaacttatagtgacttccaaaaccataaaatacttaagaagaattttagtaaaatatgtgtacaacctctaaaatgagaactatacagcactcttatgagaaattaaatatctaaataaagattaattcattggaatactaaatattattaaatgtcagttttctccaaattgatttatagattcaatatactcccaatgaaacaaccttttcaggcatgttttgtagaaattgacaagctgactccagtactaatttgtaaaggcagaggacctagaagaatcaaaacagttttgaaaaataagaacaaattgaggccaggtgtggtggctcacacctgtaatcccagcactttgggtggctgaggtgggcagactgcctgaggccagggattcaagaccagcctgcctaacatgacagaatctcatctctactaagattacaaaaattagctgggcatggtggtgcatgcctgtagtcccagctacctgggaggctgagccacgagaattgcttgaatctgggaggcagaggttgcagtgagccaagattgcgctactgcacgccagcctgggcgactgagcaagactctgtctcaaacaaacaaacaaacaaacaaaaaaaccccaaaatcttcccattctgtcacaggaatgaaaatgtttatatatatatatgtatgtatatgaacaaattggatggacttacacgatatgatttcaaaacttactataaaggtttggaaatcaagatagtatggttttggcagaaagtcatgcaaatcaatgaagcaaaataaatggtctagaaataaacccagatatatagggtcaattgatttttaataaagctaccaacataattcagttataaaaataatctattcagcagatggtattagaatacatcaaatggtacaaatggaatatctggacacctttgcgaaaaaaatgagtatcagtcctatttaacatgtgtaaaattaattcaaaaaggatcacagaattaaacatgaaagctaaaactctattgtagcaaaaaaaataacatcttcatgaacaagaggagggcaatgatttcttagatagggtaaaaaaaagtactaatcaagaaatattgacaatcatctggaatttttaaaaatgaaaaccatttcccattcaaaagatgttacaccttttgtgaatttgagaaaatagttgtcatgcatatactaacaaagaacttgtatccagaatgtttacgtatgtgtgtatatacacatatacaaatacaaaaacatgttaaccttttaaaaataagaagaagaaatatgaatctccaataagcatataaagagatactcaacatcattagtactcaggaaaatgcaaattaaattcacacccacttgaaaggcttcagttataaaaattgaaaatactcaatgatggtgaggatatggaacactcctcagttgttggtgggattataaaatggttcaaccacactggaaaatgagtagtttcttataaagttaaacatttgcttaccatttagcccacatccgcttcttagatatttacttaagaaaaataaaaatgttattcacataaaaaattgcacttgaaaatttatagaagctttcataattttttttcataatttttcataattgccaaaacttataaataaattttcatctacaggtgaatggatgtattgtgtgatcatacaattgaatactcttcatcaaactgctaataaatgcaaccacatggatggatgaatatgaatatcattatactgaggccaggtgtggtggctcacgcctgtaatcccagcaatttgggaggcctaggcaggcaggcagatcacttgaggtcaggagttcaatatcagccttgtcaacatggtaaaaccctgtctctaccaaaaatacaaaagttaggcaggcgtggtggcttatgcctgtaatcccggctactcgggaggctgaggcaggagaattgcttgaacctggcaggcggaggttgcagtgagtggagactgcaccactgcaatccagcctgggcaacagagtgagactccaccacaaaaaaaaaaattatactgagtgaaaaagccaaattagaaactgatcagaagatgattccacttatatagagtttgaaaataggcagaattcatctgtggtgtgacaaatgttcccacctttaggtgggaaaactgactgcaaaaaggcagaaggaactttctgtagtgctggaaatattgcatatattgctttggatacatgtgggtttatacatttgtcaaaattcaccaatcttctcatttaacttgtgtatattttatgtaagttttaccataataaagttggttaagagtagtaaattggtagtttgtatttctgtgggatcggtggtgatatcccctttgtcatcttttattgcgtctatttgattcttctctcttttcttcttcattagtcttgcgagtggtctatcaattttgttggtcttttcaaaaacccagctcctggattcattgattttttgaaggatttttttgagtctctatttccttcagttctgctctgatcttagttatttcttgccttctgctagcttttgaatgtgtttgctcttgcttctctagttcttttaattgtgatgttagggtgtcaattttagatctttcctgctttctcttgtgggcatttagtgctgtaaatttccctctacacactgctttgaatgtgtaacagagattctggtatgttgtgtctttgttctcgttggttgcaaagaacatctttatttctgccttcatttcgttatgtacccagtagtcattcaggagcaggttgttcagtttccatgtagttgagcggtttttgagtgagtttcttaatcctgagttctagtttgattgcactgtggtctgagagacagtttgttataatttctgttcttttatatttgctgaggagtgctttacttccaatttgtggtcaattttggaacaggtgtggtgtggtgctgaaaagaatgtatattctgttgacttggggtggagagttctgtagatgtctattaggtctgcttggtatagagctgagtccaattcctggatatccttgttaactacctgtctcattgatctgtctaatgttgacagtggggtgttaaagtctcccattattaatgtgtgggagtctaagtctctttgtaggtcactaaggacgtgctttatgaatctgggtgctcctgtattgggtaaacacctctacgcaaataaactagaaaatctagaagaaatggataaattcctcgacgcatacactctcccaagactaaaccaggaagaagttgaatctctgaatagaccaataacaggctctgaaattgaggcaataattaatagcttaccaaccaaaaaaatccaggaccagaaggattcacagccgaattctaccagaggtacaaggaggagctggtaccattccttctgtaactattccaatcaatagaaaaagggggaatcctccctaactcattttatgaggccagcatcatcctgataccaaagcctggcagagacacaacaaaaaaagagaattttagaccaatatccttgatgaacattgatgcagaaatcctcaataaaatactggcaaaccgaatccagcagcacatcaaaaagcttatccaccatgatcaagtgggcttcatccctgagatgcaaggcttgttcaacatacgaaaatcaataaacgtaatccagcatataaacagaaccaaagacaaaaaccacatgattatctcaatagatgcagaaaaggcctttgacaaaattcaacaaccttcatgctaaaaactcttaataaattagctattgatggggcgtatatcaaaataataagagacaaatccacagccaatatcatactgaatggacaaaaactggaagcattccctttgaaaactggcacaagacagggatgccctctctcaccactcctattcaacatagtgttggaagttctggccaggacagtcaggcaggagaaggaaataaagggcattcaattaggaaaagaggaagtcaaattgtccctgtttgcagatgacatgattgtatatctagaaaaccccatcatctcagcccaaaatctccttaagctgataagcaacttcagcaaattctcaggatacaaaatcaatgtgcaaaaatcacaagcattcttatacaccaatagcagacaaacagccaaatcatgagtgaactcccattcacaattggcttgaaagagaataaaatacctaggaatccaacttacaaggggtgtgaaggacctcttcaaggagaactacaaaccactgctcaatgaaataaaagagaatacaaacaaatggaagaacattccatgcttatgggtaggaagaatcagtatcctgaaaatggccatactgcccaaggtaatttagagattcaatgccatccccatcaagctaccaatgactttcttcacagaattggaaaaagctactttaaagttcatagggaaccaaaaaagagcccgcattgccaagtcaatcctaagccaaaagaacaaagctggaggcatcacgctagctgacttcaaactatactacaaggctacagtaaccaaaacagtatggtactggtaccgaaacagagatatagaccaatggaacagaacagagccctcagaaataatgccatatatctacaactatatgatctttgacaaacctgacaaagacaagcaatggggaaaggattccctatttaataaatggtgctgggaaaactggctagccatatgtagaaagctgaaactggatcccttccttacaccttatacaaaaattaattcaagatggattaaagacttacatgttagacctaaaaccataaaaaccctagaagaacacctaggcaataccattcaggacacaggcatgggcaaggacttcatgtctaaaacaccaaaagcaatggcaacaaaagccaaaattgacaaatgggacctaattaaactaaagagcttctgcacatcaaaagaaactaccattggaatgaacaggcaacctacacaatggagaaaatttttgcaacctactcatctgacaaagggctaatatccagaatctacaatgaactccaacagatttacaagaaaaaaacaaacaaccccatcaaaaagtgggcaaagtatatgaacagacacttctcaaaagaagacatttatgcagccaaaagacacatgaaaaaatgctcatcatcactggccatcagaaaaatgcaaatcaaaaccacaatgagataccatctcacaccagttagaatggcaatcattaaagagttaggaaacaacaggtgctggagaggatgtggagaaataggaacacttttacactgttggtgggactgtaaactagttcaaccattgtggaagtcagtgtggcgattcctcagggatctagaactagaaataacatttgaaccagccttcccattactgggtatatacccaaaggactgtaaatcatgctgctataaagacacatgcacatgtatgtttactgcggcactattcacaatagcaaagacttggaaccaacccaaatgtccaacaatgagagactggattaagaaaatgtggcacatatacacatggaatactatgcagccataaaaaatgaagagttcatgtcctttgtagggacatggatgaaattggaaatcatcattctcagtaaactatcacaaggacaaaaacaaacactgcatgttctcactcataggtgggaattgaacaatgagaacacatggacacaggaaggggaacatcacactctggggactgttgtggggtggcgggtcgggggagggatagcattaggagatatacctaatgctaaatgatgagttaatgggtgcagtgcaccagcatggcacatgtatacatatgtaactaagctgcacattgtgcacatgtaccctaaaacttaaattataataataatttaaaaaaaagaaaaaagaaaaaaacaaccccatcaaaaagtgggtgaaggatattaacagacacttctcaaaagaagacatttatgcagccaacagacacatgaaaaaatgctcatcatcgctggccatcagagaaatgcaaatcaaaaccacaatgagataccatctcacaccagttagaatggcaatcattaaaaggtcaggaaacaacaggtgctggagaggatgtggagaaataggaacatgtttacattgttggtgggactgtaaactagttcaaccattgtggaagtcggtgttgcgattcctcagggatctagaactacaaataccatttgacccagccatcccattactgggtatatacccaaaggattttaaatcatgctgctataaagacacatgcacacgtatgtttattgcggcactattcacaatagcaaagacttggaaccaacccaaatgtccaacaatgatagactggattaagaaaatgtggcacatctacaccatggaatactatgcagccataaaaaatgttgagttcatgtcctttgtagggacatggatgaagctggaaaccatcattctcagcaaactatggcaaggacaaaaaaccaaacaccgcatgttctcactcataggtgggaattgaacaatgagaacacatggacacaggaaggggaacatcacacactggggcctgttgtgggatgggggaaggggggagggatagcattaggagatatacctaatgccaaatgacgagttaatgggtacagcacaccaacatggcacatgtatatgtatgcaaacctgcacgttgtgcacatgtaccctaaaacttaaagtataataataataatgataataaatacacaaaaaaagaaaaaaaagagtagtaaattgaagttggtagaagggatggaaagatttgcatggatggagaggggacttataaggtttgaggtgagtctaggttaaacatttgcattggtcaagtctttcttccttcttaacagtaatagatttgagaaatattgcttctgagactaaagaagacgataatcataatttgattactgatttataattttctcttattacaaatgcaatatatattacagaaaactgataagtacaagaataaagataaaaattagcttatagtcccactacacaggaaaaagtatagttaacattttaaagtatatttcatcagtggtatttcttatgtatgcatataattaaatacatggagttacattattgggatcatagtctacatacaagttttgtttctcaccaacaaaatatattgtggcattaattttattccttatttccaatgccattttttctttcaaaactctaaaaaaagctttagaattttctgcatccaatttttttagtgttaaaaaccttaaaactagcatgttgaactgaccactcttcattattgcctcccttgttgctagctttccctagctatgcaacacaagaattctattaaaaggaaaagaagaaagcatagtgtgatatatttcatatatacaaagagcataaagaataacataattaacaactacctgtttacccctccacttaggaaacagaatgttatctatgttgttgaagtcatcttacatactgttttataatccatattttcccttaaaagtctgtttcaaacaattgcttatttttgtatacttttcttggaaatgtagcctaatatggttttattttccaagtaatgcatattctcatggcaaaagtttaagtataacttttaaatatattgtcatattataagcatattcttatggtaaaagtaaaagaaacaccttagtgtttacatagtaaattaacttttaccaacttctactctgctctccaaccctaaggtaatcaatgttaagagttggtgtgtatgtaaagaacattgtttcatgctatacacagttttctctgtttgtttgctttttcactttacgattatgtctggcaagtatttttatgttatttattgtgggaggcagaataatgtccctcctccccaaatattcacgttctaatctccagaaccagtgaatatgccatcttacatggcaaggggactttgcaaatgtgattaaggatcttgagatgggcagattatcctggcatatttgagtggttcagtgtaatcacaagagtcctaaaataaggaagagggaggcagaagttcaaagtcagagaaggactggaagatgctataaacccagttttgcagacagaaaaacaggtcaaaagccaaagaatgccagcaatgtctagaagctggaaaaggccaggacatagattataccctagtgcctctagaaggaatgcagctatatggcacttttattttgtcccattaagacctgcacttgacttctgacaagataacaaatttgtgttgttttaagccactaagttcatggtaatctgttatagcagcaatcggaaactgatgcattcctatatcggtctgcatcatttgtgagggggagctgacatactatatattgcataaaagtatcctaatttattcaactacttatctgtttatagaactttctaattttttgctgttagagaaaatgttctataaatatgtttatatatggttgtaaacatgtgctgtaatagtatttatttagggtagattaaaaagtacttgctctgtcaaagggtacacatatataaaatactgacgaatactggcaaactgttctccctttactcacttgtgggacaaggcttctgtggaggatcaccctttctccatatttgtttccagtgccataatagtgaaaaatcaccccactaaagagaatattttattcctaagtgacctagtaccatttggttaataaagattaaatgagtgcttcatgtagttaaggaaaaaatatccctttctagttagggtaaagatgatcagctatttagctttgtaagaaagctgtgaaaaatagaataacattggaaaaaatgttaatctccctggattgcatgttcttatccatatttggcagagtaaactcagaaccaggctcagtttctagtaaatgctcatcgtagataactagtaaatgttgggggttatgtgcatacattaataggaagaaattttagctcaggggtcaagtttggtctcacataaaatgcataatgcttctacaaatccaaacctatctgaggtcatatatttgtcaaattgtcctgtgcagtacaataaagtaaatagtttaaagctgacctagttatgcttctgggttcatagtaacaaaaacacaaaacatgttctcttaactctcaactctatgatttcttagtgcaattttcacatttcttattgaaatcatggagaaggcatatatctttatgccctttgaaaatactctttaaaattcaattttattaatgatagctttgcctttcctatttgcagaaatgcttttggtttacgtataatacatgtgaaagttagtttcaaactaatgccattggcaagtaagagaaaatttaataaaacatatgaattgcaaaagtaacttgatttaatacaaattacagaataatttttgaatgaatcacttataggtatatccccaggcactattaaactctacagtgagacttattctcagatgcatcttcattcttggaaattaaaggctacatttcatttttttcaacataaatcagaacttaggcaaaatttattggccttcccagttgccaaagtctaacagtgtcatttctataaattcacataatgaaactctgtgatgcagacttcgggtgcacagtctacatgagccaaaaatgagagaatttgaatccacatgatcaaaggtctagtcagcaaataatctctatccccatcccataaaataaatatttgaatattttgaattaggaatacattactttggtcttctgcaaagaagttgattattggagaactgaagattaagaattatcatctgatctttggtttataatgctgctgacaatttatttttcaattttagtgagaggtacttctagtgtttctggatgaaataactagatttttttttttttttgtaatgtgcttttttcatttgtttgctaagtgaacagaaattggctacgtggtggactgtaaatgcccttgacgataagcagtgcatttgtcatagttttatcgtgttgtttagttacagatgaagtcccatgtttcacattatgtaaatcaaatagtcatgttgcaggttcatgcatcatgatatgatgtattatatatttagaaaaatcaccccaaatccctttccccctacatctgaatatactttatacttagtgattcttgaccctaaggtgaagatttgattttatgtggttctttaattttttgcattgccattttattcagtatcatctgttttgggtgtttccttctccatttgtttgctggcaaaggcaattgaataatagaattattcattatttaatataactccccagacttctttctcactgctcctgagacccttaccacgttacagaggtgatatgttttacccacttctgtgcctttcaagtagaagcctattttatttatctctgttgtgtccttccccttatttagtacatggcatattagagacgcttaatgtatcccacaatattcagttgtataggcagtacactacacaacagtagagggagccatttatgttgtgtattataaatgtgtccatagaattatgcagtatacaacttctaccaccaggcgtgatgttctcataaatatttgatttctatagtttcctatgtagataaatgatattttgtcatttatttataataataatgctagaaaacctttccattcatcttcatctatagttatattgagactctgaatatgttttgctgccagcagaaattattttcctttatcattaggatattgtttgttttgagccacagagaccaactttgcctaagttgagcaacagaagaaatagttggcttattttgattcgatattctcagaatcaaaggaagaactgaagaatcaggcgtcaggaaagatagcaaagaggaaagctctaggcatctcatctactgagtttggatgattcagagccattcatattttactatattatctcttttccatcctctgaaaacatgggtttcaatgtggggggataatcctatgattggaagctgatgactagaatacactgaaatacactgaccagaaaatatgatgcaatagaaggtgatttcccagtggaaagatgctagggactagagttggggaaggataggatttacctcaggactatgaaggaaccatttggcttcacaaaaaccttccattataaccctgggaataaatgttctgattgagagcagccttgtcttgcccagacttacaaggtttcctgttttgtatcttgtatattgaaggggatggtgactgcttggaaaaagtagttgcatgctgcttaccatgggaaaagtttagggtaggacagctatagtgattgtgttttatgagataaaatttggatgtatcttccctcatttatctagagttttccctctaattttggtacatattttcagaaagatatatatatttacagtaaaagttataaatattaaaactcccaatactgacaatcaaattatttacttcatcaaaatttatttgctttctttcctattgactttttaataatttaccaaaaaatgcatctacttttcaacatccattctgttgggtcagtagacttttaaggagtatggaagcaacctgataggattatatcatctatatacaaaagaagtgaagattagtgtaccaagtgctaacagccatctttaaattatcaagaatggattaactagtttttgttgttgtttttttttgttgttgttgttgttttgtttttttttttttaatttaagaaggagttttgctcttgttgcccaggctggagtgcaatggcatgatcttggctcaccacaacctccgcctcccaggttcaagtgattctcctgccttagcctcttcagtagctgggattacagggatgtgccaccacacctggctaattttttgtattttttttagtagagacggtttctccatgttggtcaggctggtctcgaactcccgacctcaggtgattcacacgcctcggcctcccaaagtgctggaattacaggcgtgagccactgcacccagcctggattaactagtttttggatttactagaatacaaaaataatagcatatttgagaaaaacactaaaatttgtacaaactgataaaaacatgttatactgtttctgttgtctggaaatatacagtaatcagtagacagcacagtgtaacattacattatgtctactgtgttttagggaaaacctgctcccttgccagtataatgaggtgagctttacagtgggcagcaggccttctttagagcaaagtttcctctggatgcattataaaggcaaacagaggtaggggaaacatggccactaaaacaaactaaagccaagtatttgagggtggagttaattaagtaaggaaagagagaagggataacatgcaagcgggcctgagtctttgccttgcttaagtcctaatgaaatactggagaagtgttctcagctaagagaaccacaggaataatacatcttccactgatacttcatgaagcaattcatgtgataacctatcatacttggattatttttgttatttataactagagaatggtaaatgtattcctaaattttgggtgtgatttaaatgaattaagtttacattaagttcattttgtgccttgtattgaaaagatattatttaaggttatgttttatcttctctcttttagctctaccttttccacattactctcgtaattgagtctatatttgttttgcatagtcatctctttcagaatttgccaggagaaacagagaacaattttaataattaatgttgatattaaaatacttcatccctatcttatactcatggctagcaacaaatatttttttctatctccaaccatttggaagaaaaataacaatattgtagtaatcacttattttttacaataatttataagtaaaataatccccacttgttgaaagacatttttgaaaaactattaaatatcaactgaacatcttattgagacagctctgcagtcttttaaagcatttggtgaaagtagctgcatgatataaaatgtaataataaaaaaggcctatggcttgtttctatatatatttagacctaatgctaacaataaactaatgtatcattttactgcacttcattcctatatggtaggtcacagattaagtccagttcttttaattatgtgagaatctggctgtctagataatcagaaaatgttcccattatgaacatctataaaccatagcaaaaaatacaataagcgcactttcacttgcacagatgagccaaaaacaaagcaagttctggcaacaagtttagtaagcaactaaggtaatgtggtagcttccctgagggagttttttgaactaaaaaaatctaggtttttatgttttaatgagtctgtgcaaagtggggaagtggaactgaaatgattacacacaactagaatttgcagatacttagatccttaataaaagtatgaactggtaaaagttctgccagcaagcacaggttgtgaacaaagaaacattctgcctcatccatcaccccaggttaggacaaaaatgcttcctctgggtattcattaccatgaatctgatttcaaaattgaagcacttagtgaaagcatatgcaaaactgctctgaagggactctctttcaacttacaccatgaggcaaccacacttaacatcccactgactgagttcataatataattccaaaatgaccaatgataacatattccattgtaagaacccagaggcatattaaagaaaaataatttttaaaaagtactaacagggattataaaacaagcatgtccacctaattaaaaaaaataaaaaatttcaaaatatgagaataagatgttttgggggaaaacagttgatttgaaaactgatgaaaataaatgttctcaggaagaaatatggaatatggtatgtatacttaaaatttcaatttctaaattgaagagcagattagatccatctgaagagagcattagtggattggatgatagatctgagggattctcccagcaggctacatagagtggttaagagatgcaaatacacaaaggtgcctgagcactacagacatcagaatgagaagaattatcatattcctaaagaagttctaggagaagagaatggaatgtcggagggattaactaaatagataatggtaagaatttttaagggttcatggatctttaagttgaaaatataccaagtaccaaagaagataaataaaaacatgaacagacacttctcaaaagaagacatttatgcagccaaaaaacacatgaaaaaatgctcatcatcactggccatcagagaaatgcaaatcaaaaccacaatgagataccatctcacaccagttagaatggcaatcattaaaaagtcaggcaacaacaggtgctggagaggatgtggagaaataagaacacttttacactgttggtgggactgtaaactagttcaaccattgtggaagtcagtgtggcgattcctcagggatctagaactagaaataccatctgacccagccatcccattactgggtatatacccaaaggactataaatcatgctgctataaagacacatgcacacgtatgtttattgcggcactattcacaatagcaaagacttggaaccaacccaaatgtccaacaatgatagactggattaagagaatgtggcacatatacaccatggaatactatgcagccataaaaaaggatgagttcatgtcctttgtagggacatggatgaaattggaaatcatcattctcagtaaactatcgcaagaacaaaaaaccaaacaccgcatattctcactcacaggtgggaattgaacaatgagatcacatggacacaggaaggggaatatcacactctggggactgtggtggggtgggggcaggcgggagggatagcattgggagatatacctaatgctagatgacgagtttgtgggtgcagcgcaccagcatggcacatgtatacatatgtaactaacctgcacaatgtgcacatgtaccctaaaacttaaagtataataaaaaaaattaaaaaaaagagaagataaataaaaacaaaatcagtaccttgacccatcttcgtgggactgtagaattataaagacggaaagagtgttaaaaaagtaagcagaaagcaaatgcatgaaaaaaaggcaaaaactgtaatcagagacttctaatcaatatttatgaatgctggaataaaatgaaatggtatcttcagtgtgttgagagtcaataaagttgactttataacaactcagttactattcagttatgaatacatgcaaaataataaaaatgaaagcaaaagaaaaaacaagcaaagtttaccattcatagatagatcctcattggaagagatgctgaagaatgtacttaaagaaaaagaatagtgagatgtctagaaagtaaattataactgagaaaataaattgctaaataaataggcaaattgctacataagccctgatggtttttaaaagaaaccgtctaattttagatttgaaaaatcaagatggaaccataatttcagattaaaaacacatgaaaaattgaagggagagattggattaaaagaatgttatattcttgcctttttcaggaggaagagctttagacattctaaggatatgtggtaggcaggaaaagtaacatcccctgcaaagatgtttatgctctaatttccagaacctgaaaatatgttatcccatatggaagaaatgactgtgcagatgtgattgtattaaggatcttgagggggcgagattatcctggtgtgaggaaaagagagagagtggaaagtcagagagggtcatatgaggatggaagcagggggcagagtgatgcaatcattgaccttgaaaatagaaggaggccctcagtcaagaaacctgggtagcctctggaagctagtgaaggcaaggaaacatattctcatctagagctttcagagggaacatgatactgctgacacattgattttagtgcagtaaagcccatttcaaaattcgggccttcagactgtaagttaaagttttgtgttgttttaagtcaccatatttatggaatttttacagcagcaatagagaacaaatatatcatactttagaaagtaaaaggaatcatacatcaaccacaatttaatgttactttcaaagtagccaaaaaaagtgagtgaaaaataaaaggaagaaagagaaaaagaagaacaaagaaatataacttggcattgaatctataaatagattcaatgccatccccatcaagctaccaatgactttcttcacagaattggaaaaaactactttaaagttcatatggaaccaaaaaagagcccgcattgccaagccaatcctaagccaaaagaacaaagctggaggcatcacactacctgacttcaaactacactacaaggctacagaaaccaaaacagcatggtactgctaccaaaacagacatacagatcaatggaacagaacagagccctcagaaataatgccacatatctacaactatctgatctttgacaaacctgacaaaaacaagcaatggggaaaggatttcctatttaataaatggtgctgggaaaactggctagccatatgtagaaagctgaaactggatcccttccttacaccttatacaaaaattaattcaagatggattaaagacttaaacgttagaactaaaaccataaaaaacctagaagaaaacctaggcaataccattcaggacataggcatgggcaaagacttcatgtctaaaacaccaaaagcaatggcaacaaaagccaaaattgacaaatgggatctaattaaactaaagagcttctgcacagcaaaagaaactaccatcagagtgaacaggcaacctacaaaatgggagaaaattttcacaacctactcatctgacaaagggctaatatccagaatctacaatgaattcaaacaaatttacaaaaaaaaaaacaaacaaccccatcaaaaagtgggtgaaggatatgaacagacacttctcaaaagaagacatttatgcagccaaaaaacacatgaaaaatgctcatcatcactggccatcagacaaatgcaaatcaaaaccacaatgagataccatctgacaccagttagaatggcaatcattaaaaagtcaggaaacaacaggtgctggagaggatgtggagaaataggaacacttttacactgttgttgggactgtaaactagttcaaacattgtggaagtcagtgtggcgattcctcagggatctagaactagaaataccatttgacccagccatcccattactgggtatatacccaaaagattataaatcatgctgctataaagacacatgcacacgtatgttcattgcagcactatttacaatagcaaagacttggaaccaacccaaatgtccaacaacgatagactggattaagaaaatgtggcacatatacaccatagaatactatgcagccataaaaaatgttgagttcatgtcctttatagggacatggatgaaactggaaaccatcattctcagcaaactatcgcaaggacaaaaaaccaaacagcacatgttctcactcatagatgggaattgaacaatgagaacacatggacacaggaaggggagcatcacactccgagtactgttgtggggtggggggaggggggagggatagcattaggagatatacctaatgctaaatgacgagttaatgggtgcagcacagcaacatggcacatgtatacatatgtaacaaacctgcacattgtgcacatgtaccctaaaacttaaagtataataataataaaataaataaataaataaataaaataaaaaaagaaatataacttggtaaatagaaatcataaataatagaaatccaaacatatcaataatagaaaaggattaaatgcatttaaaagatattatataactagcttttaaaaatttcactatgtgttctttataagagactcagagaaaatggatgttgaaaacaaaatgaaagagataggacaagcaaatattagtgcagtactgtatattaatatttgttagtatcagacacaatccaccttagcaaagtaaacatatagattttacacaataataaaaataatagttcaaaataaacaaacttagagaccgagtacttaataaacaataaactttgagataaacaaatcaaaaattagaatcacagggaaacatcaaaaaattataagcacaatggaattttaacagtcttttgtcagtacaatgtaaaaatcaatccagtattgattattctacttaacaattgtatatcagagcttttaagagctaaatgtaatgagcatatatggaactgcactccaaaaaattaaatatacatttctaatatgcaaggaacatttaccaacacacacacacatacatatatctatatatacatatacatgtatccgtatatgtatatatgtatctatatatacatatacatgtatccgtatatgtatatatgtatctatatatacatatacatgtatccgtatatgtatatatgtatctatatatacatatacatgtatctgtatatgtatgtatctagatatacatatacatgtatctgtatatgtatctagatatacatatacatgtatatgtatatctagatatacatatacatgtatctgtatatgtatgtatctagatatacatatacatgtatctgtatatgtatgtatctagatatacatatacatgtatctgtatatgtatgtatctagatatacatatacatgtatctgtatatgtatgtatctagatatacatatacatgtatctgtatatgtatgtatctagatatacatatacatgtatctgtatatgtatgtatctagatatacatatacatgtatctgtatatgtatgtatctagatatacatatacatgtatctgtatatgtatgtatctagatatacatatacatgtatctgtatatgtatgtatctagatatacatatacatgtatctgtatatgtatgtatctagatatacatatacatgtatctgtatatgtatgtatctagatatacatatacatgtatctgtatatgtatgtatctagatatacatatacatgtatctatacatatctgtatatatatacatatacagatacatctatacatatatctatatatacatatgtatacatatatagatatatgtatgtattaactcacaaatgctgctgatgagccaagcaagatgtgaattgaaagctaaccattataaagatcaatgtgacttcattggtgaataggcaaaagtattgtgcttaattttaagtcttttttttatcatttagatacagctttcagatcctgtaacagagaggaaatttttttaaaaggataattttacatttctcatttatgtacacacaaaaagcctattgtaatattgtttgtgatagtaaaaattgtatagaacctaaaagcttattgctaagaagttgcttatgttatgatacactaatagcagcaataaaaaaaatccccaaccaaaacatcacaactaactttttagagcttactttgtgtgtggcgctgttttcaataccttatatgtgttaattcatgtcccttgcacagtaacctaagtttttaaggttttatacatgttaaatcatttaaattgaacaataaacctaggtggtagatattattactacctctatctttatgatgaggtgacagaggaacaaggttaaataatttgcctaagatcacatagctagtaagaggtagattaaaagttttgctttcatatattctgcccccaaatctcatagctcttattaaggtctattaaattttgctctatgaaatcctgaataattgataacaacagtgaagcattcttaggaatgctaagatataatttcagataaagagtaaaaattataaaatattatacatagatcccatttatgtaaaataataatttccttataccattaataaaatgattatcagtcttttaaaaattttgccagtcttatgatagaaaatattatgttgttttaagttgtatttcttacatttaaatctttgatctggaaataatttttgtgttacataaagtaggtatcttccagtaatttttcaaatggaaagccttgtcccaataccagatttttttgtaataaaacaatagaatactgtaaaattcaaaacaagatgggatcttacttttgaaatattgtccatcatatgggaactgtctaatgtctgaggattaattatatcatgtgctataaaatttaattaatcttccatatcttagaattaaaaattaatcttattcacagttttattagattcttggagatgacagatgtgcttcaattaatcatataactattaaaaatgagtcacttgatgtcttgtttgtacaaaataatttatctttatttcagttttctatttttctttctaggaaagatttctgtgtgcacaaagatgaaccatgtgatactgttggtaagtgtgaaaattctcacacttttggagttctggagaacttgaacatatcacttgtttaagtataggaaattatttgtgttctggttataaaggaataacttcaaaatgtcagacatacatattttctacctatatgtttaatcatttgtcagcacttcagtgtaaaagacatgtatcaactatatatattggagacaatctttaagtgatgctttaaggctataattagtccttttttgttattttctcagagatacacacatgggttcaataaaattttattattattaataaccaaagacaaaatatattaatgacattatgtttgactaatttgcaggataacagattattttttgagttatgtatgcttaaagaccttcgcagactgtgtcgaaataaactgctagattcagtatgattcttcttacatgaagtggcaaatttttcaccatttgtattagatatctaaagtgcctaaaacagaaccagatagccaacagaattcatgaaaccactgttcttctaattttgagaaaatggtcacatatatgttcatgttttaaaatgtatctatataaatataaatgtatctatccaaagataccccagtctttatatataaatatatatatttaattttaagttacatagctgtgtgtaacaatatattattggtaaggttcatttaagaattgtaatctaattttggcatatcatgtagggttcatttctacaggatgagcagtattttaacttgaccattttgttgtgtcatttgtttttttataaagtgaataataaataaaagggtgtagaaacagaacatagggatattagtattttaaaagataattctaactagttccattaacctaatttttcatcaacctcctcatatgtttaaaatcttagataatgtaaggatttttgacatgtattattcataaaacttatgatggaaagtagttataataatgtaaagtggatgatgatggaatcaagggaatatttggttcagaaggaattgtcggcatgaaaagagctgggcacctaaggaaaagcggaattgatgtagggaccatcttcctactgttgactctcttgcctgcttcccccagttttcttcttttcctgtctgaatctccagaatttaaaactttatatctggtttttgttaccctaaccatggaagcttttgattaccagtaaagcttgtctcaaaataataaccttttctttcatgtaagcagcaatgttgcccccaaaagccttgtttgatagggacagctcaacatcttgccttgcttgagcacatgtgagaaatcagcaactcaggcgccatcttccatagctatacacacgaactgactctttatagcctgtaagcagctactaataagaagaaccaatttctgttttgatgacaacagaacttcacatcttgctaaatctgctaattcaaaattgtgtgtatatttgtgatatagtatatgtaaatcttattttctaatttaaaacacatttgaataattgagtacctcagtgtgttctgataatcagagtatgtaagatttggcaggaaagcaatttattgaatctttggctctgtttgtcctgttcattaagatcttcaaataaatcagttttaaatattacagcatagggtgtgaaaagtccagtgcccttcctgaattctctctgttttgctgattccttaggttgtcatcagcacctctgacatcactaaagcctagttctcccttccgtatcttatggcagatttttttcctttagcccaaatatagatgggatctttccctatgcagtcttgacagagtaaaaatctgaaatatttcttcaagagaggtaaaatgaaaacttataacaaccaagtcaaattaatctgtttcacccaaaccccacaaaaaccttcttgtcacactacctatgcctatgtctggagtcatatacagtcagccttctgtattatggactccatctccatggattcaaccacttgtggttcaaaaatattttgtctaaataaaaataagaagtaaaaatgcagcgataacaaaaaatgcaaattaaaagtaatatagtataaccactatttacatagcacttatcttgtaagtgctaggtattatattaggtattaaaggtaatctagagatgattcgaagtataggagaggatgtgcataggttataatcaaataccactccatcatataaaaaggaattgagcatctatggattttggaaccaatcccccatggatacaaagggataactgtatatttataagatttataaagatatttgtgagacatatacattgtggttgccacctcatcatccatgcatctaccactgtgtagctgcaatgctatgttaggaaagggtaaccctatggggttgggttatgattagtctaggcctctcatggggattgtttcaggaccctaggcctaagccagtcagcacatgccattgccctagttgagacatatgatctattccctatatttgcctcaacaagctgaaaaaggtagaatttttgatggttagagcttgatcatatatgcctccactggatataaagaaggaagaatgcaaccctgatcactataatcaggaaggaaaccatccttaggatgaatctgacatcatatactgcagaatgaagagatggaaggtttctttctcctggatgatattgttgaatcctccaaccctggagcccagtctaatgtttgggtttctgaatatgtgagtcagtatatccttattactaagccagtttaagacttttacgttacttgtagcctaaggcataaaaatattccctgatgttcatattttcatttacagggcaagaaaaatatggcgcaatattaataacctctctattgttattaagagaaaatgctggtaaactgctctgtgacttgttaaaaaattaaatgagcatatatatagcttatcaatcatcttaacagctatcactctctagtaaaacaaagccaaagtgatttagggttaatatcaataaaatgtttattcgtacacattttaaaatctcctcatgtaatccaaagggatatattttttgacagatgcttttaagtcattgtttacttcttttctcttttatctataaccgatgtgaagtcagccattttactttttttttctgtaatgaaaatatggaaagaggaaagagaaagggaagaagtggatttagtatttattagtttggatcatatagggttgaatgataactttaagatgcttctccctattctcctaggtatagtaagaggaaagaacagcacttacaggatttgaatttatattattaatgtgagttataaatggagaggaatgcttgtattttcaaagcaatggtaagatttatgctttgcactgtaattcaaacagtattttcatggacattatctcatttaattccctcaaaatctgaactccctagttttgttatcattattattttacagatgaagaaagccctgaaaaacaaaaggatcatagattttgaagtcagatgtctagatttaaatcagggctatgctacttattgactatgtgaatttaggcacactaatatctcgaaagcttggattcctcacctttaaaatagaggctacatcttctatctcacagaatgctgtgaaactgtgacagtcgcaaagcagctagttaactggcattttatctacaccagtttctatcacatcctgttattccccatggagaggttacagattttcccagaatcactgatagtaaatgatagtgctagactctacctcagatcttctgactgtactgtcacctttcttttataacattgtatttttatacaatagataaaaatacaactagaaaactgaatgtgagaacactgtcttcagatgaagatatagaattaaattggaaatgacaaacacaaacttagaaataattttatttaccaatatttcaactttaaaacaatagaatattgtgctcattcgctgagtcaaaaggtttgtgcattttaaatgagttaggctatgttaatgttacagaatattattaagcaagtgcttccgttgataaattatagttatttactaagcttatatttgaaaagctacatgggggataaaaagtaaaaataatttttaccaccttctcaattacacactttttcctgttgatatagttatgtagatggtttggtaggtcagtaggtaggtatgtagatcatggaagaaaatacatgctattatatgttttaacccataaaaatatcaatttaaaaacatatgtgcattttccttttaaatccctgaaattaggattcatttcacaatgaatggcttaccagggttgtcagaatttaattcaaagtttttaaaatcttagattgaatgaactatagtggtatacttaaatttcaagggaaataaagtatatttcattgtgcaagtggcaactatctctttgctgctattgattatgaagttgccttaatttttgtggtaggcagaataatggtcctcaagagtgtatttgccctaatccctggaatttatgaatatgttaggttacaaagcaacaaagaattaaggtagtggatggaattaaggctgccaatcaactgaccttgaaatagggagattatcctgtattatcatggtaggcccagtgttgtcacaagagttcttaaaagtgggagagtgaggcagaaaagttctgagtcagagagagacatgattactaaagaaagacagagatacaatatgaaaagaattcaactcattatggatggtttgaagaatgagggggttactagtgaagaaatgtgagcagcttctagaacatgcaaaaacaaggaaatagaatcttccctagagccgacataagtgaacacaaacagccttttcaacacttgattttagccagtgaggtctgtgtcaaacttctaacctagaaaactgcaagaaaataaatttggataccttaagccactgaatttgcaatattacaagcagccatggaaaaccagaacactttctaagttaatgttgcctccatcatttagagaaagaataaagaaacgtggtgatttcaaatctttaaactgtggtatcaacaattctgtttctgtggttagttttgagaactggtaaagagcttgagattagataaaaagtagtaattggtaccatgatatataaatatatatataaggagtaacaaactcaggttctgttaacaaacatgattaattatagttaactatttctagctgagagattagccaaaaagaagcctatctcttcttttaacaattaaataaattgaatcaattctttaaaagctacccatggccaagcacagtggctcctgcctgtaatcccagctctttgggaggctgaggcaggcagattgcttcaggccaggagttcgaaacaagcctggacaacatggtgaatctctatccctactaaaaatacaaacaaattagctgggcatggtgacacgcacctgtaatcccagctacttgggaggctgaggcaggatgatcgcttgaacccaaaggcagaggttgcagtgagccgagatggtggcactgcactccagccttggcaacagagtgaggccctgtctcacaaaaacttataataaaataaaaataaaataaaatctacctacaaaaatactaggctctgatgatttttgtagttgatttctatgttccaaagatggattatttcaatgttatacaaactattttagaaaatagaaaatggagggattaaaactgtataaatgtcttactaaatcctaagaggacagagtaaaatagaaaaatgataagcccttctttattaggaaagaaattaagaaagtcaaaaccaaatattagcagatattatcttacaatgctttttttttttaaataaccaagtacggttattttattgcaggtttattccagaaatgcaagagtagtttaacattagaacattttaaaatgtaactatatattccaattaaagataaaaaccatatgatcatcttgtttggataaagaaaatgcctttcatacgattcaaaacacattcatgataaaaactcttggcaaagtaggaactttattaaccagtagaagtcacttacaaaacaacttgtaaatatctttccttttaaacagtggagcattaaaagcattccttttagaatcagaaacaaggaaacaattctgctaccaccacttctattcgacaatgcactgaaaattttaggcattacaataaactagataattgtattatctacataaagaaaaaacagattatagaattaaattatgagaaatagtaggagagtttaattggtggttagatatcaaatcaatatgcaataaccaattgcattttattttggtaataggcagtaagaaattaaaacttgtttattttatgtaaaatatgaaatatattgaaatatatctaatgacaaatatgtaagacatatggacaatattatagactatattacaattcattaaagaagaccttgatgaagagatacactctactcatggtctgaaagactaagtatgatacaaatgttcatttccctcaaactgatctattaatacaatgcattccattaaaattctaacgagagttttgaaggaactagataggatgattctagatgtatagaggaacataggtctgaaaattgccaaggtactgttgaagaaagaatatgggaaggaaggaaacctgcgctatcagataccaagatatagtacacagtaaatatgaaaatgcagttgcctgtatttggaaattgatgtatactgcagatcactgggtaaggcatagttcaatacattatgttaagttggttattcacatgaaaaaaatttgagattaattcatatggtttaaatttgcaaaaacaggagtctatttttgatgtagagacagacagatttcttagagagtacacagaaatgttaatcataaagaagctatattaatatttaaaatgtatgcatattaaaagacatagtaatgaaagtgaacaaaagcaagcttctgtcagggagaggataccatatttcatggattttaaagtatcttcaattttcattgatttcaagacataccattactttatgtatcactaaataaataagacaatgactaattttaattctcagatattattgaagacattacaatgtgaaatgaggtgaatcttagaattattgatgtatattaatagtatttccaatacatgtaaccaacaaagtattagaacccagagtataaaaacaacttttctaaatcagtaagtaagaaacaaacaaggaagtagacatgccaaatagggcaaaagactccaaagaccatttttggaagataatacatcaagggtgaattaaaaaaaaataaaatggtaagatgcccaacttcattagtagtaaaggaaatgaacattcagatcacaagcagatttctaccagtgggattgatgaaattaaaatcttacattataaagtgatggcaagtatgtgaatctatggaaacaatgtgcttcaggagtgaatttaaattggtgtaatcattttggagaactttgggcggtatttagtaaaactggcatttgtacaacttgacgtcattaattacattcttacacatacaccttagagaatcctatatgcattaaagacatgtttatgatagaaatgcaaacatatatccaagtccaaagtttatcttttcttttctctcaggaatataaagctcttaaaacattctacatcccctgtccttattgtaggctgttaccattttttaaaacaacttatttgatttttaaaacacacaagatgttatgtttttctacagtcagtgctcaattagatttattcacatatttattattttattagtttttattagttcttcattctttcttacaaaccagttctctatcctaatcttactttcctcctattgaagcaatatttattagaatttcccttagtaaaagtctactggggacacacacttaagttttatttggtatgaaaatgtcttaattttacttcaattcttgaaagatattttaagtgagtataaaatcccaggattctggatacctatttggtatttttgttttttcagcacattttgaagatttagttgacctgtcctttggcatccattgttgctcttgaggatttagctatcagtctaacttattttaatgccatttgttctacaaaaacaaaacaaaaacagagtctaggttaaagtagacaagttttcatgctataacttttttttagggagcaggttgtttttcttatcatttcattgagtttagttatttgtgtgggagggtggggaaagatggtatcttctcccactcactttaattagaagtttcagttctgagacctcaccttgaacaggcattatctttgtcccagtgcgatggctaaggctgaacattttggatctgagattggcaaatgcctataggcaaccagcacatcagtgccagctcagaactcttccctgcttttccttcagcccatggaaggatttcccttaagagtgaactcagctatgcatttaagatgatttttgttatttttactccgtcatttatatgttcaggtgattcgcaaccagaattttctcactgctggaagtagaatttcaaggaaaactttttaagtactactgtactttatgtatgtatttttatacatacatatgtttatacatcttgcagcaacatttagtcacacaattcagtttgctcaacattcacatgtgttgtgacactaacttggataattggttttatagttaagatgtcaccgcaagtttttttaaaaaaatagttttagaaactgttttagagatgttcagattgtctgtatgcctcaaggtagtaattattaaactttttggtctttgtactcctttacattcttgaattatttaagatcccaaatagatttttatgtaggttacatttatcaattattgctgtattagaaattaaaatagataaattctaaaaacattttgatttatttaaaattaataaaacatcaaatgttagcataaaggacatgcattcataatttttacaaaaattagctatattatctagaacaataaaaatagtgagaagccatggctttgttttatatttttgagagtttctttgtttgggttctagaagacagctgaatttcatatctacttctgcatgtaagatgtttctgtatgttattacggttgacctgtatgaggaaaatgtggccttacccagaatgaagttgaaaaatggaggactaattcctggctaacaaggtgaaaccccgtctctactaaaaatacaaaaaattagccgggcgcggtggcgggcgcctgtagtcccagctactcgggaggctgaggcaggagaatggcgtgaacccgggaagcggagcttgcagtgagccgagattgcgccactgcagtccgcagtctggcctgggtgacagagcgagactccgtctcaaaaaaaaaaaaaaaagaaaaatggaggactattttcagattattgtgcgttttctaaaacgcatgtcgtagtgttttaaaagtttgtggaatgggacaatgtagaacctgaaagcataggatgaactttcacactctattatattaatatctattggtatatcttacactttaaatggatcttttaaccctgcatgactttttagtatcaattatctattgattggaatatattagttcactgagtcaggcagatcttctaaatgttgacacatttcaccctactatctatctatctatctatctatctatctatctatctatctatctaatctatctgttaatatcaccatctatattatcagaaaagtatttaagttttgagaagctgtcaagctcatggtgacagatgaaagttttccaatattctaatttttcacttgaaaacttgaattttattcttggcaagaaaaatagtcataataccatcagttggtttttatagagtgacaagttcactttgttcatttttaggcaagtattgctcagatttccaagtctgaatactgtttgtcacttattatttcagtgaaaaaatgatgcttcatgaaaagcacagctggctcagctcataactcaaacaatctcacagtacttttaactgagacatcatattttagcctgcaacagaaatgctttatccatacttcctttttgttacacaaaaatattttttaaatgtatatactcaagtgttgagatttgataaaatgaataaatgttactgctacatctggaaattttgaagtgaaattgtcatggtacccctcctgggagtaagcggcagtgaataaaatgactgacagtgaagttggtgccactgtcttgactaggcaattttacctaccattactttggcaccatcactacaaatgtcaacacagttttaactttgtatatacctcttgaaaaggtcttagaagacccactgaaagggtcttatggaatcccaggtttctgcataaccctctttgagcaattctgccataagctgagaatgattgataatcaatggggatagtcagtgtttacgtgtgtgtgtgcgtgtgtgtgtgtgtacacgtgtttcatgagactttttaaggactttaacatatagaaaattggtaaatacttaaagctggcaaagataaatgctgattgaataagtttcctgctgtgaatattcctctaatacttgttgatgagagaggctgtgtatcctttaccaccaagttcccagctctatgatgctctgactctccaggcattctatggaaacttagttgcttcaacatcctaacttttttttttctgtctttgagcaggttggaatgatccaggttattcttctctatgcttctgaatattctgattttatgtacttgacatattgtcaaataggtatacagaccacccaggaagcaactgccaaaaagaagcatatccatacactaaaacatatttaaatagccctttatgtcaacactgtactgtgagaatctccagacccttccctttccaaacatcagtacattcttcataccacatttcagcagaagtaatcatttttgccaggtgagaagaggttaagctcattttaaaatagcttaatttttattaaacagcaatttggcatttttttttttgcattatagcacctcaaccatagagaatttcagggacttaaaatacttaaagcaattattgaggtcatctttttacttcaataccttttatgatagaattatattgtttgtactgaaaagccttattagtttaatatattacatatttttaagcctttggactaggcgaagaataggttaacttttgtctacataaatcttagtttctaattgaattggtagtgtaattaagtattcaagggagttccaatgcattcattggggatttatatattcaaagtccaatatcaagctctatgatggattcaaggttgacaatcagatttttgcccactcagtctagtgggacatatacttttgcagaagaaattagcaagcatattagaagcctgtgcccaccttcaatgggtaaacttttataaaaaatattttttgaaaaatttttgaatatttagaggtcttcacatttgtgagagatatgctgttataatgcactgctcagtgattaacacaggaagcttcagatatgcaaatagaatatattcagtgtggtagacagaattctaaatatggcaatcccaagatttctgacctctagctattcaatcaaatgctaatctaagtactgctgtgaaggaattttgcagaggtaattaaagtttttcagtttactttaagacatggagatctaaccaggtgaaactttttttttttgacacgtagtatctctttgtcaccgaggctggagtgcagtggcgcaatctcggctcactggaacctccgcctcctgggttcaagcgattcgcctgcctcagcctcccccttagctggcattacaggcatgtgccaccatgcccagctaattttttgtatttttagtagagacagcgttccaggtgaaactcttaaagcagaagcaaggcactgaattgtagcaaaaacctgcatgagtttgtaagctgatactttccaaaacctttaaacaagagcacagcctgaatgatatattgactttggccttgtgagaccttaagcagagaacccagtcacgcccacccagacttctgacctatagtaatgtggaataataaatggctgttactttaagctgttacattagtggtaatttgctacgaagcaatagaaaactagctcattctgactaaaggatgcatattatttcatattaattgggggcttttatatgggaagaaaacaagtccaccttggatgcaagtatatacatgatccttggtgaggacagaataagaaggaagaaaatgtttgttaagaaataaaagttaaggggagaaattggaagagattttcatttatcatatccgatgagacagtaaaacagcaaaaggattttacgaggattttggaaggacttaatacaattctgtaatcattccaatttctccatatttaatattcatttcccttgtcccatcagtgatgaacaaaagcatattaaggtgatatggctctaaacacttgactgtggtacagaaaggaaaggggtcgggaaaattggtccttcaaggaggtaatttggatggtgccagcttggaatagaggaaatgcaagtctctgggcctccagcagagaagctaagaaaatccaatggagtcagattgggcctgggcatgacattagctttgaaataaaaaggcctgtgaggtttatttatatataaggtaaacatatattttgtagttcataccaaggaacttttaaaagttaagagacataattatgcttagacaaaagcagaagttgggatgccctaggcaaagtagccctatggtcactctattgttgatgaacatgtttaagatattaaacacactaatcagaatttttaataataaatttaaaattacttacttcagagatattaaccatcacaattatttctataatttagatttttcattatttaatctcccaataattataattagacttaataggaataaacctatgagcatttgctacatgtattagaagctgattctataccatttctcttaactttgttttcatttaatccagatggccacaaagcattggctattggcacattatgatggtctgggtctcagatatattcgatacacagagagtaataaccttcatcttgtactaaattctcatatctgagaggcctggaaatatactttgaagataatatgaaatgtgctactgtatccattttcctcaatttttattggttcttgcatttcagatgatcttcttttcacttctctttcttatcatttattcaatttcctccaatattttgaaacccctattctgtgcccaagtttgtgttaggtgctagatgctagaaatagagtggtgcctaaaatgatcctatttatatattctttaaatgttttcctttttcctagcctttcattattgttgcccagataacctaaaaagtttcctatttgtctcccttttatactgagccaacattttatctttttctatcatagcttacgagaataaatgtattgatacatatctcttaaacatagagaagccttagtattttcttccaaatctggatgtgaagggaaaaaaggtctgccatcaaattttaatgatgttggtttgatcagaaaactctattttgaactcagtagaaatttttcttagcatttttttaagcaacagtattggggaaaattggcaaatctgtttttttcctttttgtttaatcattagtatgctaataatattaatacaatttatattattttaaagcagatgtctagtaggttagttctactatggtgtatagaatattatcaattattacatgacaaaatatagaaactgtataagcccatacagaagaaaatccttttgtcaaatattgcagtgctttgggactttaatatgtaaataatctagtgatataccaaagttgtctctgcattttccaggtccttcccaatcctgtcctctaagtagttggacagtggaaataactctaaagaatgctgagataatggaaatgtttgatttgcatcatagaaaaaaaatataattccctaggtagttttctttgagttataagatgctagtgttggtttattatttttattttttgcagagaagtaactatctctgtctagtttcaggtaaactggagtaaacacactccacccttctctctcccattgaatgcacctataaaacttgagagaatggaacacctgtttgaggatttttaaaagtaaaagtaacaggctgattgggaagaagatatgaatttgaagtgccaccaaaccagcagtgagtttataatttttctctctttttgtattctccatcttggattcaacacagcccacacttgtaagttgtcattagggcctgtagagataaaacactaggagaagccctcccattctggattaaggaccaggaaggggccctgatgctcagagaaagtaggagaagcccttcctttaatgtctacattctcttctgccccatctcccatcttctacaatcccatgatagcagcagcaggggtagtaacagtggcaggaagatgagccataaaaatttggataaatcttcctctctgatctgaacagctttaatcccatgaggatggggtagacgccattgcttctcatctcttgattccgtctgcttgtacgtggaaacagacacaattatgagaacacagcagagaggtaactaactccatactttctgaaagcaggaaatgagaactgcatggaagtggaaggtgcgaaaaagagcatggagagggaagggcttaggaaagtgacctcaaagctgtttaccaacttgtgctcaaccttaagctttgtatgtgtggatatgactctaaaatttctttgagaacagagctattacaatagcaatgcaaaggccttgaaaattgacaatttaaccaagacacgcagaagccttgtaagtttggaacttatagcatgaaccaaactaggttgattttatgctaaaaaaattaacattcttcataagatttaaataagtctcctaatgttataggtaaaatgtctagaacacaattcaaaattattttacatataaaaacatgaaaatctcaatttgcatgggaaaagacacccaacagatgccaattctgagatggcacagattttggaactatcttgctagactaaagcatttattataaagatgatctaacaagtaagggcaagcatatttcaaatgaatggaagggtagaaagtcttagtaaataaatagaaagaaaaagcaaattgaagttttagaattaagaataaaataattggaataaaatctctctggataagctgaatagcggcatggagctgactgagaaaagagtcagtgaactttaagacaaatcagaagaaactatccaatctgataaatgaagagaaaaaagattgggaaaacaataccaacagagcctcagaaactcactggttcctgaggcacagtagttatcatgggctccaggagaagaaaaaaaaaatatgactgaagacttctcacatttggaaaaaaatttaaaccatcagatttaagaatctgagcaactccacacaagaaatacacagagaaatgcacagctggagacatcataatcaaactgctgaaagctaaagacgaactaaaaatgacaccaaaaaacaagctgttatttataaggaaacagtgattccaatgacagccgatttctcatgacaaaccatgaaatccagaatccatgaaagaaaggattgtcaatgtagaattctatattttcaaaaaatatttttcagacataaaggtaaaataaggacattataaaatgaagaaaaactaagagaattcatagccaaaattgctgctttaagagaattgccaaaggaagtagttctaacagaagggaaatgatacttaaaggaaacttggaacatcaggaatgcagaaagtaaaagaaatgacaaatatctggataaataaaatagactactctcaaccccagaatattttaaatagccttgatatttgaaagcaaaaattgtaacattgtctgttggagtccatgatgtatagtagatttaatacataagacaacaacagtaatacatggggggggataaagggactttcatgttgttaattaagctttcaatattccatttgaaatggtaaaatactgattctaagtagacttttaagggtgaatattatgtaatgtaaaacctatgggaagcaaccactaaaaatatacacagaaggatgaaattaaaaacacaataaatacactgggcatggtcactcatgcctgtaagcccagcattttgggaagctgaggctggtggatcacttgaggccaggagtttgagaccagcctgggtaacataatgagaccttgttgccacaaaaaaagtttaaaaattagccaggcatggtattgtgttctggtaatctcaactactcagcaggctgaggtggaagaatcacttgaacccaggagtttgaggttacagtgagctatgatgacaccactgtactccagcctgggtgacagagcaagaccttgtctcttaaataaataaataattaaacaaatcatttaatattgaaaaaatattcaaaaaaaatagaagtcaggaaaggataacagaagaaaggataacagtaaaaacaacatcaacaaaaaaaataataaaatgttaggcccaaattttcacatttcaataattcattagatataaatagtttgaacacgccaaataaaaggagttcttcagaactgattaacaattcaaagaccccatctttgctatctgaaagaaactcacttcaactataatacacaggttaagagtaaaaggatgaaaaagatatactgtggaaaaagtagtaaaaagtaaaaaacaaaaacaaaacaaaaaaaccctcaagtgactatttatatcagatgatgtaaatttcagaccaaagaaaattaccaagaattaagagggacattacataatattaagggatcaattaaccaaaaagatatagtagtttaaatgttttagcacttaacaatagagctttaaaactcatgaagcaaaaactgacaaactaacaggaaaaatggacaaatgcacaattatatttgaaatgtcaacactcctctaagtaattgataaaaccagtaaacaggaacttaacagtgatatagaaaaattgaaaaccaccgctagctaacctttacacactgctccacccaaccatagcaaaatatgcatgcctttcaaatgacatggaaatttttccaaagggaaaggaacattttctagctcataaagcaaacctttaccaatttaaaggaatttaaatcaaacaaagtatattcctgggcaaaatggaatttaacttcaaattaattacaaaaagatagcaggaaaatgttctctaaatgtttggaaaataacaaattctcaataatttatgggttgaatgaaacatttcaagggaaattactaagtgttttgaactgaacaaacatgaaaagacaacatacaaattggaggatgcagaaaaagccatgcttagagaggaatgtatagggttaaatgttcttattataaaaaaggacagatctcacatcaataatctaagaatctacctaaactggctgaaaaggtagaataagcaaaacaaaacacactcatatcaaccagaaggaaagaagtagtaaaaataggagcataaatcagtaggagaattcccctatttcttcggataattctcctattgactctccaaaagaattctcctaaatcagttctcctgttgatttatgttcctattgatttatgctcctgggaaatcaaaatggaatagcaatagtgaaaatcagtggaaacaaatttttttgtggaattgtgagtaaaatttcaaacctctagcaagtatgacaaagaaaaatagaaagtagaaacagtttactgataccagcaatgaaagggaagatatcattatagaccccacagacattaaaataatcattagggaataataaaaatagctctgtgagcatcagtttgacagtttagattaaatggaccagttcattgaaatcctcaaacaaaacttatccaaaataaaatagataatctgagcagtcttattaaatattaaagaatttgagtttttattttaaaatcacccaaaaataaaatctccagcactaggatgtttcattagtaaattaaagaaaaaattaagttaaagaagtttcattggttaattaaagaagaaataatacaaattttacattagatctttcaaaaaacaaatgtcaaggatacttagatttaccgatactaaaaaccaaactaaggagtacaggaaaaaaattaaaagaaaaaacgtatacaccaatatttctcatgaacataaaaacaagtattagcaaattgaattgagaaatatacgaataacagaagagaatcaagtggggcttatctcaggaaataaaggctggttcaatatttgaaaatcaatccatgcaatcaaatacattaaaagtctaaagaaaatgcatgttgaccatgtcaactgatgcagaaaaagcttatgacaaaattcaccatctattcatggtttaaaaaactctcagaagcctgtgaataggtggaaactgctttaacctgataacaagcatctactgaaaagaaaaaaggcagttaatgtcacatttaatggtgaaaaaacgaatgctttctgactcagactgaagcaaggcaaggctgtccactccatccctcttaggaaaaaataatcccagatatgcaattaggtgagaaaactaaatgaaaggcataacaaatatgaaggaagaaataaaactgtctctgcagaaaacattattgtttacatagaaaatatcaaggcatgtatgaaaaaactcctaaaactaataaatgaggttagcagaatcaaagaatataagattaacccacaaaaatctaatgtatttttatgtactagaattggatactcagaaaccaaatttttaaatatgtacatgtatatgtgtgtgcatatatgggtgtttatgtgtatatgtgtatgtatatatatgtatatgtataaacattaggacatgatatatatgtgtttctgtgtgagtatatgtgtgtgtgtaatcagagctccaaaatgaaaaaatgaaatatgtaggtataaatttaaccaaacaggtacaaaatctgtatactaggatctacaaaatgccgatgggagcaataaaagatctaaataaatggagagaaataccatgtttatggagtggaagacagcatggtatggatataccacttctcagactgatctatacatttaacataatgcaaataaaaatttaagtgcttttttgtagatatagacaagatgattctaaaatttatatgcaactgaatgatcaacacaattttgaatagaaaaatcgtttcggagaaatactactcattatatcatttataaaacaagggtttagtaatcaagacagtgtactgtcagcgaaagaaaacatacataaatcaatggaccaaaatagagattccagaaatagatccacacaaataggggccaattgattttctacaaaggtaaaaaggctatccaatgaaaaaagttttatctcttcaaaaaatggtgcttaaaaaattgaatatcagtatgcaaaagaatgaccattatacaaaagttaatacaaaatagactattaatccaaatgtaaaatgcaaaactataaaaacttagtagaaaacataagagaaaatcttgatgaccttggattaggcaaagagttctttcatatgacaccaaaagcttggtccatgaaaggaaaaatgataaactggatttcatcaatattaaaaaacaacaaaagtactttgttctgttaagggattaaaatacaagtaatagccctggagaaaagatttgcaagttgcatatccagatactaggacttgtatgcagaatatgtaaattactcaacattaagaaatcaaacaactcaactctcatacattgttgctgggaatggaaaacttcacaaccgctttggaaaatggtgtggcagtttatcctaaaggtaaatatgcacttaacatatgacccagcaatcccacccctgagcatttacttcaaaaaaacgaaaacttacattcacctaaagcctgatcacaaatgtttatatctgatctattcataattgccaaaatttaggaacagtccaaatgttctttaacaggtgaatggataaacaatctgtggtacatccatacaaggaaatgctattcagcaatgaaaagaaatgaattagtgatccatctaactgcttggaagaataccaaagcattatgctgagggaaagaagatagtctcaaaggttacttactgtacaattatatttatgtgtcattttctaaaaaacaaacataatgaccagatgagtgattactattgatgagggagaggggaggctgtaagtttacaggaatagcacaaagaagttttggggtgtgatggaaatgttctgtcccctgattattgtggtcattgcacaaatcaatagaagtgttaaaacacagaggacagtacagtaaaaagaaaatgttactgtatatgaatttaaaaattaaagttagaacaaaacaaaaaagagtaagaaattttatctgattgttagatttgcttttagcattacaactgtgtattccacaaaaggtttgtgcacgttgtgccctttgcaaaggtacctaatctatagggcctacaggggagtacatattgaaatccatcccagacttcacctgccaatccctttttctaatccttccatgaacttgagaagccttttaaaaatatccatcttcccagttttgtacctcttttaattgacattaacatactgtcataaatgaagccttgcttaggaccaatattttttgcagattttagtgagtttctgtgttcaaatacattgttttagaaattccaagtggagagctatttcttcgttgttcctttctccctttattccttttccacatttgacccattcttcagaactctaaataaattcttttagatatcctaggttgtttctcagccgaccacgcatcacatttcagtatgcctttcttataacttgcattttattcattctgtctccccagttagattctcatctctgtgtgatcaaggatcttacttaatgcatgtctgtctcttcagcacatagcatagtcacctgagcttcccatatctatatatttcggaatagaagtgaatttctgataagaaaatatttcctatggttcacaagaaaagcaaagctgaatgtaatcatgtttaatttttggctgtcttgtatattttattaggcactggccaaaacctaaattggacactttatatttctattttagcaatagggataaaacttggatacattgtcaaagttgattgttcttaagatttttctcttctcaagattctttactgttaacaattgactttaattatagcattttgcttctattaaaaatgttttgatggtgctattaaataatatatgaatattaaaatatgttgattatatccttgggaaatttagaccatttgaatttagaaaccccccaaagtcctcatattttttttcagttgttgggataaactctggaaaatggcagctttctattcatcacacatttacccaatgttgtcagtgaacaataatacttgttaagcatctactaagtaccacgggttttaaaatgtcacctcttttaacccttggagaattcaatgcaataagagattatttcattttacaaataaagaaagccacagtttatgtttaatggttatcatattttagaccagccaatatatgcttgaaatatgtgtctaaattacttagcattcctaagacaaattatcacaattctaccggtgggaaaactgaatgtcagaaaagacaactaacttttttttcggcatttttttctttatttcttctaaaaataaataaataacaaatacacgtgcagaacgtgcaggtgtgttacataggtatacatgtgccatggtggtttctgcacctattgactcatcctctaagttccctcccctcgcaccccaatccctcgacaggccttggtgtgtgttgttcccctctctgtgtcaatgtgttctcattgttcaacacccacccacttatgagtgagaacatgcaatgtttggttttctggaaaactgacttttttatagtcacagatttaaaactgaggctgggattcaaaccctacagtatttgacacaagaccattggttattatttttaggcaggtccttttttaaaaataaaacatctttattgaggcaaaattaatttataataagcctgttttgcttatacaatttgatgagtttggatgtatatataaattcttaaaattttattctcctcatttgaccttctttatacttaatgcagaaaaaggtaaaaaagcatctattattaagttccaatcagaaatcagaaatttttttaagtatcaaagcattcttgaaaaaaaaaattaacgtgtttatttactatggcaatttcctcaatgtacaaacctaaaaactgatgtcttaaaaatacatctacagtttgagtcacttgaatttaaatatttattctatttaacaaattatgtcaaaaactatattaaactttatattttaaatagtaatatttaagagcttcagatatttgtaggtataattgctttgaaattataactattttctttatatttctgcagtttatagattacttgaataaaaatgctgatcacactgagtagaaagcaagttgtgaagaataacaaaatgattaaaaattggaatggtgtaaaaatattgtgtccaactgtttggaagtttgagttggtttgtagttgtaaatgaatgctgtcagtgcttttgctagtatactaaaaaagcaatttatacagctttttgctagcatgatatttaattttttaattgtccctatttaatgccttcaggatatgattatgttataacattgtaaaaatgtgtcagccagaattcctgatttatgtgcaatcagaacacttttaaatttttccagctgtatccttaaagttacttcatgaaaatcttttaactgtgattcatcttacctatttttcagagttatgacagtttgttaatctccaaggcagatgaaatcattaaacctaaataacttctttggcttgtgagcaaagtcatatagaaagtctaagaactctgacttttatctttcttttaattaacataacaatgagaataccaattttcagctgtttctgtgtagactgtgaagtagtgttcccattactgatttacaagagttagttgtgtaatctaccatgtatgactttttgattgtgtcataaacattatattttccgaggtacactgaaatctaaattaaaaatttcagatggggtattttattatgatctgtcaaaactacaataatgtatatcagagtttggcttaattcaaaatctctaaggatttgagggtttatcttctaaagccatccaataatctacccttatattttctgaagagggataagatgtgaatgtgaagtaggataaatctggaacaggagcacaaaagctagctgcagacataattttttttaacattcttccttccatataaaagcaatccatctcatcatcttaatgcggggaggaagggggtgggtgggtctcggtggtgtagtttgtaaaaaagcttaaaggaaatataaaacaataacagcagaaacaaaccctattttggaatgtgttctttactatgacatccttctcatttcaaagagcagaatttagaaatcaccactgctgctcctacataccattgtccctgtgattgaatctcctttctttcactttttctctaaacatttacttgaatcatctttcatcttcttcctcctgtaccatattaatattttatataaaagcttgccaaagatgtagaagtgacctatgtgtgtacacacacttttaaaaatataggtatttccatctgtacttaattttgtctccatacacggagcagggcaaaaaattatactaaattaggcaaagaaaatgtagcatttagctttctacagtgtattaaatctttctcataagtttctatttcacttaattccaagaaaatcaaaacttaaaattgtcaatttgtgttattttccctctagtttaaattgctttattcttttttttttttttagttaaatacccattttttccaaatagcccctcctaacctctcatctggtgctttccaaggagctgggagggggactttgtgtaggtcagcaatcacaggttctttcactactctctgaaacttttttgatctttgcagtaaattcccttacttctgggcaaccagagcacactgttggatttggtggccaaccatgcagttggcgagtgcaacttaagcatattggctgacctacctattcaattcatctacaccacaattttttatctttcccctgatgcttaccctactagcttgtactgctgaagacactgctgagcttcaggcacatcatccataggttccctgtgttaaactgcccacctctctgacttccatggcagtcggagtcaacgtgggctcaggaataactcagcccttctctctgcctaattactcagtattttcactgcttttcttcttgagccatcctatactgacatggaatagagttccaaaagtgttcactaatcctaattcctcctcacctgccatcagagagaagcctttagaggactagaaagacatcagttacatggaaatagaagagagatgcatattaatgcattttcaaattttttattgctacactgtacgaaacatacctggactcataatttattcacctaaatatttttcaggttcccacaaagaattccagaaactgtttcacacattgggaattaacatattgttttatttcctgtcattgttgtgcttacattttgatggagacagagaatatacatattaaataattagttggtatattaaaagataaaactgatatagaaaaaatagcccatacaaataagggataatccgggagttccaggggagaaggaaatttataattttaaacagagtgatcaagaaatgtctcactgaagaaagtgacaagtgatatttgcataaaggtttgatgatgatctggaaaatacatctaaggaaagaatgttccaggcaaagtgaaatccagtcaagaggtcctaagatgtaacgatgcttgctcacatttgagaaatgaccaagagaaagccaaggtagctggaattgaattaatgaacgattacaggaatttcagattttgtatttctttttttgactgatttgacaaattgtaaaatttatttacatatatttgttatattgccttgatatctttaagaattgtagagatgtttccttatttattttgatgctggtaatttgtatttatctctcttttatccttgatagatttaccagggaattgttcatgtttttgccaactttcttatacatttattttataattcattgattttcctcttttttacttccttttatttttttaagctttaatcgtcttctttttttctttagctccctgaaggaatttattgattttcaaacttacatacacacacacacacacacacacacacacacacacacacatatatacatatacatacatatacatatgcatgtatatgtacgtatacgtacatatacctatatgcatgtatatgtacgtatacgtacatatacctatatgcatgtatatgtacgtatacgtacatatacctatatgcatgtatatgtacgtatacgtacatatacctatatgcatgtatatgtacgtatacgtacatatacctatatgcatgtatatgtacgtatacgtacatatacctatatgcatgtatatgtacgtatacgtacatatacctatatgcatgtatatgtacgtatacgtacatatacctatatgcatgtatatgtacgtatacgtacatatacctatatgcatgtatatatacacacatatacacacatatatatactttaagttctggggtacatgtgcagaatgtgcaggttacataggtatacacgtgccagggtggtttgctgcacccattaacccgtcatctatgttaggtatttctccttatgctatccctcccttaacccccaccccttgaaggccctggtatgtaatgttcccctccctgtgtccatgtgttctcattgttcaatgcccacttgagtgagaacatgtggtatttggatttctgttcctgtgttagtttactgagaatgatggtttccagcttcatccatgtccccacaaaggacatgaactcatccttttttatggctgcatagtatcccattgtgtatatgtgccacattatctttatccagtctattattgattggcatttgtgttggttccaagtctttgctactgtgaacagtgctgcaatatacatacgtgtgcatgtgtctttatagtagaatgatttataatcctttgggtatatacccagtaatgggattgctgggtcaattggtatttctggttctagatccttgaggaattgccacactgtcttccacaatggctgaactagtttacattcccaccaacagtataaaagcattcctgtttctccacatcctctccagcatctcttgtttcctgacttcttaatgatcgccattctaactggcgtgagatagtatctcattgtggtttttatttgcatttctctaatgaccagtggtgatgagctttttttcatatgtttgttggtcacataaatgtcttcttttgagaagtgtctgttcatatccttagcccactttttgatggggttgtttttttcttgtaaatttgattaagttctttgtagattctggatattagacctttgtcagatggatagattgcaaaaatgttgtcccattctttaggttgcctgttcactctgatggtagtttcttttgctgtgcagaagctctttagattaattagatcccatttgtcaattgtgccttttgttgctattgcttttggtattttagtcatgaagcctttgcccatgcctgtgtcctgaatggtattacctaggttttcttctaggatttttatcattttaggtcttatgtttaagtcttcaatctatcttgagttaatttttgtataaggtgtaaggaaggggtccagttttagttttctgcattctagccagttttcccaacaccgtttattaaatagggaatcctttccccattgcttgtttttgtcaggtttgtcaaagatgaaatggctgtagatgagtggccttacttctgaggcctctgttctgtcccgttggtctatatatctgtttttttaccagtaccatgctgttttgattactatagccttctagtatagtttgaagacaggtagcatgacgcctccagctttgttctttttgcttaggattttcttgactatacgggctcttttttggctccatatgaaattcaaagtagttttttctaattctgtgaagaaagtcaatggtagcttgatggggatagcattgaatctatgaattacttttgtcagtatggccattttcacgatattgattcttcctatccatgagcatggaatgtttttccatttgtttgtgtcctctcttattttcttgagcagtggtttgtagttctccttgaagaggtccttcacatcccctgtaagttgtattcctaggtattttattatctttgtagcaattgtgaatgggagttcactcatgatttggctttctattcatctgttattggtgtagaggaatgcttgtgatttttgcacattgattttgtatcctgaactttgctgaagctgcttattaccttaaggagattttgggctgaaacgatggggttttctaaacagacaatcatgtcatctgcaaacagacaatttgacttcctctattcctatttgaataccctttatttatttctcttgcctgactgccctggccagaacgtccaatatatgttaaataggagtagtgaaagagggcatccttgtcttgtgctggttttcaaaggggatgcttccagtttttgcccattcactatgatattggcagtgggtttttcacaaatagctcttattaatttcagatacgttccatcaatacctagtttattgagaattttcagcatgaaggggtgttgaattttattgatggccgtttctgcatctattgagataattgtgtcatttttgtcattggttctgtttatgtgatggattacatttactgatttgtgtatgttgaaccagccttgtatcccaggggtgaagctgacttgatcgtggtgggtaagctttttgatgtgctgctggattcggtttgccagaattttattgacgatttttgcatcgatgttcgtcagggatattggcctgaaattctctttttttgatgtgtctctgccagattttggtatcaggatgatgctggcctcataaaatgagttagggaggagtccctcctttttctattgttgggagtagtttcagaaagaatggtactagctcctctttgtacctctggtagaattctgctgtgaatccatctggtcctgggcttttttaggttggtaggctattaattactgcctcaatttcagaacttgctattgctctattcagggattcaacttcttcctggtttagtcttgggagggtgtatgtgtccaggaatttatctatttcttctagattttctagtttatttgcattgaggtatttatagtattcttggatggtagtttgtatttcttgtgaccagtttcagaacttgctattgctgtattcagggatttgacttcttcctggtttagtcttgggagggtgtatgtgtccaggaatttatctatttcttctagattttctagtttatttgcatcggggtatttatagtattctctgatggtagtttatatttcttgtgaccagtggtgatatcctctttgtcattttttattgtgtctatttgattcttctctcttttcttctttctttatctggctagtggtctatatattttgataatcttttaaaaaaaaaaagctcctggattcattcattttttgaagggtttttcgtgtctctgtctcctttagttctgctctgatcttagttatttcttgtcttctgctagcttttgaatttgtttgcttcttgcttctctacttcttttaattgtgatgttagggtgttgttgttataacttttccactttctgctgtggacatttagcgctataaatttccctctaaatactgctttagctgtgtctcagagatgctggtatgttgtatctttgttctcattggttttaaataacttatttatttctgccttaatttcgttatttacccagtagtcattcaggaacaggttgttcagtttccatgtagttgtgcggttttgagtgagtttcttaatcctgagttctagtttgattgcattggggtctgagagactgttttgatttccattcttttgcatttgctgaggagtgttttatttccaatgatgtggtgaattttagaataagtctgatgtgttgctgagaagaatttatattctgttgattttggatgtagagttgtgtagatgtctgttagttccacttggtccagagctgagttcatgtcctgaatatccttgttaattttctgtctcattgatctagtattgccagtgggatgttaaagtctcccactatggttgtgtgggagtctaagactctttgtaagtctctaagaacttgctttatgaatctgggtgctcctgtattgggggaatatatatttaggatagttagctcttcttgttgcgttgatccctttaccattatgtaatgcccttctttatctttttttttaatctttgtttaaagtctgttttatcagagactaggattgcaacctctgctcttttttttgcttttcatttgcttgtaaatattactccatctccctttgagcctatgtgtgtctttgcatgtgagaagggtctcatgaatacagcatactgataagtgttgactatccaatctcctagtctgtgtcttttatttatttttaatttttttaattttttgagacggagtctcactctgttgcccaggctggagtgcaatggcatgatctcggctcactgcaagctccgcctcccaggttcatgccattctcctgcctcagcctctcgagtagctgggactacaggcgcccaccaccatgcccagctaatttttttttttttttgtattttttagtagaccatgttagccaggatggtcttgatctccttgaccctgtgatctgcctgcctcagcctcccaaaagtgctgggattacaggtgtgagccaccatgcccggcccagtctgtcttttaatttgggcatttagcccatttatatttaaagttagtattgttatgtgtaaatttgatcctatcattatgatgctagttggttattttgcccgttatttgatgcagtttcttcatagtgttggtgatctttacaatttggtatgtttttgcagtggctggtacttatttctcccttccatatttagtgcttctttcaggagctcttgtaaggcaggcctggtggtgacaaaatctctcagcatttgcttgtctgtaaaggattttatttctccttcacttatgaagcttagtttggctggatatgaaattctgggttgaaaattcttttcttcaagaatattgaatattggcccccaatctattctggcttgtagggtttctgcagagagatctggtattagtctgatgggcttccctttgtggataacctgacctttctctctagctgcccttaacattttttccttcatttcaaccttggtgaatctgacgattatgtgtcttggggttgctgtccttgaggagtatctttatggtgttctctgtatttcctgaatttgaatgttggcctctcttgctaggttggggaagttctcctggataatatcctgaagagcgttttccaagttggtcccattctccccgtcactttcaggtacaccaatcaaatgtagatttggtcttttcacatagtgccgtatttcttggaggttttgttcattccttttcattcctttttctctaatcttgtctttgtgctttatttcattaatgtgatcttcaatctctgatatcctttcttctgcttgatcaattcagctattgatacttgtgtatgcttcacgaagttcttgtgctgtgtttttcagctccatcgcatcatttctgttcttctcaaaactggttattctagttagcaattccgctaaccatttccaaggttcttagcttccttgcattgggttagaacatgctcctttaacttggagaagtttgttattacccaccttctgaagcctacttctgtcaatttgtcaaaatcattgtctgtccagttttgttcccttgctggcgaggagttgtgatcatttggacgagaagaggcattctggtttttggaattttcagcctttttgcgctggtttctccccatctttgtggattcatctacctttggtctttgatgttgatgaccttcagatggggtctctgactggatgtgctaatcctttctgtttgttagtttcccttctaacagtcaggcccctctgctgcaggtctgctggagtttgctggaggtccactccagaccctgtttgcctgggtatcaccaggagaggctgcagaacagcaaagtttgccactggctccttcctctggaagcttcatcccagagagacacccaccagataccagccagaactctcctgtatgaggtgtctgtcaacaactgctgggaggtgtctcccattcaggaggcacgggggtcagggacccacttgaggaggcagtctgtcccttagaagagctcaaacactgtgctgggagatctgctgctctcttcagagccgcaggcaggaacaattaagtctgctgaagctgcacccacagccgccccttcacccaggtgctctgtcacagggagatgggagtttgatctataagtccctgactggggctgctgcccttctttcagagatgccctgcctagagacgaggaatctagagagccagtctggctacagtggctttgcagagctgagatgtgggctatgctgagtttgaacttcctggtagctttgtttacactgtgaggggtaaaccgcctactcaagcctcattaatggtggatgcccctccctccaccaagcttgaccatcccaggtcgacttcagactgctgtgctggcagcaggaatttcaagccagtggatcttagcttgctgggctccatgggggtgggatctgctgagctagaccatttggttccctggcttcagccccctttccagggagtgattcgttctgtcttgctggtattccaggtgccactgtggtatgaaaataatctcctgaagctagttaggtgtctgcccaaatggctgcccagttttgtgcttgaatctcagggccctggtggtgcaggcacctgtgggcaactcctgctctgcgggttgcaaagacagtgggaaaagcgtagcatttggggccggaatgcacccttcctcaaggcacagtccctcatggctccccttggctagtggagggagttccccaaccccttgcacttcccaggtgaggcaatgccctgcccgcttctgcttgccctccgtgggctgcacccactgtctaaccagtcccagtgagatgagccgggtaactcagttggaaaatcagcgatcacccactttctgcgttgatctggctgggagctgcagaccggagctgttcctattcggccatcttgccagcaaccctccagtctttttctttctaatatatattatgaacttccctaaggacagttttcattttaggctacacatttttaatgtgttcttttttgtaatgactatgttaaaatattttctaatgtcaattatacttttttaaaaataacttttgaacacttgtactatatccctactacatattgttgcatatattttgaatttggggagatattaacattaatgttttatgtattcaatatttgtttatggccagtcttcctggtgttcttcatttcttcctgcatttccgtgtttcaatttgcaatgatttttctttctgtctgaagaaacagtttttgtatataggaaaacattcttatggtacctgtatttttaaaaaagttgtttcacatagtatagaattagaggttggcagattcttatttgttataaaactttaaacatgccatttcattatttccagcttgtattgtgatgttgcagacacctgtcagctttattgttgttactttgaagtgaagtttcctttttctcctgggcacttttaagattctctttttttccttttcattttcagcagttttgcattgtgttttgttctgtttgttttgtttgattctgcttgttgcttcccaagcctttaaatttcttatagactattttttagagcagtcttaggttcacagcaaaattgagtgtaaggtacagaggtttctcttacaccccctgtccacacatatgcatagcctcccccattatcaacattcaccactagaatggtacattatttttacaattggtgaccttacattcacacattactatcacccaagtccacagttttcattagaattcagtcttggtattttaaattctatgggtttagacaaatgcataatagtatccacattatagtatcatatagagtagtttctctgccttaaaaaatcttctgtgttccacctatttattccttcttccgctcttaatccttggcatccaccgatctttttacttttgccatagttttgcctttttcagaatgttacatagttgaaatcatgcaataggtagccttttcagactagcttctatcacttagtaatgtgtatttaagtttcctccatctctttccatggcttgatagctcatttcattttagcactgaataatattgttggatagagataccagtttatgaaaccattcaccttttccaagttttggccattatgaataaagctgctataaacatccatgtgcaggattttgtatggacataaattttcagctgctttaggtaaatactaactagtgtgattgctggatcatatggtaagagtatgtttagttttataagcaattgccaaactaccttccaatgtggctgtaccattttgctttccaatcaacaatgaatgacggttcctgctgctccacattctcttcagcatgtggtgttatccgtgttttgaatttgggccttgctgagctttgtttattctgtgttgccttacaatttttttcgaaatacatttaatgattaattctcaaataaaaatgtcatattttgttgtctgtttcctctaagattcaaattagaagaatgcaacacctgtgattgtgtctcacatgtatactatgttcctctttaaaacattttctaattattttcttctctgttgctggaatttgggtattttaaattaatccaggaaactatttatctctcctcctatgtttaatttgcagttacattatctattgagataataatttactgattatcaactactaattatatatgtaattatataatctactgattataatctactactagagatcataatctactaatctcaaatactgtaattttcaaatcaagaatgtctgtttgattttttttataaatcccaattctttgagagtttctgcatcttttatcaattttgtctaacttttactcgatgttcttttttttttttaaatctcatctgctaactgctatatttggtcactccttggtgacagtttattgtcgtggtttgttcaaattgacctgctcacgcaagcctggtattttttgaatcaatgattaatttttagaaatctctgcagcaatggaggttccagatgatattattatataggagaaatgatttagtctttctttgtctagacagatagtatgggaactaatgatctaatttgggactgtattgtgtcacaagttcacatggagattctgttcggctcttcagaggtttggggttttgctatttaaaataccattccatgccaattttagaatatggcaattttcttgaaggagaatactctatggcttctcaattctccagttttgttactccggcttgtgctactgtcaaaatctccagccttttatgaacagtaaaatccagtgctgggtggcacctcccacccccaggttttttgttgttgttgttgttgtttcttctgcagttgtactcttctggatcaagtccagcttctcagtctctagttcttgctaaaaatcagcaaatactaacagggaaaaagtgcctttagtgattttgctcacctttgagactctctcctatttttaggatttaaaaacttctagtcttttttgtttctatagttcactgatgcctttacaaatattattttctgttttatccagccttcatagttgttcccaacaggaatattggaacactatgaactactctacactgtgtaccactggctttgttatgtaatgaatggatacgtttacttctacaatatttattatttccactgtagttcctcttctttgatccatacattatttaaaactctgttccaaaatatccactttttaggaggaagaagagagggaggaattggaagggtaaccattttcttgttgatttctaattttattgcaatgcagtcagagaatattacctctatgacgttgttctttgtataggtagtaagtgttgtttggtggcattggcaactttagaaaaagttcgatacatgtttgaacataatatgaatcttctaattgttaaagtctgtgtgtgtgtgagagagaaaattagataaaactttttagatggaatatttagattctctgtatctttactttcttttcatctattgaatctatcaattattgaaagatcagttattgatactagtttagaattatctatattttatcattagtttgagatgaaattgcaacatacacatatattaaatactatcaaatacttcttataattatataattattccttttatgcataataatatttttacctcaaggtatattttgtaaaatattaatattgtgagccagctctttgggggttattttatttggtgattctttgttgttgtattaattattaagctttacatgtgttatttatggccagatatatgggaattttattaaacccaattcaagaggtttttaaagcaagttccttttaccctaatttgactactaatatattttactttatttctgttttcattttacccgatattttctctccagttgttttcttttttacttctattgcaatgattattttaaattttcttttcccctattattttgctagttattaattatagttctttatatcagtactcattttaaaaagtacatattcttatattaacatagtctaaaattagttatttctatcctgagtctgaacaatagtagagtttagatttgttcatgttttatctaattttatgctattgaattcactatattacttccttcattgcataaatctcacatacctcaaaacttagacattattattactatcactgtttttttttaattgagaatgtttatgaagattttcatgccagttttcttgtatttgccccttgtttctatggtcagcttccttttttttgtagcactttttttactagttccttcactgagggtcttttccagattaatgcttattgtaatagataaattttcatttatacatttgtgtagttatttatacattataattacatatatgttatccaaatgtataacggatatatatgtatacacacaagtacattacaactgtatacatcatacatttgtgtatttacttgaacaacttttatcacagatcagtgaaagtttttattctcaaaaaactgtttattacaccaataattgtatatgaagtattattatgaagtggtttctttctctaacttacaaaaagatatatttggattgtggtggcccagtaaatgtgaacttcaaactctctctctttatgttaaaaaagtatttatttcatcatcatttttctctagttttatatctgtggtctgtctcttcacagggaaacatttctttacttggtttgtaattatgatttgtgagctcatattcagtggaacatgtttcccctttgagaacttcatgcttgctgaggtgataaagtgtcttatcatagtcatatttcatttgttatcacaggactagcaaagatctccacataataggagatcttttatgttacatatatggcttagtatttcttaagcttcatactgatgttcatgtgctcacggtagcttcgggttttgatttctagcattctcagattttttttaagccaagttttcttgatacttccctgcactgacagattcttaaagttattttcaaatatgcttgatggtagttaacaacagcattttcaggctttttgatttatgcatgaatctccatcccctactcaccagtacctgtactcacagacattttgaaaccacacatttatttaatcagttatatatcttatctgatactcaggcagtggcagcatcaattcatgattttatctctccagatttgaatttttttaaactttaattttgcacctgggaattatcttttcttcttcaacctcagctatacattcaaaaaaatgtattttacctatgatttgtgatttctacgtgtttttagcgaaaggggattcagtctaccatgaagctagaatgcataaacaacactttaatatccatacaatattctatcttatttgatcagagatttattataacttttattacactcactcctttctctttctagatcagttttttcttagtattcataaaaactgcacgttaagagtgttgtaaattacttaaacatttaagaaaatctagaaggcttttttaaaaatatttttttaaaaatagaaattaactgcgctgacaccaaacttgtaacttccgtaagagtatttttacattcctagatcaccttcttgtcttttaatgaaacaggcagattattagtcaactagtgagacaacttattattgaaaaatatgttcaaagcccaatttgaatttaatcatgtaaatgggtttcatattatctgggtaccattcttatatcattccatatttttttctcattagtagataaaatgaattttggttcttcacaattacatttttgttggattgcactggatcacattacatgttaatctttgtttcagacaatttcacctgtgcagttcctttaacacaccctttactgaggaaatcctaaatacagtgttgatgcggagatgtgctacatggttggcaccctaggccaccacctctgtgagagacattaactttcataagcatcgcttgcccttttaccctgtttagtcctttgttcagggactccctccaactcccattgcctttccctggctaacccctgcccattcaatggtatcaccaagttgttgccctctctcaaagcctttcctgcttacatttttctctaccttatttcccttttatattctcccataatatcttatgtacatctttatgtgttaatgaacagattttaaaatgagcattttaaaattacacttttttttttttttctgagatggagtcttgctctattgcccaggctgaagtgcagtggcacaatctcggctcactgcaacctctgcatcccaggttcaagcaattctcctgcctcagcctcccgagtagctggaactacaggcatgcaccaccacgcctggttaatttttgtatttttagtagagatggagtttcaccatgttggccagggtggtctcgaactcctgacctcaggtgatccatctgcctcagcctcccaaagtgctaggattacaggcataagcaaccatacccagccaaagtcacactcccaaagtcatactcagcatttttgcaccttcactgcttgtcatgtattatgatttttcttctgttatgcttcaaataatagtaagactcatagtaagactcacagattacagtcataggaccagtaattaactggaacttcgccaggagtttgtaccaagagtgcctggattttgaactcaggtagcttagataatgcttaaaaacagcacttctggagcccagagacttaacttttgttagaatgcatccatctgatcacataaaaactctgatttcttcattagttccattattggaaaaggcatcctggagggttttaggagtctgtgatcatcttatgaggtgtgtcacataacatctggcttgtgttttgttttctgatgagagattcaattgacttcttgtacatgactcatttttagttgagaaatgagaaggctgtttttgtttgctttttatttccagaactttttgtattaaaaaaaattgagctgggtgcagtggctcacgtttgtaatcccagcactttgggaatctgaggtggatggatcacttgaggtcagaagcttgaaaccagcctggccaacatggtgaaaccccatctctacttaaaatacaaacaaattagccgggtatggtggcaggtgcctgtaatcccagctacttgggaggctgaggcagaagactcgctgaaaccgggaggcggaggttgcagtgagccgagatcatgccactgcactcagcctgggcgacagagtgggtctccgtttcaaaaaaaaaaaaaaaaaaaaaagtgctttgaaaagggcctctattgcatctatctttaaataacatctgtgttaattcctttcccttttaaactcatctcttattataataacacacgtgggttattgaactgaaaagctaggcttttaaacagaataattcaaatcatttacattagtcgtggttacagtcattctctataactttcaaatcaaataaaaaattccttggtgttccaaatctaagaacaatgaaatttaaatttatcagagtctcagttgaagattctgactttacacttgagcaaaataagaataggaatagatggtcactttaagggttcttttgggtcattctttgtcttacagacctcaccctagtctataagaagttctactaattaccattcaaatttcatagacatgattatcatgtttataagactttaattttctcatgataaaactgtatctttttgttcatatgaatatatgatggtatgatatttttgatacatagttgcaatcatacctctatgtaagtatgcactcatcgtttttgaatattttatattttatatacatttacattttattgcataaacatgctattatattataaactattggctttatcatcgtatttttttacatgaccacatgatagtcattgatttcctataactggtgtttatgggtttccataatccagaattccaagagaggcccctgtatcatagggctggaacaagaaagaaacaaaagttgtatacttgtcacattcctcctgttccccactggtgcttctaaacccaaatctctctgatcctgaagtttttgagccttagcatcttaaagctgtgattgatcttgattctcacccacatttcttatggatgttggccacctaccactgtcccaagttctttctggtcatgtgcaatttcacgtttatattattagttcacccaacactatttaataatgatttgacctcaatctagatgacctctacctgcacccttctttactcttgtgacaatacctagtcatgtctcagaactttctctctgaaatcttaaatacctaaatctcactccctgataaagttccttttttttgtaaaatgtctgctctttttcatcactgatgattccattctctttactactgtattcttttctccaaattatcgggctccctctaaccttactcttttactcattccccatagatccctgtaagtgttatgccttctttcactttcaacttcactgacagcttttatacctttggtctttctccacacatgatctgcaaaacgtcaacctaaattgaatctaaatttactcatctttgtttcagccactaggatgaatatcactcaactgagtactatgttagtgctctccaaactcatgcactccatcctcagctgaagcaacatattttctgactcattacattaagcactcctgtagtacttattcagctcttccatatttccctcagtggctgttctaatctttgaatccttttccaaatattactaataaacttccattcacctttgacctatatatcaaataatgttgcctccttcttcactcagacatgcattgatatcagaaagttatttccctaagttagtaaggtattctatgaataccttcagcaaacatcatatgcaactgtgaaactgtaaacattcctgttaaactcagaaggaaaaataaggagctcagtattgcccatatatttcaatagtatgttggaaatcctagccaatgcaaattagaagaaataagaattagaaacaagtggcagtactatttttatgtggggaaagtataatattagaatggatactggagaagacatgtaaaactcattaaagtgactgaagtttatatgtcctagtccatgtgacaaacaggtatatgacatatgataacccatgttagctgagttttaaatctgaacagggtggtgggactgttctagctgtggtgaaaaaaagtggcaaaatatatgggaatcttaagagaaaatttgtaccaatcaatggtagcagcatgctaattacagtgagcttaatttagtattttggggggacgtttaatctcaaattattattttattttcaaatgctgtaacttttaataccctatttagaggagatattttcttttatcctccttctttcttttctttcttcctgccttcttccatttgattataatgcaaaattaattatctcaaaatcttcgttttccactctttgttgtattcatgtgatttagctctcttaaaattcatgttatcttttatgtttaaatcaaattttaaagtttttatttcatctgttgtttaatagaactataataaaaatatgattttctccttctcccctcctcttctcccttccccaatccctctctgtgtatccttaccttcatctttctgtcctactttgtcttaatttaaccttgaagtaatttcagttaccttaataagccaaatgaagtaactgggcttatcatctgtctattcatccatccgtccacctaaccacccattcattaagaagtcatttcatctgtttgtagatgataaatttctataaaatctattttaatttgtaaagatataaaaaaaactacatccatatgtgtatttcgtctttttgctgtttcttcatgtagttatgtttctaaaaataatatgttcattctaccttttgcttaaagattacatctctactttcctgataggcctgtggataccaggccttgacattctgcgtgaaggtttaaatgagttgttgagaacttcagatatactttcagctaatctccattttcaaccctcctgcattgcttttccctagaccatgtgtgcctcagtcttgagactttctggagttccacccaattcagaagttctcttctcatcaaaaatcttcctcttgtcatttaggctgtagctttcactaaatctgttcctatacttccctgaatcttctaactttgccacacatgggcaaggtgattcttttaaaattttattaaaataatttatttaaattatttcttaccattatgttttgtttctggagacagaaaaaagtcacaagcagtcagttgaccatctttaattagggtaagctctgcattaaattttttttagaaacaaaatatccagcagatggattcaaaggtgaaattaagtccccattccatcatgtttagtaattatgtgatctttggtaaatcagaacctcctacgcctaaatatcttaatctataaaaggagtttaaaatttattttatgaggatatgggaaatagagaacatatagtggatcaaaaataattgatattatgataacttgttatttgaaaataacattataacttacacttggtaacaattcattttctgaaatgattattcaagtatatgtcttcattagtaaaatagaacataaatatttaactaaagaatatcaaggagtttaaatattgccatttttactgataatttataccaaaagatcaaatatcttgctaaaattttatcttaatatttcagtatcatatactatgcaacacaccatttagccaagaaattttcaaataaaatctttctagtattttaaatatgatagatagctctatgccatattagttaacatagtatttcataaatagaatttcacaattgtattaattcaaaatataaatgtaagttcaagactgctttatatgtagtttattttgcattaatttttttgaaactgtgttcttcacaataattgagtatatttaaaataatcattgctgtttgattatattttccaagttataactattcatttgtcttacatgatgatgaaattggtatttataacctatattcttatattattccttttgggaacttgataattggtaaaataattttatctaaaatatgaaaatgaaaatgatatgaacatttttttgcctggcctatacatatacacttgcccctaaaatttcatttattagggctagatttcacagattaatactgacattttagtcgtgacaactgccattttcattcctgctgctaataactagtataaatatttgcatattcattcagacatataataattaatgtttgtattttttaggtatagcttacttgagtggaatgtgtagtgaaaagagaaaatgtattattgctgaagacaatggcttgaatcttgcttttacaattgctcatgaaatgggtcacaagtaagtaaaaatcatggctatgttaaatatgttagcatataactttgtaattcgagttactgaattacctggatatcttctgatttttaatttgggcttcaagtttttgaaaaactagggagacaagaaggggtgaagactgactacatttaaagaatgtcttttgagtgttgcaactattcctgcttctttgaataaaatcttattacattattaaaatccctatcaagacagtcattacatagtgcatgattgatttcactacagatttgtaaatgatacaaatatttccataatcttgagactacaaagctataaacttttcaaacgcttagtacaaatgaaagtaattccagcctatggtagtacctgtatttgttattaccaggcataagtgaaggaattaacccgcatggtttagatataatgtatttgaaagacaatgaaattagacatataattaacacatattgaatattaactatgtctcaggaacagttataaacattttcaatagattagttcatttaatacaaaacccaaagaggtagttattgttctaattttcatttcactgaaattaataataggaataattagtaatagcaacacttacatagtacttactattaatgtttgccagacacgtttttaagtgctttgtaagtactcacaacaattttgtgatgtgttattagtgtacccattttattggaaaaatacagaaatatagagaatttaccctcctgaaattattaaaatggcaattgttggagcgaggggtttgaactcaagccattcaactcaggtcaaactgttccattaagttatctgttatcttctggcctagattcctcgtcagtgaatcgggataatacctttgttatgggattagtttaggattcaaattacataaagctgtgatcatatttttaggaagtttattaaagtagaaatggagacctggcacggtggctcatgcctgtaatctcagcactttgggaggccgaggtgggcggatcacgagatcaagagatcgagaccatcctggccaacatgaaaccccgtctctactaaaaatacagaaattagttaggcatggtggtacgcgcctgtagtcccagctactggggaagctgaggcaggagaatcgcttgaacccaggaggtagaggttgcagtgagctgagattacgccactgcactccagcctggtgacagagtgagtctctatctcaaaaaaaaaaaaagaaaaaaagaaaaaaaagaaatggcacaggttggggaatcagacttaattttgaatgcaggcttccctaattgctggcagtatcagcagtacaaatgaaagtattttaattggactcagatttagtgaggccctactagggaggtgatctttatggagggagggctctttagttaaagacatatttagtttggccttcagtgtttaaaaaattcaattagttgccaacattaaaaaagtgtaaatttgacataaaagtaagatttgcagacctggtaacactcaacccacagcccatatggcaaccattcctaggagctgtgtaggatctgtaccctttaaattagacccatctttctcagttcatcagaggccgcaacaccctagtatatggtacacccagctcacttcattttcattatattcctggagtctgtacgcacttcagtaaagtttagttggcagtggaatttgattggtaaaggaaagcttagaagaaacaatttacattggacatgacagtagttgatttaaaaagttattcaagtaaacacaagtgatcaaattgtaattacacagctcactgaattaacaaaattaaatatagcaatgtatccatcacccagcccaagaaacagaacaatatcaataccaattgatttctaattttttaattgaccaaaatttactccatacaaatgttttgaaatgtgtatacattgtggaatggcaaaattgagcaaattaacataagcattacctcacatatttagcagttgtgttgagaacttaaaatctactctcctagtaattttcaagtaattgatttttgatgtcaccatttttaaatgtatagatatgcagttgtccctcggtatttgccaggggattggttcctggacctctgcatatccccaaatccatgcatatccaagtccagcagttggtcttgtggaactcacttatttgagaagtttgtcctctatatatgcaaatttagcaacctgcaaacactgcaattttgatccttgtttagtttttaaaaaattgcctgtaagtggacctacacagttcaaacccatgttgttcaagggtcaagtgtcctttcagatgctcccatacaagctttcagtcttcagtcaactgaccaagaatatgaagagttaatttattacttaaaaaaaaaaagataaatatactttaacatcatcatcctttagggaaagtatgcagtgcaataaccttgtttaatatttcattctaggaatgataggctatagattcttaattccaaaacaattttgataattgaaaggtattttcagtttagtaataaaacctatgaaaaatcataggcatcatttgaaggaaaaatgctgagaataatgtctagaggcaagaaaaaattattaataattaattttacaaagatacatgtcatcataaatataattctcataaaatacagatttatgaataattatgatttttgctcttgagctatgcagtaacaccttgatgtacaaacagtgtatatttttgtaaacagattttaaataattttgtcaagtaccctgaatagtttacttttaaaaagtatatttttaaaccgatatgtttaaaaccagatatgcaaaattgatttcttcaatcttcattgtattctaaaatgtaggagaaacactaagggaatcaaatacaatacgagttaatttattaacatctaaactgttgaccatggagctacaactatttaaactaaaaactaaatgaggtaatttagggaaaggccacttcagttttatgtagtagaaatgttggtttatgaccaggagctcagattggaatagctcaaatggtacgaaaatattattttatttgacttttatagagctgtacccaaaatcaatagagatgtgccaaaggtatgtgtaatacttgatggactaggaccagaatgtgatatatgttaaactacccctttactaaaaattccccatagcagtaagcaatatttgtctcaaaagtagtggctggtgttttcctgatgctagacagtgagagacaatagcagtcagaataatgtcatgtttataaaaaaacaaacaggaagaaaagtatctatatgaattacatcatcatcattatcatccactataagatataaggcacaatgtaagaagaaatgaagaaagaagaatacaagaaaaaatgtccatatgctcatagtctctctagtagggaaagtgttcatggatgttaaataatggtatctacagattctatgtgcatgcacccgtacacacacacacaaacacatacacgcagagcccttttatttagaggtatgattaagagctatgtaagtgaaactctttaatcctatatttttctttttcgttttggatttccttctttcttttttttgcgttaaattttataagtgaagactatcttctagaaactaataacgaactatgataccatgtaattctgcaacttacaatcttagaatgacagaatgattccatgtaaacttttcaagaatacctttataatcacatataaaatgtttataaacagattttaaatgaatgtatttatgtttgttgacttgaatttgatttctagaaattctcagaacaagttcatatatagctggaaaaatcaatacggtccactaagtatttaaaaaaatgactcttggggatgaaaatttgagtaaataaagagaaccaacaatttttccttactagtgcaaaggaatctaaaacaatgtcagcaaaaatgtatcgactttctcctttggcaaattatcaacttataaatatataaaaaagtgtaaattaagatctacagtaagaaagaggaaataaattatttaagccaacattttaaaattgcctttcagaacaattttgcttcctaaacaataagtagtaggagttattattattattattattattattattgagacggggtctccctctgtagcccaggctggagtgcagtggctcgatctctgctcactgcaaccctccaccttccgggttcaagcgattctcctgccccagctttctgagtcgctgggattacaggtgcgtgccaccacacccggctaaattttttttgtttttagtagagacggggtttcagtatgttggtcaggctggtctcgaactcctgacctcgtgatccgcccgcctcggtctcccaaagtgcttgggattacaggcgtgagccaccacgcccagccaggagttattatttttctggtaactaaaatttttgacaagaaatatttttactggtagtgctgaattaacacatattcatcaaatataattgggatcttcataatttaatgtgatgaagtctaaaactttatttttgtgaatgaaaatacttagtttttcatgaatttgatgttttattgaattcatatatatgcacatatttattatgtccactatattttatatgatctttatgaacaacaggttgttaaagtaagggattttactttcattttaggccaaaacttattaatatattaattgttattagattgctgtgctttgagggaagaggccctaagactaatctgagttgatttgctagcataactcagaaaactcagcaaagtggttttgctcatggttacagtttattagcatggaaggatatagattaaaagcatcaaaggaaaaagtcacataggccagagtccaggagacaccaggctcaagcttccagttgttctgtcccaatggagttgtgcagacagtgcttaattctcccaacaacaatgtgtgaaatcatgcacaaagtattggcaacccgagaagctatatgaggcttgatatccagggattttactggcgtttgatcatgtaggcttggttgactccccacaaggcaaaccttcaagtctccattccctcctgaggttaacctggccctagtccccaaccataaatcacattgttagcaaaaaccatcctggtagaaggcctccagctaaacaaagatattcttgtcaaagatactttggagggatatcccaaggacttagaggttacttccaaggagtcaggcaaggactaaatagttctttggaatgtgcagattttagaccactcaaacttgtgaactctttactgcaaaattacacaattttattttattttttttgagacggagtttcactcttgttgcccaggctggagtgcaatggcacgatcttggctcaccgcaacctctgcctcctgggttcaagtgattctcctgcctcagcctcccaagtagctgggattacaggcatgtgccaccacacccggctaattttgtatttttagtaaagataggtttctccgtgttggtcgggctggtcgtgaactcccgacctcaggtgatccgcccgcctcagcctcccaacgtgctgggattacagcacttcgcacccggccttacacaatatttttaaactttcaaaatcccatattttatattgagttgccaaagggtttctaataaaaacaacagtgtcttcttttattagcaggtattttgctaaatactatgtattcatatctaattcaactgcataaaaattcttgagctaagtattgttatgattgtcattttacagatgagaaaataaactaatagagattcatttttcagtttatgcaatattaatgtcattctcttttcattaagtatattgtaaagattttcctagttctaataattggtttattcttgatttttaatgtttataacttgtagatttttttaattgtcaaatttcatactttcataatttcttccgtaggtttttgcaattacaagtactttctcattctaaaattagggaaacacatttttgtattgttgtcttatattctctgtgtgtgtgtgtgtgtgtgtgtgtgtgtgtctttcactgtttaacactttaagccatctagaatttactttattatgcatagtaaatttctctccactaagttcgtattttgcattaactgctcagtaaatgatcttactactcaagtgtggtctgtgatgagatagggatctatgccagaatataggacactgcttccctcattgaaagagtcttgacgtgaaaaaaaaaagctgaagtaaactgtgtgcttagtgatgtagctgatttacattccggcaccagctacttatctggatacaaatcagtaataaaaagagttcatcaaatggcagcgagtgcacagatcacactctgagtagccctgccacataacagatgtgacagtcactgttcagtctaagtcagtgttgcactaggaagttgcgtgtgagttgccagaaagccattatttttatctttggcctgaaaggtggtctatacttgcatatttttgtcctttttgtgaagcatgtagacataatcctatgataccattcactgcaaataataaaagttgttcttttgtacaaatatttagtggtgtcttagattattttgttatataaataaagataccatatttttatatacacacatacaacgtaggctttttttctttaggtctacaaataattccatttgcgttgtggattccaaccaaaagtaaactaacccttgcattattgtgtatggttttaggaaaatttagcctaagtctaagatattgtacaatatctaaattatctgggaaataataattttaatatacctattaatagcataatcccgtgaccattttctgaccttgctaaatctggacatttattgaagtgcagaattttgcactggcttagcacattgaggccaaagacttctgctcccacctaaagatggaaggcaataatattactttagagatgatgattgccaaagctcacacagctaataagtgcctgaatccatgatcaaagccaagtccatccaaatccaaagcccatgttattaattacagtgctctgtgagaaacatggaagagttcttctagctaactttactcaacctacttctgggctggctcgggattatctgttcccactttatctcttcagccatacttcatttcacaccccctttcattctcagcactagagttcccacagtgtttccaaagtaccatgttccagtgagagcacatagagacagggaggggaacaactcatactggggctcggtggggaggaggtggggagggagagcatcaggaaaaatagctaatgcatgctgggcttaatacttaggtgatggattgataggtgcagcaaaccaccatggcacacgttttacctatgtaacaaaaggcacatgtaccccagaacttaaaaaataccatgttccttcacactgcaggacctaagtacatgttgttcctttacctggagtatactgactttttaagcttagtttaattatctcctcctgctcaaagttcatataccccctcaatagtcatgttctaaagaaagcattctctatgggtcagtctctctattaagcattttagtggcaccacctccttcgtaaatgcacatttgttcatctgttagatatatgcttcattaggctgtaagcttcaagaggtgaggaaccatatctgtttttgcttataatgggattcttaatgcatttgacagtgcataagaaatatataccaagaaaacctgcttggtagatattaggctcttgatatatatcaaataagtgaatgactgaacatagtaatcttagtaaagtatcattatgcatagattatcagtgaaacttgattcaaaacagatgctgtatgcatattcaaagggtttagaattttttttgatattgcatgagactttcaataaagtatcaggtaaattcttataaaaacaatattctgtattttgaaatgtacccaagaccacataaatgagactttattctggtacacacatgcagaaatgactaccccagccctaaaagtgttgcccctgaagtcttcctatgacagtaaatgaagctccatccttctagtgggacaaccaaaagccaaagaattatctttgagtgttctctgtttctcatagtccacattcagttcatcagctgttgactccaccttcaaaatacatccagaatctgattacttctcactaattgtcctgctagttctttggactaagctaccaacacttctcatctggattattatagtagcctcttaaataatctttcctttttagcctttgcatcctatagcctgttttcaaattagattcagggagattcatttacaacaaagcaaattgcctggcttctttactcagaaccttccaagagcttcctggttcactctgtaaaatccccagcccacaccacagcccaccaagttctacatgttctagcctccttccctatagcctgtcattcccttcttaccaactgtgctccagattcattgcctctttgttgaaactcaaacataaaagactaacagtcactttggggacttggcctttcctttgatttctgcctggaaagttctccagagcagccacatggctgtctcccattcttctttagttctccactcacgtatcagggttcagtgaggcctttctgataacatttcttaaaattgtaagcacaaccactgtctggccttattcccctttgccttccttaattttattcataaaacttcaaaatgtaactctctaccctatgtctctttcttctgtttgtatataatgagatcttgtctacttagttcactgtcatattcccagcatgttagccatttataacttatgcttgtaatagatagtcaagaaaataaccaatatagccctaatagagttttacatttgtacaagttgaaagagactgcattaaacatataccacttacccactgattgagaactttttatgataattagactgtctacttcctagagatgttgagttgggtaaaattatatgagttaggggaaattacttatatttcatttcattataaaaatgtcaagcttgttttgatatggccaaaaatgcatatgtatttttcatttttgttttgatttttgaaccagagaaaaaggtctaatatatataattaaactttggcatggagacatggtttttccaccaagtaggcaattcaggagtttctttggaactaaaaggctaatggggcaacaaatatgcaaagttacctccttgaaggcaataaatatttggggcacctgctaaaattttaagaattgccagagtaccaagaatacagacgtcttgtgactagtaagcctttggaatcaataacatttacatacacacttacttctctggaaattgcgcctggatagaatagaggggagggccaggttatatacctgcttcttcagacatctgtatttctgttattggcaccattattgctacaaggcctttagttgagacatctgagccatctttaactctttctccccttagttacttccataatctgtggccaaattctattcattcttcgtccgagaaagctatctcaactgtctattctttcttctgttattccttctggcttggactcttgcagtatccacttaactggtgtcgtctcctttgctacctcatctttctaatctactcacacattaagattcagcttcctgaattgtggtcctaaccttcatgtcagaaaactttattgcctttcacaacttaatgaatgaatttgaaattccttagcctgagattcatgacttctatagagtgactctagtctatttttgtaactttacaatggacttctctattttatgaatgcaaatgaactgtaattttcaaacatcatgcctttattcatttttttattatcccaacttccagcactaatgatttatacctatcccaattgtacttacctgttaatggccacaacaaatgttatcactttcgtgaaagtaaatttgaaagcctggttggaaatatgtttccactttatttatttatttatttatttatttatttttgagatggagtctcactctgttgcccagactggagtgcagtggcaccatgtcagctcacagcaacctccatctcctgggttcaagcgattcttctgcctcagcctcctgagtagctgggattacaggcgctcagcaccccacccagctaattttgtatttttagtagagacagggtttcaccgtgttggccaggctggtcttgaactcctgacctcaggtgatccacccgcggtggcctcccaaagtgttgggattacaggcatgagccaccacacccagcctgtttccacttttaagtctcttacactgattattttaaatatcatttgtcacttagaattatttctgagatatactgatttatactgatatttacctatatataggttcccaactgaatagcaatctctgtgaaaatatgattcatgtctaatacatttttttcacagcacgaagttgaatgtattagacatcataagtctccaacatatgttgtacaagtgaataaacatttgttgtatgaatgctcatctgttggtcatcttgaggtgcaggacataaagcaattgagtcccagagtggaagaatcagtttgggtcaaggaatgcaattgtcttgactaagtaatatgattttatgagaaaatatggttttattgctacacaaatataatggcagtatatttttcccttttggtacgtgatattttgaattcctgtttaagataaactgtatgaaaatacaatacttcaattatatttcagttatgatgagtctaacttaaagtctggttataggcctgtccaactatttcatccaaatcctaaagttatgaatgtgaaagggccaaatctagcaattgtagtaataggaatatttaattgaaattctgttaattcacaacaggtatggaaacatacctgccaagatatgaaaacaacctgcatctgttaacagatgaatgtataaagatggatgtataaagaaaatgtggtgtgtgtgtgtgtatgcatatatatatacacacacatatatatatttccattatataaacaattctatatatataatggaatatttattatatatgtattactatatatgtatatatacacacaacagaatattcattatataattggaattttatatatatgtgtgtgtgtgtgtgtgtgtgtgtgtatatatatatatatatatatataatggaacattactaagtctttaaaaagagggaaattctactatttgcaacagtgtggatgaaacttgagggtattttgctaagtgaaaaaagccagacacagaaaaacaaatattgcatgatcttattcatatgtggaatctgacaaaaacaaagtcaaactcatagtaacagaagaatggtggttaccaggagctgtaggatgaggggaatggggagatactggtcaaagggtacaatccttcagtcacaagatgtataagtactggaggcctaatgtacagcatgatgactatagttaaagaagttagcatatgccccaggaggcatacatagatttggttacactctctcagcttccaagaagagtccttttcagaagtgaattaaatttggcactcatttgcattgatgtgcagtagtatatctgctctaagaagagaggatatgctctaagaggagattagatatacactaagaactaaatagagaccagttataatggctcacagtggagcacacctgtactccaagcactttgggaggccaagtcaggcggatcacttgagttcaggagttcaagaccattctggccaccatgccagcttgagacctgagaattgctcaaacctgggaggcagaggttgcagtgagctgagatcacaccactgcactccagcctggtcaatacagcaagactctgtctcaaaaaaaaaagaaaaaaaaaaagagaagaaaagaactaaataagaaatgcatataaagtatatcatctcctaagacttttagaatgggaaatagatgaaataagaataaattgttataacaggcaaaaaccaaatatgctcttctagaaatacattgctccttaaaatgttgaaaattaatttttttgtagttattgttgaccaactataattagtaatggctatctaaatatactgtccccattgtactctttagaattttctacagcagatgtcacagatatcttcctctgacacaaatgccttggtaaatgttaaaaactacctatgtggatagttgagagggaaagtgcattattagacatacagccttgggcttgaattattgttctgccagctacttaatgaatgagctttggataaatcaatctgtctgtattcatttcctttattcctaaaatttggatagtttttaatttcaagattcattgttagggtttgtgatactctagtgtcatggcacaatgattggcacaaaatacagagtgactgaataataacaataattagtagtattatagttattttatgaataccttaatgtgaaaaggagattttcagccttcactggcctttcatttttctgttctttcttggagtgatttcatgccttttagaggtttttaaccagattgacaggaagtttacttatcatgaagacttgtagaccactagcacggctttcgtatttgatattttatttagacaacgataccacgtagaataataagcaatttttccaagttaactttcataatgagacttcaaccagtatagatgtggcagctctcccataccagattctctccaaatgtaggtttggatgttggagtgagttagtggaagacggaaaaaaatcacccagcaaatgaatgaccttggaagagatagctttctgtttgcaattctctgatgtttcttggcaaatgcatgtcctagagtaaagcaggcaatcttcctggagtagatcatctattaactttttcatgtcacagtttctctgtgttggcaagaggccacagtagtttcacatctctaattgtagcatatttggtgtttctatgatcctatattagttgataaatcagtagacatttaacaagacattcaactaaataattaaaggaagtaaaaagaaaatataacaacttctgttctctgaatgcttacattctaggtagtggtattatatatatatatatatatattatttaaaattaaccagaaatacgaggcagttctgatatgtcttacacaccatatatgtgaagggtgtagaagttaaagataatgataaatatgggctataatttattgaataatcctttttaaaggcagaaagtctgtgtaaacgcagattagaatggaaggtattcttttttatatattcttttttatcatactttaagttctagggtacatgtgcacaatgtgcaggtttgttacatatgtatacatgtgccatgctggtgtgctgcacccattaacttgtcagttacattgggtatatctcctaatgctatccttcccccctctacccaccccacaatagtccccagtgtgtgatgttccccttcctgtgtccaaatgttctcattgttcaattcccacctatgagtgagaacatatggtgtttggttttttgtccttgcgatagtttgctgagaatgatggttttcagcttcacccatgtccccacaaaggacatgaactcatcattttttatggctgcatagtattccatggtgtatatgtgccacattttcttaatccaatctatcactgttggacatttgggttggttccaagtctttgctattgtgaatagtgccgcaataaacatacgtgtgcatgtgtctttatagcagcatgatttataatcctttgggtatacacccagtaatggaatggctgggtcaaatggtatttctagttctagatccctgaggaatcgccacactgtcttccacaatggttgaactagtttacagtcccaccaacagtgtaaaagtgttcctatttctccacatcctctccagcacctgttgttccctgactttttaatgatcgccattctaactggtgtgagatggtatctcattgtggttttgatttgcatttgtctgatggccagtgatgatgagcattttttcacgtctgttggctgcataaatgtcttcttttgagaagtgtctgttcgtatccttcacccactggttgatggggtcgtttgcttttctcttgtaaatttcgttgagttctttgtagattctggatattagccctttgtcagatgagtagattgcaaaaattttctcccattctgtaggttgcctgtccactctgatggtagtttcttttgctgtgcagaagctctttagtttaattagatcccatttgtcaatgttggcttttgttaccattgcttttggtgttttagacacgaagtccttgcccatgcctatgtcctgaatggtattgcctgggttttcttttcgggtttttatggttttaggtttaacatttaagtctttaatctatcttgaattaattattgtataaggtgtaaggaagggatccagttacagctttctacatatggctagccagttttcccagcaccatttattaaatagggaatcctttcctcatttattatttttgtcagatttgtcaaagatcagatggttgtagatgtgtggtattatttctgagggctctgttctgttccattggtctatatctctgttttgataccagtaccatgctgttttggttactgtagccttgtagtttagtttgaagtcaggtagtgtgatgcctccagctgtgtttcttttggaaagatactcctcgagaagaacaactccaagacacataattgtcaaattcaccaaagttgaaatgaaggaaaaaatgttaagggcagccagagagaaaggtcgggttacccacaaagggaagcccgtcaaactcacagctgttctctccacagaaagtctacaagccagaagagagtgggggctaatattcaacattcttaatttttgatcttttttaatctattttattttattattattatattttaagttttagggtacatgtgcacaatgtgcagtttgttacatatgtatacatgtgccatgttggtgtgctacacccattaactcatcatttagcattaggtatatgtcctaatgctatccctcccccctacccccaccccataacagtccctggtgtgtgatgttccccttcctgtgtccatgtgttctcattattcaattcccacctatgagtgagaacatacggtgtttggtttttttgtccttgcgatagtttgctgagaatgatggtttccagtttcatccatgtccctacaaaggacatgaacgcatcattttttatggctgcatagtattccatggtgtatatgtgccacattttcttaatccagtctatcgttgttggacatttaggttgcttaaagaaaagaattttcaacccagaatttcatatccagccaaactaagcttcataagtgaaggagaaataaaatactttaagacaagcaaatgctgagagattttgtcaccaccaggccttcctacaagagctcctgaaggaagcactaaacatggaaaggaacagctggtaccagccactgcaaaaacatgccaaattgtaaagaacatcgatgctaggaagaaactgcatcaactaaagagcaaaataaccagctaacatcataatgacaggatcaaattcacacataacgatactaacctttaatgtaaatgggctaaatgctccaattaaaagacacagactggcaaattggataaagagtcaagacccatcagtgtgctgtattcaggaaacccatctcatgtgcagagacacacataggctcaaaataaagggatggaggagatctacaaagcaaaatggaaaacaaaaaaggcaggggttgcaatcctagtctctgataaaacagactttaaaccaacaaagatcaaaagagacaaagaaggcattacataatggtaaagggatcaattgaaaaagaagagctaactatcctaaatatatatgcacccaatgcaggagcacccggattcataaaacaagtccttagagacctacaaagagacttagactcccacacaataataatgggagactttaacaccccactgtcaacattagacagatcaacgagacagaaagttaacaaggatatccaggaattgacctcagtgctgcacaagtggacctaatagacatctacagaactctccaccccaaatcacagaatatacattcttctcagcaccacatcacacttatgccaaaattgaccacatatttggaagtaaagcactcttcagcaaatgtaaaagaacagaaattataacaaactgtctctcagaccacagtgcaatcaaactagaactcaggattaagaaactcactcaaaaccacttaactaaatggaaactgaacaacctgttcctgaatgactactgggtacataacgaaatgaaggcagaaataaagatgttctttgaaaccaacgagaacaaagacacaacataccagaatctctgggacacatttaaagcagtgtgtaaagggaaatttatagcactaaatacccacaagagaaagcaggaaagatctaaaattgacaccctaacatcacaattaaaagaattagtgaagcaagagcaaacacattcaaaagctagcagaaggcaagaaatcactaagatcagagcagaactgaaggaaatagggatacaaaaaacccttcaaaaaatcagtgaatccaggagctggttttttgaaaagatcaacaaaattgatagactgctagcgagactaataaagaagaaaagagagaagaatcaaatagacccaataaaaaatgataaaggggatatcaccatcgatcccacagaaatacaaactaccatcagagaatactataaacacctctacacaaataaactagaacatctagaagaaatgaataaattcctggacacatacaccctctcaagactaaaccaggaagaagttgaatctctgaatagaccaataacaggctctgaaattgaagcaataattaatagcctaccaaccaaaaaaagtccaagaccagacggattcacagcagaattctaccagaggtacaaggaggagctggtaccattccttctgaaactattccaatcaatagaaaaagagggaatcctccctaactcattttatgaggccagcatcatcataataccaaagcctggcagagacacacaaaaaaagagaattttagaccaatatccctgatgaacatcagagcaaaaatcttcaataaaatactggcaaactgaatgcagcagcacatcaaaaagcttatccaccatgatcaagtgggcttcatccctgggatgcaaggctggttcaacatacgaaaatcaataaacgtaatccagcatataaacagaaccaaagacaaaaaccacatgattatctcaatagatgcagaaaaggcctgtgacaaaattcaacagtccttcatgctaaaaactctcaataaattaggtcttgatgggacgtatctcaaaataataagagatatttatgacaaacccacagccaatatcatactgaatgggcaaaaactggaagcattccctttgaaaactggcacaagacagggatgtactctctcaccactcctattcaatctagtgttggaagttctggccagggcaatcaggcaggagaaagaaataaagggtattcaattaggaaaagaggaagtcaaattgtccctgtttgcagacgacatgattgtatatctagaaaaccccattgtctcagcccaaaatctccttaagctgataagcaacttcagccaagtctcaggatacaaaagcaatgtgcaaaaatcacaagcattcttatacaccaataacagacaaacagagagccaaatcatgagtgaactcccattcacaattgattcaacgagaatgaaatacctaggaatccaacttacaagggacgtgaaggacctcttcaaggagaactacaaaccactgctcagcaaaataaaagaggatacaaacaaatggaagaacattccatgctcatggataggaagaatcagtatcgtgaaaatggccatactgcccaaggtaatttatagattcaatgccatccccatcaagctaccaatgactttcttcacagaattggaaaaaactactttaaagttcatatggaaccaaaaaagagcccacattgccaagacaaccctaagccaaaagaatggaaggtattctaatggaaaggaactatacaaaaggttaggctggaattaactatgaaaatcagattgatatcagtttacagatattttgaataatgagataaagagtggatttcatcctgtagatcattgctttccagaattttaagtaaataagaatcatctaaaaatgtatcaaaatgccatttcttagaccttacctctaaatattctattttaattcgttgggggcaggcccatgaatctgcattttaactactctaatgtcctcatgccctatgattctgatgcaagtggttcattattaacatttttagaatctctgtttgccagggcaaatgaaaagtttttgcataggaaactagcttttttatattaatacactcataagaactagcaccattaaagcatggtttaagaggcaaagagttaaagagcaggaggacaatcaggcagacagtacaataatctagaagtaaaaagaatcagcaccaattttggttgatagcaatagaattgaaaaggggcagataagtaagtagtagaggtttaaggaatataggactaacaggatccaggcatccattggctatccaagagcaagggatagtgttccaatcccagtagataatacactctttgaatgtaggaactgagtcttacttatctttttgactacagttcagcacagtagtgggttctcaacaagtgtatgtgcattgttagataaacctgtaatataatgcacgacaacgtcaaaaggaatctctttttgtacctctacttttcttcttttaacctctaattttttaccttgcttttatatagccttttgacttgccagtaaaagtaggtttcattgtttgtgcaaattgaaatgacttaaaatataaaaggaaatatgatacaaaaatatattgtatatctgaatgtctgaattttttctccatgaacacacaatagtgaaattatatagacttagatataccactgaattctaagaaatatgtaattaaatgtcattttgtataaatataatctacttccagtaagacattgtaatagtttgtttctttcttttattaatgtttccacataatatatggctttagtgggaaatattatgtcataaaatgcttaatgtattcagcataaaaagcctactcttttaaaatattactgtttacaaatcagatcctttccaaattatccaaaaaaatgagtgaattcataaggcttctcctccctaattctttgaacatcaaaagggaccatcttcaaaatccaaatgcttctccagctttccgcaggatatcacaaaacttcctggcaaagatttttaaacaagctgagaagttttataagataaaaatattttttcagttgacttgacaaccatgtacaatgttagtgaagagtttatttgcccaaggctctttgtcaaaatgaatttaaactgagattattaaaatgtagttcaattgcagtgtgaggagaggtgttgctgatgtcttacttagagaatgttttccatgcaatgcatgtgacttggttacaaggttctacatgtagaggtacatttctgctaaaagaacagaggcatttaaaattattcagaaaacaataaatcatctccaaaagtgagagttttgatccagaaagaaaagcaccattgtgtggtagtttagaggttcatctgtgtgagcatcaaactgcccggatttgagtcacagcttcaccattaacctcagcaccttcctcatttgtaaaatagaagtcatgataatagatacattatgggaatattgtgaggattaagtgatatcattgtcagtggttaatagagtagctggcacagattaaggaacacaattaattgttttatttcaaacctgtagagtcaggactaagcattgtttcctgataattccagatgtgtgcttaaaaaagcctgtcccaatttaatgataatcttttctgttatgagttaaatggctttaggaaaatttaactactggtaaacaatgcttgaatcaccagacctccccatggctgaagctaatttcttacatcagaatcaggaccaggatcacaaaaggaaaatgattatctggatgagaggttgtaatcatccatatttggaaaatcctattacactatgttgggaaaatgtccaaattgccaaatcttggaagcaatccctctccttccctcattgggacacattatttaggaaggtttattatttttgagaaagactagttacccttcaaaaataatagcatttgtgtatggtttgaaagattatgccaccacagatggaagagtcaagcacgttccacatggcaagtgtttgttaattaacaggtcacccattgatgtgggctgtagccagaatccatggcagagaggagacaggacactgatgggctgcatttgaaccacacagttagaattacattaagccacttttactgatttgtgatattatgtcatatttataatttcttattttaacttaatatctaagtaaattcttttgattgttattttcttggtttttctgaagggcacactttcaccaaagaaagcaaaatacagcaaagtgaatttaatataattaatgataaatctgtttatgtatcttttgacaaattagaatcatataataaaatttctctgatttatttccccagtatagaggatcattatggtctgtctgtattccaggcactggtcaggcactacatatcatgtgatgcagtcatcacaacaaatcagtcaaggaagtatatttaacaaataaggcaactgaggcaggtttatttattgttaaattgcctttggtcacattaacaaggggaagatgcagagattaaatcactttctaccttcaacatctttttactctgccttctaatattttaattgaactggttcatacctatttcatataatctcttatttttcctctttatcttcaaagtatgaaaacatttatcttcctattttctctgttgtttattctattaatatgtgttgctacagactctatttgaagaaattaattagaataggaaagacaagtatgattcactggtgaatttttctaacaccaaaagtgaaaagtaatattcaataatgtgttttagttttatttataccagaatttttatagttaaatttagcatggtgatagaattagtcttaattcattaatgatatggatggaatttatttattcctttcatattatcttcttccttcaaaaacatatttaattttaacaattttgattcaaactcataattcatcttaaaaatatagtttggtagtttttaaaaattttattttgatttgcagaaacatagatactctcattgtaatttcccttagcaatttctataacagttcttttaatttcatgttttaaaacacaatatagatattcttgtgaatttttcattatgaaaacaattttatttaatatctagaccataacagaaaagagaataatggactatcctgccattatctcaggctatgcatgtacaaaaatggacttttctctgcttcttcagtactaaccctcatccacaaaaatattttactggcctcatttatgagaattcacaagagactatataattttttttctacatgatcattgaacccatgattcaacattggttacagagtctcaagaatttggagagtgaaccaaaagtaaaaatttataatgcagtatagaaaatgctgtaacaatgttgttcacagaatcctatgttgtttccagaagagatagtacaaatgggtgaggtaggggatagtgaaagaaaacctgatagaagtaaactgcattaatgttgatgattaagtagaatttgagtttgtccaggcaaaggagctgaaggagaggcactttagacagcatatggggttgcaggatggaatttatagacgcccaatgtggaatggttaatcatatgagttctagagccaggcacctcagttcaaacattattactttccaatttctcaatgtataatcttggacaagttacttctcatctgcaaaatgcatattataatcatttctaccacatttggttgtttaactcaagtttataaattcccttatatgatttatgatacctagaaaatgctaagtaacaattaactgcaagaaaataagaaacaacataatgtttgggaaactacaagtcatttggtattgctgaagtaaaaaactaataatgatgtcgaagaatatgaaggggatatgtatcatgttaaagagctggaaattgtcttatggataatgagaaaacataggaatggcataggcagattgtgttttaaatagatctcactggagcagggtaggaggaggggaagggagaatgttggtaaagattagagggacagaattcaggtacaataccataaaaattcaagactttgtatatactgtcataaggatacgatacaataattttaatagtaactataggatagaagggagatgacagttgagtgaaacacttagaaggtagagttggcaaggcttgcctctaacagtaaacaaaatagaggctatgtgataattcaggaaaggaaaaaaataaatgatgacttgaagattctttatttggtggaacttagtagctagcaaaagcataaaaagagagcaagagaaaaatagaatagaggagtaagtagagaattgaaagagaaagtaagaaaggcagtctttagacgtactaaattgaaggtatttctagaacatctatttagaaataagtccgacttttagaatagaatttcaacagattcaggattcattaaaaaaagacaaagaaggccaggataatttgtgctatatgatgtgggaggaagaagatggtctaatgaaagacataggaaattaatagattaatgaggtttcaaatttggtaaaagatgtgtttgttttcaaatcaaattttgaagaaaatttgattcaggcaacagcaagaatctagtgtggttaaacataaatgtattatttctgagtttcatacatactattatgcaaagaatatatctgtaggtcatttccgtataaaggacctaaacatgtcattttataggttgattagggaaatgttttttattaaataaaaatatttaccttaaattggggtaacaaaatttaaaaagttaacttaatctgaaatctaattttattttgaaactaatttccttaaaacaaatttggcccccagtattttaagtattttaaccgttatttaactgcagttataaaaagttaacaagtaacatttacttagtgtaaattttaaaattttattatattccaaatcagcatgggcattaaccatgacaatgaccacccatcgtgtgctgatggtcttcatatcatgtctggtgaatggattaaaggacagaatcttggtgacgtttcatggtctcgatgtagcaaggaagatttggaaagatttctcaggtatggaggtcacttattgtttttgccttgtgaatgattatgtgtgctgtttctttttacaaatagagaagccagtgtggcaaagtggaaaggccaccagagtaaaactgaaggtacttggttccaatcctggcttttccattaactcatggtgtagtttgggacatgttatttaaccccctgctttttaatttctacatttttcaaaaaggacagttaagattatttgtaagattgaaaaattgttatcatgattttaaaaatctgtcacagtatttaattgccttttcaattttgcccagtggaaatattcacactgttcatcacccagcacgtctattatcacgaagatcagggcccctctaacaaaatcttcacttttcgtttgtaatacatctacacttctaatgttttttcattaataaatagtttccaccattatcatagccctttccatgttcagtggcagtaacacttagcttctgtcttgttcgaaaagtaaatgaaaaatattactgttattctcattttcattttaaagcacttgttcattttaaagcacttatttctataattatagaaggatcacctgaagcagtaagcaatatgcaaagtagttagtgagatgtttaaggtatccaaaacaagtcttagtgagaaatacaggaacacctagcttgctaaactcactacacagatgaactttattcacttttgtatatcctttaaatagttaagcccatttttctattaaatggctatatgtacaatatattctgtgcatgctgtttgtcataacagtctagagaagagcactcagagcatgtgatatttcagacacaccatcagtagctgcatcagcagcccttctgtaggccctaatgagttcctaaggaacatgcatgattttgtatggctgccttcacatgaatcaggactcctatgacatcaaataccactttaaaatatattacagagttgtatacaaagttgtattacaatgtcaagcacaaatatatctacactgttaatattcacctgaggatgctttccatacattctttaaatccccaaatatagctgatatcttatattcacatactacttttgggcaagttactctctgactctgagcctgtatacctattaaatgcataaaataacacccacttcacaatgttatgtagatcagctgagttaattcatatgaatgtgttttgtacaccataaagttcttttaacttgaaaattatttattacgattatcttcattgtaaataaatgatttttgacatatagaataatttctatgagtattcaatggaagagcttagagatatatttttgatattattaaagtgtttcttgttgtatgctaaccaatcatatcagctttttacattaaattcaaaagtttacacatacctgcctattgccaggtcaaaggccagtaactgcttgctacaaacaaatccgcagagtgtcaattctgtgatggttccctccaagctgccagggatgacatacactgctgatgaacaatgccagatcctttttgggccattggcttctttttgtcaggagatgcaggtaaagatccaggtggggattttgtgcgttcattcattgtttagaagtattgattggtaggagaaggtaacattattttagggtttgtggatcaaaagcaccccaatatataaaagaaggattttctaagaaaaggtttgtgcatttttttcttatactttggaagcgatagaaataagatgtgagcatttaatcaaagtgaataaagaaagacctaataatttctactttgaaaattacattgatatcagggaagtatttttattacgtcagttcaatgcttctattttaaatcccatacagttttctctccattatctgcaggaattggtttcagtacccacatcctgttccctgagcagataccaaaactcccagctgctaaagtcccttatgaaaaataatgtagtatttgcatataacctacccacatcctcccaaatactttaaatcatccctagattacttacagaacttgatacattgtaaatgctatgtaattattatactatgttattttattatttgtattatttatattgttgtattgttcttttttttaaatttgtttttatctgtggttggttggatccctggatgtggaaactacaaacggggagggccaactgtattttcttatatggaaatgggtaaaaatgcgatatgaaaatataattgataaaaatgcaataatatgaacatgtaattgtggaggaggaactatacattttaatcctgaaaataaatttttagaagtatcttttataggaacaaaaattaagagagtacatttctacataaactggaagaaaagggaaaatgtataatggtaaagcagtgtttatgtattaatattccagtagtcagtaattactcagagagaacagtagtgttaggtccttaaaatctaaaggatgaagcaaaatgaccttcttaactgatggaagagtttaagctctagtaacctttttttttctttcctgctgcccatcccctatctgcccatctcctctcgcctcttcctaacacacacacatacacattgtacttcaggaataaactgataaccacactgagagtaaattggttaagtatcgctgaaacatagcctattttacccagccacagtttctgtgaatgcctcaaaggagtttggctttgttgaggataatgctgttttgggtaactgtcagcataattaagatgctttataacgaacaaagcatatgacattataatttattgaatgctctctttggtttgtggttcttattaaaagagttgtgcacttatttgtttattaattgcttttgatcagtttcacccaccagtatgtaagctgcatgagggcagagtgagtttctccagcatctagcctagggactggcacagagtaagtgaaatatccagtgaacaaatgatttagaattaaaatgagtgaatgtatggagttggagctgcatcagatgtgatgtgtaaaaggctgtatggaccaggcgaggtggctcacacctgtaatcccagcactttgggaggccgagacgggcggatcacgaggtcaggagatcgagaccatcctggctaacacggtgaaaccccatctctcctaaaaatataaaaaaaaaaaaattagctgggcatggtggcgggcacctgtagtcccagctactcaggaggctgaggcaggagaatggtgtgaacctgggaggtggagcttgcagtgagccgagaacgcgccactgcactccggcctggactacagagtgaggctcagtctcaaaaaaaaaaaaaaaaaaaaaaaaaaaggctgtacggactatggagcttgaaaggaaatggtgttgctatgtaattgtgatctaattccaaagggtttacatgtggcacagtcatggatccttggaactccacatcgtgtgtgacaattatgacattggttctgtaaggtctgtctccggtacctctctgacctcatctactaacctccactctgctttcacctctgagtctttagacaatcaaaagtctggtcacaatcctctttcttaaatcttcatggtaaaatgaaagattttgaggtacaaaggtttgggtttgtgggcagacacttttacaggctgaagttactattattttaggcaacaaaataggctctttgtggtcactgtcactggagcattgcacaggagacagtttcagttcatgtggtatagagaattgatagaactgatcaatggatcagttcatccaaaatgttcatattttataaagcattcctactgtaaaagctcagtagatgatcaactacacacgattctgttaaattgtagattcttttccataaatactattttacaagcttttagaaattattttaatatatcacatgcaattaaattttgctagtgccattctacaatgttttgacctctgaatatcttccacataatgtgtttaattatttattttatgatgtaatttgacacttttttctttttttattatacttgaagttctagggtacatgtgcacaatgtgcaggtttgttacatatgtatacatgtgccatgttggtttgctgcacccattaactcatcatttacattaggtatttctcctaatgctgtccttcccccatccccccaccccacaacaggccctggtgtatgatattttccccgccctctgtccaagtgttctcattgttcaatttcgacctatgagtgagaacatgggttgtttggttttctgaccttgcaatagtttgctcagaatgatggtttccagcttcatccatgtagctacaaaggaaatgaatgcatcctttttatgactgcatagtattccatggtgtatatgtgccacattttcttaatccagtctatcactgatggacatttgggttggttccaagtctttgctattgtgaatagtgccacaataaacatatgtgtgcatgtgtctttatagcagcatggtttataatcctttaggtatatacccagtaatgggatcactgtgtcaaatggtatttctagttctagatccttgaggaatcgccacactgtcttccacagtggttgaactagtttacagtcccaccaacagtgtaaaagcattcctgtttctccacattctctccagcacctgttgtttccttactttttaatgattgccattctaactggtgtgagatggtatctcattgtggttttgattttgtttttcatttctctgatggccagtgataatgagcattttttcatgtgtctgctgtctgcataaatgtcttcttttgaaaagtgtctggtcatatcctttgcccactttttaatggggttgtttgattttttcttgtaaatttgtttaagttctttgtagattctggatattatacctttgtcagatgggtagattgcaaaaattttctcccattctgtaggttgcctgttcactctgatggtagtttcttttgctgtgcagaagctctttagtttaattagatcccatttgtctattttggcttttgttgccattgcttttggtgttttagtcctgaagtccttgcccatgcctatgtcctgaatggtattacctaggttttcttctagggtttttatggttttaggtctaacatttaaaattaattcaagatggattaaagacttaaatgttagacctaaaaccataatttgattcttataaccattaaataccatattgtctagtcctattttacaaatcaacaatttgaggtctagagcagttaaataatactttgaagttcttatacctattaacagagaatgctagatccaaactcagattatgtctaaatcccaaaaatcagatgctctccagtctcctatggaactcaaacttctttatatgctatattgtcttctctatggaaaaacccttagatcagatctcatatttaaactaatttttttgtctcctatagcacctatactatcagttttaaccagtatcttaattgattcattttgctaaactatttgctctatttatatgattatttcccaataacctacctgcacagattttttccttgatctctgaaaatatgattgtttatttaggttttttaaatctgtttctcagtatcctaggatgttgccttgttttaaaactacacattgtgctaataaagttttaggtttaaggtttccagaaatgttctcctttttattttctctccactcttatactccagtcccaaatcagtacagcatgtaaagtgtagtaacctaatagacgatagataggtagctagaaccatggaaaagataatttacatatttagtcattgatttgacaaatatttattaagttccaactactttccaggcactgtatgaagcacaaataatacagcaggaatcaaagatcctacctccatggaacttacattttagttggaggaaatataagcaaatgcatatctaatatgttagttgatgataattgtttagaagaaatataaactcaggtaaaacaggaagtactaccaaggtagatggttaggatggtgttatttcttataaggtgacctgggaaagtttcctagaaaggtgacatttgtttagagatctgaagaaagtgggagaacaagctatgcatttatcttgggaggaatacagcaagagaaaacagaatgcaaaatgccctggaattcattgtgggtcatgtcgtgagatgcccattacacatccaagtaggaatgtaagcaggtccatgatatatatttggaagtcattaagaagtataagatattggggacatgatactaaataacaattgcaagtgagttagaaaagtttcaaggactaagacccaggtcaatgcaatatttagagtttaggaaaatgaggagaaagaagaaataaaatgccgaagtatattgaggtaggaatagaaccaaagcaaattaagatcttggaggtaatatgaggaggatatttttgaaagagagattgatcagctgtatcaaaagctgaagacttaaatgtaaaacctaaaactgtaaaaaccctggaaaacaacctaggcaatactggtctggacataggaatgagcaaagatttcatgacaaagattccaaaaggaatttccacaaaaataaaatttgacaaatgggacctaattaaacttaagagctctgcacagcaaaagaaaccatcaatagagtaaagagacaacctacagaatgggaggaacttaaacaaatttaaaaggaaaaaccgaccccattaaaaagtgggcaaagaacaagaaccgacactttccaaaagacatgcagccaacaagcatattaaaaaaggtcagtaacactgatgattagataaatacatatcaaaacgacaatgagataacatctcacaccagtcagaatggctattattagaaaatcaaaaaataacagatgctggtgaggttgcagagaaaagggaagacttatacactgttaatgggagtgtaaattagttccaccattgtggaaagcagtgtggcaattcctcaaagagctaaaaaaaaaactacccataattaccattcaacccagcaatcccattactgagtatatacccaaagcaatataaatcattctactataaagacacatgcatgtggatgttcactgcagcactgttcacaatagcaaagacatagaattaacctaaatgcccagtagtgacagtttggataaagaaaatgtggtacatatacactatggaatactatgcagcaataaaaaagaatgagaccgtgtcttttgcaggaacatggatggaggtggaggccattatccttagcaaacttatgcaggaacaaaaaaccaaataccatttgttctcactgataattgggagctaaataataagaactcatgaacacaaagaagggaacaatagacactggggcctactgaaggctggagggtgggaggagggagaggatcagaaaaaaataactattgagtactaggcttagtacgtgggtgatgaaatcatctgtacaacaaacccctgtgacatgagtttacctatatagcaaacctgtaatatacccctgaacttaaaattaaagtataaaaaaaaatttttaaagctgaagacaagtggagcaaaatgaaggctgagattagacggttgatattttttcccaaagggtttgacacatcattatttgaagctatatgggaatgcctgaatatataaggtgtcaggaagtataacttaaaagtatagcagaaaatagttataactgtagaagactgaaaatagttgtgcactatgtaatgacatttcagtcaatggaccacatatacaacaatggtcttataagattatagtccgtatttttactgtaacatttctatgtttagatgcacaaatacttaggattgttttacagttgcctacaatatacagtaaggtaacatgctatacaggtttgtagcttagaaacaatgggatacaccatatagcctaggtgtgtagtacgctatatcatttaggcttgtgtaagtacactcaacaatgttcacacaatgactacattgcctaatgacacatttctcaaaatgtattcccatcattaagcaaagcatgactgtagttctgctacatacatatacaccttcaattggctctatgtggagtcaccctacctggcagtctgtcatctaagtgctatacaaaacaaatctcctatatggtaagctccttaacattagcagagttgtcagcccttttgtcattgtatctctagcacccaaataagtgctcaataaatatttgatgaataagtgaatcgattgaataatggagtactgattctaaatttttcactcatgtagataacatgataaccttttagaatattaatgcaatgactacataaaagcctacctatgctatagggcaggtatcttgtttcacagcttattcataattcaattaggcatccttatgaccagctcatttctaatcaattacaaataaacatcaagatttgtagtgtgagggttcacagcaaccttcaatatgtatgtttcaggcaaaatcttaaaaacaaggtaactctgaatctgacaaaggcagttgggccatagcatctaaattagatgtatcacttccatacttataaacagatatttaaacacaaacactagaggctcagcattattgcataatgctgatctaattaatgatataaatttacccttaggataacaacttacatctgcaaagtgtttaaaggcacagatgtagagattctggtgaaaaatgttgatcacaggcaataatagctcactcttctgcataaatttgcagaattaatggctgacttcttggatggctttgttcctgagtcctaagcaattggtgctgggtacctttaggccatctggcatcttgtggctgagccagctccaactgcatcaagtcattgtaatagcttcctgaaattacttagactggctaaaaatacagaggtatggaaggatttttccctagaaatagtaagaagtggccccgtaggagttaacctttttctgaaaaggaaggaagtgtgataaaactgaagacctccaggaaacttaagatcctgtctttgtgaactaggcacactatgaattgcatatgtattaaatggatagaaaagtttatagtataactgaatcatatgattactttaaatattgacatggaaagttccagttttacatttctcctgtatctacttgattcatccaagtttgtaggactctctcaaacctctccttgaagccaatgcacagactggaattgaaataaagtaatggcagaaaccgcaattatgtttgcaccaacctaatattatgaagaactatagaaggcctagtctctgtaatttggcattgcaaaattccagaggcaacaagaatttggatttaaaaaaggcttaacatgaaatagttggaggacataaactgcatgatttaagacttacaaagctgcagtaatgaagacaatgtggtgttgacgaaaggagagacttaactcctcagtggaacaccatagagagtccaattatagactctcacatatgtgtacaattgatttcaacaaaagtaacaaggcagttgaatgggtaaataaaagcttttcaacaaattgtgctggaacaatttgacattcatcttttaaaattacatcatatcataagataaaattaaccctaaatgtattattgacctaaatgtggaatctacaaaactataaaacttcagggaaaaaggtagaggaaatattttttttaataggacaccaggagcatgaaccataaaagaaaaacaaaacagaaaattattgtttgaaatgtatcaaaataaattattttatcttaggaaaactctgttaagacaatgaaaaggtaagccacagaatgggtgaaaatatttataataggcatatctgacaaagggttgttgtccaaaatatataatccctgtaatagtaataaaagaccaagcaatacaataaaatgggcaaaacatttcaacagacaattcagaaatgaagatatgcagatagccaacaaactccttaaaggatgcttaacatcattaatattgtatcaagaaatgcaaattaaaaccataaagacctacatttgcatatacattgcaatgtcttaagtttaaagaattgaaaaaactaaattgttgctgataatacagagcaatcagaattcacataccactattgggaatatagtataatcactttgggaaaattttaggtttttttttttttttttttttatcacttaagcattcacctcttatatgatccaaactttccactcctagatccaaaaatatactctgcatgatctctttaaatttattgagactcatttataatctatccaggtgaatgttctatatgcatttgacagaatgcatttccacagttgtcagtgtttcataaatattaattaggtcaaggttattaatagagttatacaaatcgtcttttattatgtgtatggatgttctaataattgctaaagtggggaatttaaatatcctactatgactgcaattgtctactcccttcgattatgtcagattttgattcatacctcgtaaggctttattgcaagacactaatacagttattattgttatgtcttcttgatgcattatgtcttcttattgcatttcttttcattatgaaaaagtcttctttatcactggtagaagtataacttttttatattgtagtttattatatctgatattaatctgattttgtgtgtttatttttttgcatggtatattatgcttttatttagtttaaatgtatctgtgtactatttcaactgagcctcttgtagtataagcatgtagttgtcttgatattcatctgttataaaaattataaccttttaattgaggtagttcattaatgtttaatcattgattaaacaatgtgtttgaatttaggtctagattttataatttattttttaactctttatttccctctgatccccattaatttacttttatattatttgaattctctttaggatcctactttatctattacatttttagctataatcctttacctctttaagaggcctgatctgggtctaggtctgggatcacacatctttatttaaagggccagatagtaaatatattaggcttgtcagcagcagagcctctgttgcaactcaaatctgctgctctagctcaaatcagccatagataatatgtaatgggatgagcaagacagttggccagtctccaggccacagtttgccaaactcatctctagggattaaaatataaactctctatttttctgaatctatttagagttattatagtactatttcatttggaattattggaatatgcaaccacatatgttcatttagacttcctcattcagtttttctgtactatagtcatgatatatatatatagatatagatataatatagcatctgtgtacattgtagaccatacaataaaattgtatacattttacttaatatacattgcatgtattttaaggattaagaatgtaaaaatagtcttttacttttagcttgatatttaccctttccattgttcttcatgacttcctgaagataggagttttcctttggtttcattttccttctccatgtcttttagttgggttgctaatgacaaattctcttaattttctttcacctgaaaattttcatttcatcataatttttgaaatatattttcactagatataaaattataggttgactttttctttttcttttaccatctcagaaaccttcctctatcttctcttctccatagtttaagatgagaaatgtatagcccttggattgtcatttccctgtaagtaatctgttgtttctccctgtttatgtgcaagatagtctctttatctttggttttcagaagcttgactataatgtgtctacatataatttactgcatatttatcccattagaggattgttgaacttattgattttgtaaatctatgccttttctcaaatttggaaagaagttttagtgatcattcctttaaataccttcctacctctccatcctctcctgagaatagttacacacattaatttttttgatataatctcacagctttctgtaaatctttcatatttttcaatattttccctttctccttcagagtgggtaattccctttaaactattttcaagcttactgaatttttatcatttccatcctgctcaaatccattcagtcaacttttaattttacatattgtatttttcacatctaaagtgaaagtttcaatttactttttttaaacttttctcttgagatatcttttcatttattacaagccaatttccgttacctcactaggtatattcatagagtcagtttcaaattttatgaaaatcataacacatgtgtcatctcaggtttgaattgtttatttacatttttaaagaaagggttgcattttgctattctacatagccagtaatttttacttctatactagaaatgttgttgttatattatagagcaaacatgagcaaactatggcttaaagttttactggaacacagtgacacacattttttcatttattttctatggccgccctcaagctacaatggcagtattgaatagttgcaacagagaccacctggccaagaagcctaaaatatgtactatttggcaatttacagaaagagtttgctgacccctgttgtagagactctggattctgttatattccttcaaagactgttttttgttttcacaggcaattatattaattagatttaaactggaaattttgtctcatctattgtaggcagcagctcatatcttagatcaattcatttttctcttatctgtgctatttgtagtgcgtgttgtgtatgtatgggtcagttgccaaggggagacttaagctcttctaattctattccctctggaaatctcccttcagtttatggcagccttgaccacctcagtttccgtcttcacgagtctataagatgatatgtttttccagttggcacctaatgtcaggacactcccttcagtttatggcagccttcaccacctcagtttctgtcttcgtgagtctataagatgatatgtttttccagttggaacctaatgtcaggacacaatagtgggcatctatcaggttaaagctgcaaagatgatgaactaaccttgtgccagtgttttcggtttccctcaaaagtgtgcctgctgaaagcaatcactttcataattgccatgcacaaaaaataaaatacctaggaatacagccaagcagggaggtgaaagatctctacatgcagaaatagaaaatactgctcaaagtaatcagagatgacacaaatggaaaaacattccatgcttatgtataggaagaatcagtattgttaaaatggccatactgcccaaagcaatttatagattcactgctattcctattaaactaccattgatattcatcacagaattagaaaacctattttaaaaatcatatagaaacaaaaacaagcccaaatagccaaggcaatcaagcaaaaataacaaagctggaggcatgatgttacctgacttcaaactatactccagggctacagtactaaaaacaacatgatactgggacaaaacagacacatagaccaatggaacagaagggaaaacccagaaacaaggttgcaaacctacaactatcttatttttgacaaacctgttcaataaatggctctgggataacttactagccatatgcagaagattgaaactgggcccctttttaggccgtacacaaaaattaactcaagatggattagatacttacatgtaaaacccaaaactgtaaaaaaccctggaagacaaactaggcaataccattctggacataggaacaagcaaagatttcatgacaaagactccaaaagcaattgcaacaaaagcaaaataaaagagagagagagagagagaaatgggatctaattaaactaaagagcttgtgcacagcaaaataaactatcaagtttccaccaagagtggacagacagcctacagagtgggagaaaatttttgcaaactatgaatctaacaaagatctaatatccagcaacaatagcaaacttaagtttacaagcaaaaaacaagcaaccccaataaaaggtgggcaaaggacgttaacagacacttcaaaagaagacatacatgcagccaacaatcatatgaacatcgctgatcactagagaaatgcaaatcaaaaccacaatgtaatactgtctcacactagtcagaatggctactattaaaatgtcaaaaaataacagatgctgatgagatgtggagaaaagggaacacttatatactgttgatgggagtgtaaattagttcaaccattgtggaaaacagtggggcaattcctcaaagagctaaaaacagaaatagcatttgaccagcaatcccattaatgggtatatacccaaaggaatatcagttattctgttataaagacacatgcatgtatgtgtttactgcagcactattcacaatagcaaagacatggaatgaacctaaatgttcatcagtgatagactggataaagaaaatgtggaacatatacatcatggaatactatgcagccataaaaaatgagataatgtcttttgcagcaacatggatggaagtggagccattattattagcaaactaatgcaggaacagaaaaccgaataccacatgttctcacttataaatgagagctaaatggacacagaggggaacaacacacattggagcctattagaaggtggaggctgggaggagggaaaggatcaggaaaaatatttaatgggttctaggcttactacctaggtgatgaaataaactatacatcatacccccatgacacaagttcaggtataacaaacctgcacatgtacccctgaacttaaacgttcaatttatttatttatttattatttgagacagagtcttgctctgctgcccaggttggagtgcagtggcatgatctcaccttactgcaacctccagctcccaggttcaagcaattctctttccccagcctcctgagtaggtggaattataggtgcctgccaccacgtctggttaatttttgtatttttagtagagacaaggtattaccgtgttagctaggctggtctcgaactcctgacctcaggtgatccacctgccctggcctcccaaagttctgggattacaggcacaagccaccatgcttggccaaaagttaaatttaaaacaaaaagtatgttgccttggttcactctccagagacttcaggaagttgttttttgtattctgttcacagtttatagttgatacctacaagagggttggttttttgagaaattaatccaccattccagaaggggaatctttttatcttaattctgtatcattttctttaaaaatttaaaataggttcttccttctttttattgttttcttttctttgagggcctccattatatagatattaacagttctcctttcttttaatttatttttattccctttctttaacacttcctgatgtaaccatgaaagagtcccttgcagcttgctgcttcatgcattggctgtccatgggttacatttccctttctatgcctatcactcaacttctgccagtagctatgtatgtggagtggaggaggtgaaagagagaatgtcaaacttattcagtggacagtggtcaaatctcctctgttaaaggataaagtttctaggatgtaaatgagctagatttctagcatttcttcccactaaaataaggtttataattaatgtttaaatccaataagtgttacattatgtagtcaatgtttattaagatttatcctcatttttatcagtctatttgcttaccattgcttttccgtcctttcttataaagtcttatttctttttcttaaagaacatcatttagaagcaactttggggcagatctatagaaggtaaacactcagtgtttgtttcattgaaagggcctgtttttaaccttcaaacctgaataaaattttagctgagttcaggagtgtagattgacagatttttttttctcttttttgcctctttgaatatatcataaattcacctccttacactgatgtcaagatgtcatctttgccatgtgcctaatgtgaaaagaaaacttgccatatttgacatatttgctatagattttcttagatgccctttaattatacagaaattaatttcaatgactagtttgctaagatttttaagtgaatgttaaattgcatcacatattttgtatccacagatataaaaatcatagattttaagttattaatgtgccgaagtatattaattaaattcctaatatcaaacttacctgtattctgaggaagaaaacctaatttggtcatggatagattcagtctgttgaaatttgtttagcatactcagctctaaattaatacatgaagtagatcactatttttactttcttttaaaatccctcctagtttggatatcacagattttagaagttgtgcagggacatggatagagctgtaggctattatcctcagcaaactaacacgggaacaaaaaaccaaataatgccaggcgcggtggctcacacctataatcccagcactttaggaggccgatgcgggcggatcagctgaggtcaggagttcaagaccagcctggccaacttggcaaaaccctgtctctactaaaagtacaaaaattagcggggcatggtggcgggtgcctatgatcccagctacttaggtggctgaggcaagagaatcgcttgaacccgggaggtgaaggttgcattgagccaagatgattgtgctactgcactccagcctgggtgacaagagcgagactctgtctccaaaacaacaagaacaacaacaaaccaactaccacatgttctcacttacaagtgggcactaaatgatacgaacttaggaacacagagaaggaaacaacagaccctggggcctacttgaatggggagggtgggaggagggaaaggagcagaaaaggtaatgattgggtactgggcttaatacctgggtgatgaaataatctgttcagtaaccccctaggaaacatgtttacctgtgtcacaaatcttcatatgtaccactaatcctaaaggaaaagttaaaaagaagaagtgatgctctctttttctgttctctagaaagtttctctgtgttgagaatctaagttccttgaaagagtgttagtctctggacaggtgtatttttgtgggaagatttttaacaggcttaactattctgtgattatagaattgttcaccttttctatttcttcttggtttcactttagtaaatttttagtttctatttttcagtttcatatacttttcaagtgtattggcatagacttaattataatgtctattttctgtttgaactgttatcttttatgccctcatttgttattcctaatagtatttatttttgccttctctttttgcttgattaattttcaattatattagtctttataaagaattagaattcagctttattttcccttttgagtctttgtttcctattttagtactctctgtctcacacacacacacatacacacacacacacacacacacacacaagctattctaataattataataaagttctgttattagaaaagaatgtttctaaaattttattttatatctgaatttcctttgcaatctgttaagttattgaaaatgtattgtagagagtaatgcagggaaaagaaggtagttatatgtccaaggattaattattacttcaatgcatacgcagttaaaattgtcttattttaacataaatttcagaacatcttaatggaactatttgctataaagaaaggcatgggcacaggttagctctgaagataaattttataatatttgtacaggacaattaaccttccatttcaatacatagtacatttatgtaatatttaaaaacctatttgagataaacatccaagtacatattatattcttttaataaactctttttactatagaagcataacaaaggaatatcgtattatttttattagtttgcgagaaaatgctgggttttgcatctctgttgtggattcctatgccaagcattttaagttatagagttattttcgtaactgacctattaagtggtttcagcaactaagttgaaaaaaatatttgacccttgcctgtgtaacatatggacagtgtttgtctctaatataatacccgtaatgccccattctgccctttagaaagggcttgctgttatgtacctctaatgtgacatatctgaggtattccacttttcaaggtgaaaactatccatactatttcttcaacattttcttgccttacttgtgggattttggtttgaacttctaaatctgagttatttttaagaccgaggctgtaatttatttaccataagatccctagacctgcagaacagaaagggtaaaagacatctctgagagagattttattctacgtgaccatgcttcttttgaaaagctgccaagtttgcttgtatgctctgagtgtctcaagtgggaatcaatgagagtacctgccgtttcaaatagcagcagataatggtggaagggcagaatgtagaccaccaacaacgttcaacaagcaagcattattccaaaactacagtgtagatttgctttttcagttcagtatgcattggttaactaatgaacttgaataaaataattattgttatgagataactaagttttattaaatgcaagtaaagaaaaattcttctttgaattttcttctaaagaaaaatcaacatttgaccccataattatcaaacatccttgacagaaagttcctagatgggtgaaatatttttagaatcaaaaatgctcaggttagacatctgttaattgaaatactcttaaatgtctccacaaaagtacatgaaaaacaattgaactctttgcctattttcaatagtttaaaatattacaaaggggcaatatgatttataggcattctttacaataattttctaggtgaatttttggtaaatgctatgggcagttagaagaagcacactagttaagctaaaccatatcctaaatataataagatatatttgtgtgacatattttgaagctggaaaaaaagtcacagaaaagaaaataaggtaaattaaatatatctcactctctccatagacttgaatttcattggatctgtcatttctttgtgttaggaacatttcaatttcactgttagatattttgaaatatacagtaaattgttgttaaaaaaagcttacaaacagttcagaaatctaaagtataggaaaataatattttgggatttgcaacaaagtaagtattagggtaattaaatattaatatattgaaagaatgtatgtttcaaataggtctgttacaatttaaatatattcttcaaatatatctaatagatttgggtcataagttgactttaattttgctgtgatttttagtctattttgaacaccaacaccagaataagtttcctaaaataacctattatcttatcaatctgctgctggtcaactgctaaatggcttatttttccctacaaacataaagtccctagtctttcctggctcttctgtcttttcagccttgttctttactactctcccccatgatattcctactccctttgcaccagtctgctcaccttttcataactatgccttccccatttctacttgttctgtctttattgacctgttctcctccactctcttctcccagtatctggataggtagtaacacagtcatcttcactacagatttaatactcaacttacttttttttttcttttttgagacagagtctcaccctgtcacccaggctggagtacagtggcacggtctcagctcactgcaacctctgcctcccgggttcaagcaattctcgtgcctcagcctcctgagtagctgggattatgggtgtgcaccaccacactcagctaaatttttaagtcacttttaaatgtcctttatggatttcatatttctgtacaattgttaacaatatgtgtgagtctaaaaaatgtcaaccaccttacagaaatagaaagtctttattaatatgtgtgttggcctcttcatatctatgtctctgagctgaccacaattatagctgtctaaggtttttgacaatttttcttttacatttcctcagagttatctttgcttattgttgccatgtttcagctgccttatccaagtattttttattccctttaacatttccgtagaaaaaatttcattgtgttctgaaaatgtaaaaatccttcatactgaagtaaaaagtactgataacaatttacagaaacatacacactaagactatattgtgtcaggggtcaagactatataatgaattaataaagtactaaccatggcatttaagcataaaagcagagcataagtgggaatagaccttagggcagcagacactgaatttataacacaaaaacaaacacttattcttccagcctggtccatgtgtcatagcatataaatgatgatttctgtcttaattttttctgttgtatctacatcatcttgtataaccatatgtgttttatttaaggaagttttaaaagatttaactttatgaaatagatttttctatcattatgtatcaatcttcccatcactataaatgagccctatactatttcaattacagatttaatattttaattacctaaagcatatttttcttcaaataatttttgttattctatcaaaatagctttcttaacaatgattggcttcacttaaaaaaatgtgataccttccccttattagttattgtgcctttgttttcagcatgttatttgcacaggattatggtgcaaggtagaaggtgagaaagaatgcagaaccaagctagacccaccaatggatggaactgactgtgaccttggtaaggtaagtcatttgtgttgtctgaatttaatgagcatactagatgaaacttgagaatcttgcattttctctgccagttacatttgtattcatcttagcactgatggaataataacagtatatacaaaaatattagtatttcatcagttttaacatttatactttttaaaatccatggttgttttgttaatatcaatgtggtgaggttttattttatttgttattttatttgttgtgagaatgttgagagtcatatatatgcattaatatagcaaaaatgtgaatttttttactttttaaacagaagtaaattaagcacaaataatagcataaatggtaaaatttctcattgccaatggatcttttcaagtataaaataattgacttaggagagcaactgagtattttttctttgtcaatataataatcatccataaaatattccagttgacatttggagattagtaaatatttggctgtctgtgtagtttaatgtacttcataaggctttaaaaatttgttagtatacatttccagatctaaataactgcttttgaaaattaattttcctttgaggaatatgaagaagatggatttcacatgtatttaataattatggttaacataatcaaaagataacagatcaatagtttacataattttctaatttgcatactgtgatgggaaagtagaattgttatcactgtactcaattgttaagatcagaaagcttgcctctgaagagcatgaatgtgtattacatttgaaaataaatagcaacgtaaagaacctatagatttcttatggtgaaatacttgaagaaaacatgaaattaggtggagttttattttaaaaacatatcgatttgaaaaatggacagaaatgaagctattaacttctagaaattcgtcttaagaaagtacacacacagacgcacctacacacactcacacatgcacacacagatgcttaggcaaggatgcagtttgtaatggtgagaagtgagaaacaataaaaatattcattaggagacaaatggtcacaatgtagttgttaaaaaatgagggagatacatatgttctaacctgaagagatctataagacatggctgttagttgataggcatgtcagaaattttgatactttacaatacagtttgacatttaaggaaaacacagtgtgtatacagatgtgaatacacacacaaaagcacacacacacacacacacaagtatatattttcaaactcataaaattagctaggcttggtggcacatgtctgtaatcccagctacccagaaggctgaggtggaaggattgcttgagcctggaaggcagaggttgcagtgagccgagactgcaccactgcactccagcctgggcgacagagccagaccttgtttcaaagacaaaaaaaaaaaaaaaaaaagaaaaaaaaaagaaaatataaacacaaaactccaaagtgtaattagaagttacctcttgggagggaagtagaattgatggattgatggctgggagtacatcaatgagagggatgggtgaatataacttttctgcagccatttctggattgtttgacataagcatgcagtgatttattacttctatgatttctttaattagaaaagaaaaaatgtacaaattgtttaaatccaaactatttttgaaaaaaaactagaaatattttatcactatatattatcaataagaaaatgattccttagagggaatttctgtgaaatatcagttaattgtttacagactgtgccaaatatttcctataagcttaaacaaagcatcagaatttgggtctgttttattttttaaatatatacacaaaagtataagaacctgtgtatatcaagcaagtctcctgatattgtgctaatttattgcttgaatcataaaactttgcaccagcaatcatttttatcatccctgaaacacaaaagcagtaatattaagagataaccaaacatactgcgatgagccctcaaacatcacatagcttgtttgtctttagttttttagcaatataaaaatatctttatttttatatctggcaccttcaatatttttctgctatgattttttcccttgtatatataaacataatttgcaatcttgaaatctttaaagtaaacttattttggcagttaaaactgtaattactaaacaaaagtaaaaagttttattttcctataattgtgttaatgataactctcttagaggttctgtaatgctttgtatattgaaataactaatgaacctctcagttttccaggccatgtgggcttcttcaaatattcatctgtttcagctcttttagaagccatcgtgaaaatagcttccaacactctgccattgtgtgcagtagtgctaaaatatttgaatgcttgcaacctcacaccaaacactgcaagctcaatacattgctaaccaagagacaaagcttgggattttgtaactgataacactctagtgatattaatcaaactgtataaatctagttaatctaagagtatataattacatctgagaaggtgcttacagaattctatgcttctgaatgattttgaacaaagaggtttatatactctttatggacagcataatgcaaattgaaaacaacttgttttcttctctttttataatttttatataattttcatatttttcaatttacaatacaaatatcaatgtgttggcatttacatttcaaagagattaagtagtgggcaaatgatttattcaaaaataataaatgtatgtattttacttacagtacttactagaaatgaaaagagcggaaagagacattaaataccaatttactagaaccttagactgtttggaaggattctatgtaatatattttagttatttattttcccaaattgagaatcttgaaattaccatcataatttattattggaaacaatgaagactgtaatatcctaacagtcacaatgtgcatatgtacacagctttttccctgccttcctcctcttctctcttccacaatatatgtacaagatttgatcagagactgttcaggctcctttgacatcttcacagacccctttcaaatgtgtgttttcatgaacttcctatacatgtccacataaaaatttaggagtatagaactataattagtgtgttgggtcatgcactgtccccaggtggtctatattacataatcccttagtacttttataaatcagattgaattagtagataagacaattttttagtgttttcaacaatacataacttcttttttgaggctaaaaaatgcaaacgttgtatgaaacaaatcatgctgctctccataatatccctaatgatatttatggaaagcatcattgggattattttacatataatcttatataacatattgtataatagtttaaacaaaacatttaacactttcctcattgttgaagcacagaaccatatagaagacacaaaagcaggtaccctctagcttcatccagacatctggttatctgcaaggtgacaaactttaaatactatgctgtagtactttcttcaaatttcactgatgtgtatatgcaaataggtttgcatttctgtatccatttctcttcatcagccagatgtgtcattgtttaaatgatgtacaaatctgggtcccagtgatttccagaatattttagtctgttatgaactctagcccagtctttcaatgccagcttgctgctaaatggccaaggaggtatgatatgcactctgggaaacataaacacccttaaagtaggctaaaacaatgtgaccaattgaagtttgacaactttcacattgaatttttttttccatgaatggcataacttttttaagtccttaaaacaagtaagtaatgtagaagttttcacatggtttctttctccttttccaatttttttttttttttttttttgagacggagtctcgctctgtcgcccaggctggagtgcagtggcgggatctcggctcactgcaagctccgcctcccgggttcacgccattctcctgcctcagcctcccaagtagctgggactacaggcgcccgccactacgcccggctaattttttgtatttttagtagagacggggtttcactgttttagccgggatggtctcgatctcctgacctcgtgatccgcccgcctcggcctcccaaagtgctgggattacaggcgtgagccaccgcgcccggcctccttttccaatttttaaactgcatctttgtacaaaatccaaatttatttaatgagaatcttagaatattgatattctctgagttgttgatctttattttgtttttcaagtttagattaaaaactttttgaatctaaaagaggttgaatttaaatgttgacattattagagaaaatctacagagactaattattttatggcctataaaagtaaagcactaacagggcccacacaaaactatatggtatagttttaattctcttttctaaaaacagcaataaaaacatattatcaagtaaattctaaaaacagatgaataaatatcagaatgaacagaattttgcttagatttctgaaattattaacataatgatacttataactctattattattacagttagcccttattaaatccttagtaagggctatacattgtgtttagtctttcattcaattcctaaaaaaaactgttaggtaactatgattatcattcacattttagaaatgagcaagctgagaatcagagcatttctgtaatttcctcaaaatcctttgtaaattgtgttgccattaagtgtagaagttcatttagggctaggaggatcaacttactcaacctcatcgttatacaatcactaatctaaatgcttgtaatcttacttattattctcaatatgattttgttactcttaccatgtttgctacgaccatcatctatttgattttcaggaatgaggagaaattttaataacctgtcccccaaattctagcaaccattcctgggtgaccatcagcaatctctctcattgcttttgttttcagtgaatgaaaaaataaaataaaaataaaaaagagaatgactacacttctttctcttattccagttatctttaccagttaatagataccaagtaaagtataaaataattggcatgaaataacagaatttcagcatctaattgcccacgtctttcaaaccaacttgctgtaatgttaatgtttgaacttgatgggaattctttcagaaaaaaaaaaaaaaaaaaaagcataaaggaaagtgctaaaatcaaacagtactttttaaaaactacaagttaaaaaagtaccctgagtcactgacatttcatacgaaaattactaaatttgctaaaaatgtctgctttgacgtaggacatttatttcttgtttccattcttatatattactctgatttttttgtcccttttaaattattatcggtttcttaaatgtgttggattttctttcctggttgtgcaacctcagattccctacccataatctttaccctgtctccatcacaaaaactgaattcttagggctatagtaacaaatatctgcgcactgctttcccaacaagactgtatctgtgagaactgggcaattatattactatgacaaaaaacaagtgccaacttatttttggtctttcctaattccccatgtttgtggctctagtagacctgatttaattgcaattccagtgacattataggccagcgaatgattttcagttgtgccctgatttgttcacctaagacataacttttggaatagtggtgtaaggctggagaatgtaccagcaggacctcagcacctgaacatctggccggagagtggagcctgtggagtccttgtagccgaacctgcagtgctgggatcagcagtcgagagcgcaaatgtcctgggtaaactcaaagttcctggttgggggagggcacttttcaattttggaatgcaaaggttttactgataaagcatgttggaaagcaaaagaagctcctcaaactctactcacgttggaaaacagaaaagtccttcaaattatttattttatataaaaactgcctttaagaagaaaataaagaccaacccttctaagaataagtaatgaaagctataaaaggttatttcttgagtaaatctataaaatatttcaataaacaggaagatgtgtattagaaaaattatgtgaacatttacaggaactgggagaagagcagaaggatgataagaaagagaatgagaacaaaattaatgacagcaaaagctaagactaacgaaaaacagaaacatgctaagcacaggtacagacaggaattattatgggatcagcttgttcaaccccattattcctagaggaattctagcaaagtatgagaaagtcattccagcttgtgagctttaaactctattggtgtagaggtcacatgcagtcttaaagaatttatatgaatttatgtaaaaacacctccttaaaaattctaagaaccaaatttcttaatgggcatttgaaggctttctattttcccttcagtttctgccctttactctaatgtatcattttcatggcaagtgggattttattcctcatatattttggaaggtatattgatcaaggattagaaaatatatatagttaaagaaataaatatatgaatttgctactactatcatttaatgtgtccaagttttcaaaagtaaatataatataaggggttatatattattaatataatggcttttaatttaaaacctaggtagttaacataaaaaacataaaattgattatttgtactttcttttctaggctagattctgaagcaagggattgtaatggtcccagaaaacaatacagaatatgtgagaatccaccttgtcctgcaggtttgcctggattcagagactggcaatgtcaggcttatagtgttagaacttcctccccaaagcatatacttcagtggcaagctgtcctggatgaaggtatgaccaaccagatcaccaccatctttgttaactagatttctaggtttgcgaagtgtttttacaatagtcagattattttacctattatcttcaaaatatttctgaactttaattttttctacctgtatggacatataataaccacaagcactgacaaaaatatattttaaaaatatgaggagctgttaccccatacctattagaacaactaaaatacaaagcagtgacaacactaactgctagtgaggataaggagaaactggatctctcaggcattgcttggtgggattgtaaaatcgtgcagccactttggaaaatatagtttgacagttttgtaaataactaaacatacactaacaatacagaaatcatactcctgagtgatggaatactcctcagcactaaagaggagcaaactattaatacatgcaacaacctgatagatctcagagcattatgctgagtgaaaaatgccaatctcaaaaggtcccatgttatgtgatttcatgtgataatattcttgaaattataaaattatagagatggaaaacaaattcatacaaattagtggttgccagggattagggatggtggtggggagagggatgggtattactataaaggggtagaatgaggaagatctttgtgctaatgaatagtttcagaccttgattgcggcagtggttgcacaaatctacaaatgtgataaaatggcgtacagctatacacacacaggtacaaatgccagtttcctgggtttgctgtagttctatagttgctcaggtataaccatggggagaaactgaatgaaaggtaggtgggaactctctgtactatttctgcaagttattccaaatatttaattatttcaaaataagaattttaagaaaattgtatgctgccttattagttaagaatgatatgccaagcaaggtggctcacacctgtaatctcaccattttgggaggccaaggcaaacagattgcttgagctcaagagtttgtaaccagcctgggcaagatggcaaaaccctgtctctaccaaaaatacagaaaaaaaaattagctgggtgttgtggcatgtgcctgtagtcccagctactcaggaggctgaggcaagcccaggaggcagaggttacagtgagccaagatggtgccactttactctagcctgggtgacagagtgagaccctgtctcaaagaaaagaaaaatgataatacttgcccatggtgagtgggctgtgggtgtgggctgagttgcagccaccaaaagtggtgacagatcatctgatttcattggttatgatgccactagtctctcttttctccccttagtcaatttgaactttgctttccatcattccagttacactcttctcaataacctaaactccattgcctgtccatttcagtgcccccatctgatgaaacccttttctcacagtagcacctacatacaagcactaatggaaacagccaaacaatagggcagattattccactactagtggtggtggggggaaatatagcagccaccagattacctccttattttctgctatcaagacacgttagcctaacgtaggatacttcatctgctttctgctatatggcagaattttaattcctcctttccaaggccagtccctccagttgtggccttgatgccatccccatcttcctctttcagctatcttattgattacccccactttctctcatatagttaatcttctctgttttggatcattcacatttaattttttaacatatttaagactctcccactaaaacataaaaacttcccctcaagatcatagccatcttgagctggtgcacctacatgtttctctcctcacaaccacccttctcaaaagacctgcctatatcccagccctttgtgtttttcccttcaatctggattccaccaacacaagtctttctaatgtcatccaggagtctcatggaaacaaaacctaataaatagtttcccatcctcttcttagttgactcttaaatacattaaggtggctgcccacccccatggttcttggaacactcgtgtgccctgcttggttgctgtgttgttaacacctacccggctttcctactacatctctggtatgttctccttctgcctacttcaaacactattctgttttcactgtgcattttctttttaggtgatattatctattcctatgacttcaaatatgcaaataatacatgagtttacgtcttcaactagattttccatttgagctccaaacttgtatgtacaactcccttgttgatatatctaattggatatctgcaggtttaagaccaaactcatgatcataacccttcctattcatgtccatttgatcctctttagtgtgtcccatatcattgaaggtaacacttgcttttcagttgcacaaacttgatcacctgatttataaggatatttctgtgtcctgccccctttaacttctcctgcctcatttccatcattctcttttatagaatcctatatggccaggctgacttccattccaccccttagatacatctgctctcttatttttgggcctttataccagctgggttttgacataataggctttccttctcaagctttgacatcgttctttatttatttaccttgaacacttctgctgattttggggttcagtgtatgtcagttcctctaggaagaaagaatccctctgatcctccaaattatgtgtcccttccaagtaccacacacacaacctgtaatagcacattttattgtgtctgcattccctctaatgtctgtccctagtgtatcatctactgtatattaagtgtccaatgaatatttgttaaataaatttgaatacatagccagtaactttttattataaaaatataatcaatatgactgttcacatcatgaaaattttctgattatttgaatgttaatcctgtctctacttccaactggctgtgacagttaataatgtcaagtttatttgaaacccatttacttacgtgtgaaataagagatagaaaataggtgttctccaaattaaaaaaaaatcagagttggatgggcatgaatttaaaacactaaagctgttagaaatcacaattaaaggaacttctgactcttacaaagtgatgtatatcatcaaaataatccacaatacctatttgtataatcagcaggttaccatttgtgatgattttgcaacacgtatcaatcaaactcatcagtctatatttcaaataaaatatacaacagtcactagcctacatgtattatagcgctgtggaagaaatggaaatacacaattcttttaaaaacatgtgacaccttaaaatacaagtggctgtatctgttatataatacttgaatccctgcctaggagaattaaatgtggggtagcaatgcagcagtgaacatttatttttagagaaaagacatgcatggcttcaacattcaggtatttcacatactttgtgtgtgccaaaatttggctgaaatccatgtctattgcatatcttggaaagagttggtctcttaaatcaagacagaacctgcctgccaagtatggcatgttacatggatcactacagtgtcacagccttgagggtatactccagaaatgaagagtggtatcaaatgtttatgtcatctgtacagctaaagtcagcagagtgtgttggcaatatgttttaaaaggagaaataaaaagatttttatctgaatttttgcttggaatatgaatggaattttctaggagactaactcctttcaatattatttattcatatatctggtttgctcttctcttcaatgaaaactccagaaagagcattatatataccacttttaaagtgttgcaattatagcagctgtttttaagttcaaagatatgacatagtaagcagtcattgaataaacataacctactttgaggtgtgagagcacacggaaatgctttattgcggcttataatggcatcttaaaggaaaatttcaaaaccatgcacattaaaggccatgttccaactccccaaaattgttgagagcagtattcagaagccacatgtgaaaactgtttgaaatgttcacttctgaaggttcatttaactgtctgtcttctctttgcaaagtgataccctgttccatgcctctggctgttatttggtatttatagaatcccatcagcatacgtggaactttactgaagacataagggaagatcagtgtcagagactttaaacttttttccattctatttatataagcttaataaacagtaaaggacctgactggcatcaagccaatagagtagtaatgtagcatggaaattgctctgacgtttcagatttggataatagtattactagtgttaccaaatactgcagctcctctgtaggaggcttagaaatggacatagcactttaaaaatatcgtgccactttctgagcctaaaaggcaagtgttttaaccccaaacatcctatctgattgctcaatgatgcacaaagaagactcgcagctgcttaggaattatttacctggaataaaagttctcaacctagatatcgtacacaacgacatggtttctgcataagtagtgaaggggacagagttctcactagcacatcagcagttgcgcataactatggatgctctcatgggatggtattgcatttcaaaacaatatttctgttgcattgtagtaacaatcctagtaacagaaatgttttttacaaatgcaattcttactacaatcctagtaacagaaaatttcatgagaattctcatcttagaggctcttctttctccctttagacattttttcaattagaaaatgtcaactatatagaaataaatactagcacattgaaatttagaagtaagacatcaataaataattcaagcatgaagtaaatcttaaccaggacttaaagacaggtagaatcctggtgtctactaaagatgaagaggatatcatttcaaaaaaaatatgagcataaaattggggtgtgccaatattattcagggaggaggtctggattgtgtgtgctagatatgttctgccataaaataacaaatgatacattttaaggtaatttgaagccagatttcttagaagattaatattcattaaacatctccaggcacctaatttattgcacatagaaatcttctaatgttatctactctaacattacattacttaattagcattgaattatattttttactcaataacgattcttaaaaatgaagcttaagataaaaatatttatggggtaactttttctcatttctttttatctactctgtatgtagaaaaaccatgtgccttgttttgctctcctgttggaaaagaacagcctattcttctatcagaaaaagtgatggatggaacttcttgtggctatcagggattagatatctgtgcaaatggcaggtgccaggtaagacattccaaaaaaaaaaagaatttatatgttgaaggaaaattgtgggaccactgagcagcttcacagcatggtggaaagctttggacttagattcaaaagatgttgctatagtcctgccttgactgtgaccttgagcaagtctgatttactttgaaacctcatttttccatctgtgtaataatgggtttgacttggtactccataaaatctattactaactgaaagaatctgagattttgattgtgtaatatatatattacaggtttaaaattggagcactttggacattttatgtcaaaatatttcagaccaaaaattcaagcactctagttctccatgctttgtgtctaagactgagccatgagtcaaaaatcaataaaattgaccttataactcatattcaagtatcatcaatatacttgaatcagatgatttttaaatgcatattcaactttctttaataaacattttatttgcttttctctcttttaaaaaatttccatttatatgcatgtatgtgcttttcatctatgtttagaaaaagtagaattcctgttaaagtgattatgaagaacatagtggagagatcaaagtgtagaagtgagcagttgctagtcatggttctgccactgtctcaagttgacattccctggaagattaatatgcacaaagtttaatgccaagtgttttcatgatcaacatctatgtggagataaggaagaggcaggtttgggcacagggtgaaatcaggttctggtgcagtcacaagaccttagctgaccctgtgggaagtgcttaaactggcatggggcttgagagttgttaccattttggtgagaaaatcaggccatttactctcaacatctactattgtttggatacaagctgccccaggaagtggctacaaccttggggaaagcaggtttccttagtctagatagtttctgataaaccttccagaagcaggaaagaaataaatcctttggcaatgaaagaggctgctgagtggagtggcactgcatccatgacagcctttaggaaactgttaactgggcaaatcacttaaaatatatttgcatgcatgaactaatctgtaaaacaaagttggtagaccattggtcattgactttgtgctatatacactcctttgagaatttgatgaatttttttttcctcgtaaaaatgcacaactgaacacacacatacacacatacctgcacacaaatgccaaaaattgaaaacaatttcaagctatgaatggatcaatccatgatccaatagaagtgtatgtacttctgggtaagaagctgggaacaacacgaaacttaaatcctttctcagctctgagattccatattttgccagtaggctataaagtttaaagcatagaatcatgtaaaaccattggcataagaagcagtcttttgactacatattaatttattttattccttaacagaatacggcaattaccaaaatgtagtttttcattaaaaattatagatattttacctatacatattttgttttcagaactatattctgtactagtagagctttcatctcatcattatatataaatctgttagattattgtatgtcttaaatgaatttatttcttaaattgtgcatgtcaaatataatagcctaaattgctatgctttttacttaacagtattgtataagccaaatttttacagagtccctgggtaaaaattaaaattatagcaacaacaacaaagattttgcacaaatgctatgtggacctgatgattataattaaattagaattatttgaaatggattgtggcttataatggcattaaaacacttcaagattctggctttttaattaaaatgcttcatttagtctttcagtaaaattgaaaacatgcctctttagtttttctgacaaccctcaacaattgggggtttgactagagagttttatcactaaatatatagcaccaaagctgaatgtagcattccagacttagtgaacgaaaggcaattgaaagcagacaactttctctggtgacccattttggttctgtgattttctcttactgaaaacgataaggaaggctggagcctgtatgatcatgttatttgcgtatctcccgcacaccagtggtacctcaggtacttgctaccagtcacgaggcattgcctcttcaaagtagttcatcttcaacttttggatttatgtgagcatattttgatatgtgtgcatacttaaaactaccaattataaaatacaaaatatttaccttttatttttaaaatatatgattattgaactgtagtatatatgtctattccttacttttactttagatttacagaccttgtaatatcctagttaaaggactgggaaaaactaagaaactactaactaccaacgtatttaatagttgaactattacttactgttttctcaccatttgccaagaggcaatctgggtaccagggatagagcaataaagatacttttatcatttcaaaagtactctagctctcctcagctttttccccattggaacatggaaagacttttcttctcaatccaggactcccaggtcaggcttctgcttaatgttctcttcacatacttggttgtgttctgctcatttcctgtggtggctacttctttcatctagacattctctttatttctccctgaataagctttgacttgctgatcagagttttgtgctaacactttgtacctcttgacactgataggccccgcttgacaaaaggaaggaatgctgtattgtgcagttttaatgtgacttttgctcccagcacattcatcctgcggctgcatttaataatctgctagcttcccccaccccaacaccagcagcaccagtcacaaagattctgtttttgtttcagttgtatttaatattttaaaatttcctctaaaataattggaacctattataaatggatgtatcatcagtctctgttccaaatccttcttaattaggaggaattatgtaatactaccatttatttctgacagtactgacatactaaatcctgccctttgagtatgtacagctttgcctcatcaatgggaagtaaacattatttacaagaaaagaggcaattgatttggccttagaagattcctatgaacgaaattcttctgggggcttataaaaattaattccccaactgttcatattttcttaaagcagccataggttgtgaggagttcttactcacattcatgtgctaggtgccaaaggagatagggatggataaactacagttgattcatgaactgtagtaaaaataaacatctatgttcagttttccagaaagttaatatttaccatttagcacttactttacaatcactttaaaagttaagccatccatatagtgaagtatatctgttccttgttgagtagaagaaattaaactaatcatgttgtatttaatagaaatgtgatttcctttgagacttatgtaaattgcatttttctcaataatattttttccaaattactttatggtatcatttaatacttactataaaagatactctaagctggtcagagtggctcacacctatcatcctaacagtttgggaggccaaggcaggcagattacttgagctcaggagttcgagaccagcgtgagcaacatggtgaaaccttgtctcaacaaaaaaacacaaaaattaacccagcatggtgacgcatgcctatagtcccagctactcgggaggctgaggtgggaggctggcttcagcctgggaggcagaggttgcagtgagccgagatggagcctctgcactccagcctaggtgacagaaccagaccccatctgaaagaaaaagaaagaaagaaagaaaaagaaagaaagaaagaaagaaagaaagaaagaaagaaagaaagaaagaaagaaagaaagagagagaggaaggaaggaaggtaggtaggttatctctcatcactatcttggtaattttacagattatgttatttgacattggcttgtgtattagcttgcaccagagaatgacattttataatatgacatttcataagttttacaattaaatatatctggtttatagagactaggtttgtcccaaattagtagtaaaacaagaaaagaatactgctatttatgatgtgctgtcactctcttgttacagaaagttggctgtgatggtttattagggtctcttgcaagagaagatcattgtggtgtatgcaatggcaatggaaaatcatgcaagatcattaaaggggattttaatcacaccagaggagcaggtaatttttctttattttttcataaatattaatccctgcaatctttgggaacacagattatattgaatttaacttaagagattatagttctaattctattgaagacttgcaatgggtattaaattatttttgtgatgacatacaatacatgtgatatgagccaaaaattctaacaagcccatttcccaataatgcaaatatgaagtcatctgttgtacatttaataagttggaacagcaagggaataatctaatttgcattggctaatgttatcaggtttctacagaccttattctccaatgcaaagaatgatgtctactggaaaataatgatttgtaacagcctaaagcaaccattgagaataggaatcctctggttttcagctttccatctttatttttttcttaatgtttttgctacattatcagggagtacgtttttggaaacagagggtccatgacattgtagcatacaaccaagaggcgtcagaagatgtgagataatgttccaaatagattaatagcagagttcatcctcccttgttttctcatctataaatactaatactcaggggatgtgagattgaaattatgaatgatctacatagtattcatttaaagtaattcacaacaaaatatgatattgtctttactgaaatataatgatcccaaaatgtgctttatgtacagaaaatgctttatactcaggatcttaagcttactggaaagaagcaaacattttctgtgtttacattagtctgttacctgggcatgtgtcttgcacccttaatactggtatctattttcatgattgatatgcttatatcaaatatactcttttctttttaaaattatagatgtgctttttgagagagtgttactctgttgctcaggttggagtgcagtggtgcatggctcactgcagccttaacctcccatgctcaaacaatccccccaactcagtctcccaagtagccgggactagaggcatgcaccaccatgcccagctaatttttttttaattttgttttttgtaaacatggggtctcactatgttccatagactggtctcaactcctgggctcaagcagtcctcccatcttggcatcccaaagtgctgagattataggcatgagccactgtgcccactccaaatatgctgttttcatcattgatatgcttatattacagataccaacattttcctagtttaaatttctttttgaaaagaacaagaattctaggcctaatatatgaattaattttaatacaaagaacagggcatttatgtttgagtaatcgagaaaacagttcattccagataaaacagtccttcagaaaagaaaattagtcaccatcttctaaagtatgaatgtaaattgtttgctaggcctaagcagaataaaagataagtgagactgaacatcttaaagccgagaaatgagtaaggcctatggtaaattgcagatcaaactcttagtcttcaaagtggtaaaaaaggtgataggtcccacacatcaaaaatctgctggcactcctttagaaaaaataaataaataaatacttagctgaaacaggctctcagactttcaactaagaaatttaattataataagctttttctgcctgattgtgatggcagaagttttttttatagtgcagaaattcaaaaaaatttggaagactaaagaaatttaagcatattagagtttttaaagaatattctttcatatttatttagtatgcctggaaacagctcacagaatacagatgcacatttagcactgatgcctttatttaattgtaacacttcatatttccactaagcatagaaaacagaaataccattaaaaatcagtgactctttttactctgactgtagttatgtgaatatatattttcctagatttctatttcaaatcccttttttattccactttaatttctacttttgttcactgtaggtaagttatgttaaaagcatgtttatttggaaaatatcagaagtgcctaagatactacaaatattaaagattaataaggccactttcttccttacaactctatgttaatttcacattgctcacagggaagaattcttagcttggaccttaaggtctacatgtgttgtccctgtctgtctctccagcctcgtgtcacaccaaggtcctcttccttctctaagttcttacaggtgctcacactgaccatacccccactgccacccaacagcctccgccacacacacccacatctggaatttccaaatgtgtatcgatcagctttctcttggctttgatggataaattcctagatatcacgtagttctcagttcaaatatcatttctttaatgaagtgatccctgaagtgatacctgctatgactaatgactattttagtgatgtttaccacatctgtatccatatcgtttagctctagtcagatttataattttatgttcacttgtctttcatttcccattagaccttaagctcaatgagaaaaaaaatcatgctatttttgtttaacaccatatttgcaattatcagcatagtatgcgatccattaatatttgctaatttaataatgaaatgttaaatttgtataagtttcaattttaaaaattctgcatgagttattaattctatcacaggcaccatctacttttgacttcaggaatattgtatttatttctcttgagacaattttatccctacagttatgtacttcctagaattttttgaaggccatacagccctgtttgtccagttggccacgcacgttgtatatattgtatgagtaacccacgtgcaaacacacatgggtgttttcagtccctgtgctctatttagagtttactaaatcattcttgttggagctggaaaataaattcaagaagcgttttcttttttttccttaatactttatcatgtcttccattgtaacttgcctagccaagtgataaattttcagaggaataaaaggcaaattacatattggccagttgttgaaatgcatagttaaccagtaaatactaagaagaaaatgggcataaaaaatgttttattctttatataagaaaatgaagtataaggaggacatgctgtaagagcttttgcgtgtttggttgtttgccacagcagtcggggagtcatagtgttaactatttttttctattttaggaaatagttgcagtgaattatagcaggaagtgaacaggagaaacagacagacctgagttcaaagcttgggtcagctaaattactgacaatgcagtgttggaaagtgtttttttcctctatctttattttctcatcatactaaattagaagtgtaatatctaccttggagactataattatggttaaaattaataatttctgtaaagtaactataataatgattagcacatagcagtttttcaaaatatggcgtttgttacttcgctgttgccatgaagatgaagattgctatcaacattttaagatggctgattaaaaatgggatctctggttataaaataggatgttactgtgtgcaaagtacacacaaggatcaaatttacgatattgacttcactggcttcatgatccaacttctaagcttctaagtcagtacactgctaattgtgccaaatggcttatttactgaaagtatttaactcccagtcattggctttctctcttcatatgtgtttgattaatacttttctacctctcttcttgaaaatcagtctaacctgtcctttaagccatcccaactcaataatagagaatcgctgtaaatataactataaacttagatataactatagttctaatgtataacatacctcagagagtactattaaactcaaacaagaatttgcacatactacatctactttgttatatctattcttcttttttaatattctgaagttcaacatctgctcccaacactttgctgaactcatttgctcggagattaacagttatctcttgattgggacactcagaactgactgtctttagtcacctttctctttgatgcctcatgtttgacatacagcttttgacagttcaccagcaattcttcttgagatattctcatccatagggtcccacttcccaaaacagatgagatctcctccttctcatgattcttcttcattttttttttttttttttttttttgagacagagcctcactctgtcacccaggctggagtacagtggcacaatctctgctcactgcaacttctgcctcccgggttcaagcggttcttctgcctcagcctcctgagtagttgggactacaggcatgtgccactatacccagctaattttttgtatttttagtagagacggggtttcactgtgttagccaggatggtcttgatctcctgaccttgtgatctgcctgcctcggcctccaaaagtgctgggattataggcgttagccaccacgcccggccccattcctttatcttttttcccgatttatttttatctctttgttaaaaactatgaccatcaccaaagttaaggccttgacttctcttcttgattttctccacttatttccatgccttaacttggtgattctgcaaggatatcttgaaaagctacgtcaatagcatgacttttctctagattccagatgttacagagttcttactggatgtttctactagtgcgctgtaccattttgttagatacaaattgcaaagccaaatttattcagttattaccaaaactagatgatttctctcttgacttccatgttcctgtaaatgatgccccattgtcacataactaataataaagcattgtgttcaatatttattatacccactttcttttggttactaagttcagaaatttttttctacagagtatcttctggattttctcccttagcctccactactcctggattttaccattagtgtcctgacactgttacccacaactatatccctgttcctcttggatatcactgttagtcaaagcctcttaaagccagaatccaattaccaaggtccttgctatagaatgtttgatagtttcaaattgataaattcattctcctgggcatgcatttaaactctctttaatagagccactctcttaaatcttctcattccatctgaattattttattcaagtgccactaaccacaccacatatcccttactcttccttatacacagtgaactcatcctttttctgtatgcatgtgaatgctacccattctccaaaggcagttcatctatttacttttttgtgaagctttcctttataagttgttctctcctttgaatcatagtgattctgtctgatgacagtgtttcccaagtatgagtaatttttaacaaggaaaaaaaaaatcctacctctgtgaataaaaatagcagtgaagccttgaaggtagtagcttaaacaactctggtttataaccttcagcagagaattaaccatatcattttgcatattacctttttaacatgatatttgccattgtattcaactcatttatataaggtagttatgcctgtctttccagttcaattataagctcactgagggtagagatcatcttacctgacttctgtgtgcaaatagccattatgcatttgtttccattttaattgctgcgtattttggtcatgtgaaaaaatgacagtgcttttatgtttagtgttactgagaatggcttagtgttgctgaaatgtgcaattcaatagttaattaaataaacagtgttcttgaatggaaattatgattctaaaagcacatgccactaattccagccactaccaccagggggggtatatgctaccttttggtatacgccaaataactcaacagtctcgggaagatgaataattaataaacaggagacaactctggaattagctcttgtgccttttctaaagcttagaaggtagacttttataagatacatggatcttcacagaactactaagaacaatattttaatataattggaaaataacttcaagcaaaagtaggcatctgttctcactattctgcactaagtgaaacttgagtctgtatttttctgcacattttctcttatctcactttaccttatcattttatttctcttcaagtattatatccctacatctgctgaaaaatgtttcctgagaagcacctaatcatgtcttgggtctagctatctgacatcttcagaaatgaccctagattgcttggcgcgaccttacactttctgtctccggcatcggtttcaaaaccctttgttaatatcctccagaaaatgcttggtctctagtgtcctatacttcagtactccagggatttagtccaggcctgctatattttctccggctatatattctttttccccacactttctaacctaaagaagttcccacaacaaaatctgaggttatctgttctatttcaagatccactgtgtttctaaccaggctgttccactgggtttttttttttccctcctcacaattcataaggtatcaatgagatttttttgtttgttttacataaaataaaagtgcctgtttgtcctccgtagtgctgtaggctcaacatgtttccaagaaacttcactggaaatcatgacagcttttatatataaaaatttttctttacgtaagtactgaaatatcatagcaataaccaaaaccaaaaggaaaacaaaaggcaagtcaatgaagaaaagagattttgaaggaactcaagatttatttcatgttttattgactcttacaggttatgtagaagtgctggtgatacctgctggagcaagaagaatcaaagttgtggaggaaaagccggcacatagctatttaggtaacctgtgttacagacacagagaagatccaagtacgagcccaactccctgccctgagagttctatgatgaggaggaagtcaatctgtttctagttttatgtttgaacttcccaggaactatcttttgtcatatcaagtaggaaaatttttccttctctcccaaggacttcccaggagcaaaagcaatctggttgtctgtatgtttttgaggggtaaaaattgcttccacatgttagtccaagataaaaaaacaaaacaaaacaaaaacctcattgaatgatttgggtatgatttatattcatatatatatatatatatatatttcataaatatatttatttcacatatatacatacattcatatatacatattaattgcatttataaatgaatttatgtatatatatatataaaatgatcgtttcgtcaggaaatcttgtggcgtttttgaagtaatgttctacatactaaaggacttgattttttaatggaaaagggttctctctcttgcctcattttaggaaatctcacctatgaagaaaacatttttaaatttttaactattccttatgaaaagtactgtatcagttattttaatagtttaattaggtcaattcatgattttaaatatatgaaaaaaatactaaattgtcaaaatatacgtgctcatatgttaaagtttcaatctaattaagtcatgtgaaattaagttttatctggcatccagagatagagggacctaatatgattatgtcaggcagacatttttccagaattgtaacactgtgtttgtattatctttacatacacaaaaaaagctctcaagcctatttttttaacaaaaataatgtcctccctattttttttctttaatgagcaataatgttccaacaaggaatcctttgtatatagaaacaactcagcttacgtgattgtttctactctgcagtatcaaaaatacataatctaaactcagattgaatttttttcaataggagttgaagtctaggactagaaaaatttgaggaaaggggactgtaaaaggaattctttatcatgtgacacactcattaccaattattaccatttgttcccaaaatatgcattggtatttaatctattttacttactatggtacaaatagatcatacaagattttcaaatacagattaaaagtcctgatacccagtttttagagacactggccataatctagacaatttcaatacattcattcaatagcagacaagttgttattacacttgcatgtatgttttcttttttccaagctggaaaggaatatagatatctcaaatggaatttctcaattatacaaaattctaaattataatatgggttttagtaacctgacacatgtggctaaataagccaggcaatattacaaaggtgacatcttcatgctgtctccaatttcttacctcccagtctcttcaaccaatccagtcctgtttcctgtctccctctacagtaaacgccttttataaggtcagcaaatgccctccatgttgacaaatccaatgttacttgacctgtaagcagcatttaaaactgttgacttctcctcatttcattaaacacttataggaccactggatgccacttactggtctcttttgtgaggtcttcagcctctttgtttccaaatattcccatactatggggttcaggcctgggtcctgatcttttctctgctatattctgtccccagggaattacatctagctctattgttttgcatgtttatttgatgtaaattatcaaaagtttcataggtacctcagaaataataagtctgatatagtttggatgttgtctcttctaaatctcatgctaaattctgatcctcaatactggaggtggggcctggtgggaggtgattggatcatggggatggatttctcacaaatggtttagcaccatcctcttggtgctgtcctcacaatagtgatttcacgtgagatctggttacttaaaagtatgtggtatgtaccccccaccctcctgccccttgctccctctctccccatgtgagatgcctgctccacctgcactttcggccatgattgtaagcttcctgaggccctcatcagaagccaagcagatggcagcaccatacttcctatacagcccacagaaccgagagccaattaaatctattttctttataaactacccagtcccaggtgtttcatgatagcagtgcaagaacagcctaacagaaagtccaaaatcaaaagtccaaataaaaaatttgatttccactccatgctaaaacctcttcttcctttggtgttctccactacagtgaatgtcactgcattagtgtcctatgcctactataacaattactgcaaacttggttacttaaaacaacaaaaatgtattccctcatagttctgtaggccagaagtccaaaatcagtttcactgggccaaaaatcagtgtttgcagtgttacactatctctggagactctaggagaacatccattccctgccttttccaactctagtggctgccagcattccttcgcttgtgaccttgtcactccattgtctacctgcatggtctctttgccttctcctttccttctatgtccaaattttcctcttctctcttataaggcctcgtatttaaggcctacctggataattcaggataatctcccatctcaagatcttcaacttaatatctgtaattttttaatgtgccacagaaggtaattatctagtttgtttgtgctgctataaaaataccatagattaggtagcttataaacaacagaaatgtattgctcatagttctggaggccaggaagtccaagatcaaggcactaatagatttggtgccctttaagggctcatttcctgatttacagatggcatcttcttgctatgtcctcacatggtggaaggagctagctagctttctgggataaggacactaatcccaattataagggcagcgctcttatgacctaatcacctctcagaagactccaccttctaatgcttctaattctaacgtggggttaggatttcaacatataaattatggggggggacacaaatattcagaccattgcagtagcattcataggttccaaggattaggatgtgggtatctttttccccctcaataacatattttttattgtggtaaaatatatatcacataaaatttaccatcacagctatttttaagtgtcaagttcagttaattcagtggcattaagtacatttacatttcaatgaaatcttttgaaggaatacaaaaaaccattttaaaattcatgtgaaattttatatacggaagtgaccctgaatagtcaaaccaatcttgaaaaagaacaaagctggaggatgcagactttctgattgcaaaacttcctacaaagctatggtaattaaaacagtacgatcctggcataaagacagacatctaaaccaatggaaaagattagaaagtccaggaatatatatatgtgtatatatatatatattcaaatgattttcaacaagggtaccaagaccattcaactgagaaaggacagtctttttctccggtggtgctgggaaatctagatatccacatgcaaaaaaaatgaagttggacctttgcctaaaactatatgaaaaagcttttttgtccagggcttttgatttttgattactgatttaatctccttgctaattataggtctatttatgatttctctttcttcatgattcagttttggtaggttttgttttgggaagtttgtacatttcatctaggttatctaatttatggtcctaaacttgtttataatactctcataatcctttttatttctgtagcattgattataacagcctcactttcatttctgattttagtaatttgagtcttgtcttttcttttgttcccttagtcagtctagctagacttgttaattttgttgatcttttcaaagaactatcttttgttttgttgatttttctctattgttttctattctccatttcacttatctctaatctaatcttatctgctttcttctactagtttgggattcagtttgttgtttttttgagatctttcttcttttttaatataagagtttataggtatacattttctccctaggaaaacctttgctgtgtcccataaggtatggctttggcatgttgagttttcatttgtctccagataatttctaattccccatgtgatttttttttcattgttgcattggttgttagtgtgttgtttaatttctacaaatttgtgcattttctgtttctgtttttgatttctaacctcatccctttgtggtcagagaagatattttgtatgatatttaccttttaagagcatagatagatatgtggtggggggttgttattcagctcatcatattcactaatttctatccagtagttcatgtaaaaactgacagtcttccttgatccttcactttctttactgctctaatgtgacgcatcaggaaatcatttcagttactcaaaattattactttttctctgtatacactgacctctaaccaagccactctgtattacattgtcctgctttattttctgtattgcatatccttgtctgaattttttatttgtttaaattcttgcttttctaatgtcaatctccattgttaattctggaaggcattttgttcttttgtctacaatatctaaatcaaagtctggcacacaggaaattatagactttttgagtgaatttgtttaagaaaaagatgtttcacacttggttagtataggccagtgcattacatacatccataaatcctcagaatacctctatgaagtaggcattattaatttcccagtttttaaaatctggtaatagagtaacagaaactttaagtttcttgcccaaggttacacatctaagaagctgtgaatctagatttgaacccgaggcatctggggatagcatctgggttcttaggcactgaaccatgctgcctcctttttagttttcttattttaagtaattgtcgtccatgcaacacttgtgattttaaaaagtacatgtcatatttgaacacattttctttaaacttatcccatataacctctttttcccccttttaaaccagggtgatcaactaattgtatagaattaactcagaagggtataaatcatgaaatgactgttttcttctctactcactgtctccaattctactaaatcccatcatttttctctgttagtgacctctaaacataagtctccaatcactctttgtttttaaaagaccactcagtttaaaagttgaatcacatatccgtctcagttagttaccgtaaattctccttgtgcttagccttaggcctaagtgagcagggtcttttacttgtagaaagaaacaccatctatgcccctaaacagactgaatgctgctctggagattaaatcaatgttgaaaatactagtaatatgttaccatgtttattcaaaaacacatttccttacttgctgactcagaaaaaaataattcacctcggatgaatcagaggaagggtgccttggagcacacattcttggagggaaagagaccggctgcataaacctaactagagaatagaaataggaaacacccagtagcttccagagacattgaagaagttgaactgatggaacttgctgaaaaatagatgtgagtgttgatagaggataaaaattcaaggatgacttctaggtttctggtaagtaatagtaacaccaatgtaggacacatggatgaggggcaaatttggaataaagaagaaatgacactgtgttgaaatcacagatttcaggcctaaagacttggcaaatagatgcatttcataaatcacatttcctaaaggctcctttgggtataggaaggaagtcattggaaatattcatcttgaaatagctttagcaaaaagaaaagaaaatagaaccttggcaaactgatcattcttaaagaaattaacctgtctacatcaaactatatattattttatagagataattaatcccttcccaatacaattattgtttttcatcattccttctttaaactgtattcttaattgcaattattatttgcttttctgaagattctggcattattgtcttgttcgtaatttatcaaaaagcctaaaatggaaaatacttcagatagacctatgttatatctttgcaaaatcattccatctcatgagttttttaaaaaatctcaaaaaggtcatatgggtctacttaccttccacgcagttttgtatgtaaagcactatggacaacttctcactaaaaaaaaattaaaatgagcaaaattcaaaagaaaaaacactttttataatgtacctgtcatttagtctctttgggctgctataacaaagtgccatggactttgtggcttataaacaacagaaatttatttcccacagttctggaggccagaagtgtgagatcaagggtgccagcatggtgggcttctggtgagggccttccttctgaattgcatactgccgacttctagctgtgtcttcacatggcaaagagagagaggaaacaagctctcttgggactcttataagaacactaatcccattcatgaaaacttcactctcatgacctcatctaatcctaattacctcccgaagactccacctcctaataagaacacattagggggtagggttttaacatgaatttgggggagggcaccaatgtttaatccttaacacctctgaactggaaagaaattaaagaacccttagatactaaaaacaaagtgggaacaggaagccagagaattaagctaactataaagacccacctatacttgattctggtaagcaggtgtagactttgagagccacagggactctgtggacagaaaacaaaacctaaggcctttacaaagtgggagctctagtaggagagccctgcataaagcaagaactctaaagaactacaacttcattgtggtggagagagagaaattgcaccacaaaaggtggaagaaagaaaatgtatctatattaaccttagtactaagtggaagtagaaaaatcaattttcctgagaatttataaggcaaatcaaaccctcatatgggtttgcagcaccaatttaccttaactgtaaagttcagggctctcaagacttatatggttactaagttggttggcatgtgcaagtccaaatctacacacacacacacacacacacaaatacatacatatatggctattcagatattcttatatatgttttatatatatatggctattcagatattcctcttctttttgtgtcaattttggtaactgttatctttaagaaattaattcatttcccttaccttgtcaatttcattggtttaaacttgtttataatattaccttattatactataatacctataagaataatattttgtctcttatttctaatatttttagtttgtgtctatttttcttagataagctaaagttttatcagttatttgatcttttcaaataaccaactcttggtgttaatgattatccctattgttaatttacttctatttaactgacttctgccctttattagtttcttgcttctatttacattgggtttatatttattttttctaccattttaaggtagaaacttagatcatgaacttcattgctttcttctttgctaatgtgacaatttaaagctataggattccctctaaccactgctttagttttattccacaatatattcttagttcaaaagattttcatattagcaccatgatttctactttgattcatgagttacttataaatggattgtttaatttccaaatttttttagtttttaaaatagatatattgttactgatttttagtttaaatctgttctgataagagaatatattcagtgtaatttcaattttgagacctcttttataacttatggcatctattgaccaatgacccgtttatacttgaaaaaatttgtgttctattaatacaattgctgagtacaatctctaaatatcaattagttttatttggttctagtcttctatattcttactgatactcatctttttttcagttaagtattgaaattttcaactaaaattgtggatttttctgtctcttttcaattatgtcagttttgcttcatgcattttgatactttagcatacacttaggattgttaagtctactcaacaaatgttatgtcattttaaaatttaaatttaattaattttaatgtaaatgacctttaaaaacatgtctttttttaaatctcaaaatatttcttgcccttgtccatggtatccattaataatatggccattggccggggacggtaactcacgcctgtaatgccagcactttgggaggctgaggtgggcggatcacctgaggtcaggagttcaagaccagcctgaccaatatgataaaaccctgtctctactacaaatacaaaaattagcctggtgtggtggcatgcccctgtaatcccagctactcaggaggctgagacaggagaatcacttgaacccgggaggcggaggttgcaatgaactgagatcacactattgcactccagcctaggcaacaagagcgaaactccatctcaaaaaaaaaaaaatcattaaatccattttttttaatatttagtgttgcatgctacatctttttccattcttttattttaaccaatgtatttttaaagctctttgaatactgtgagatttttcgttttctttagcctgacaatctctcttttaaccaatgtccttagtccacttaaacataatataattttggccatactgaatttgttttctatttgttccatctcttcttaattcctttgtgtctttttctctggcttctgttggactgagtacactttttactattccagtgtcttctttacttgcttattagctataattcttgctttatatttttaatggattgtctagcatttacagtatgtatttttaacttattacagcctccttacaaattatttataccactttatatataatgtaagctccttaaaacagtatactcctctttttccttcctttttgctattatgcatcttactttcacatttcctattatcagtttaattctacatatattttaaacaccaaaatacattgtaatcattttgcctcagttaattatactaaaaataatatcgatacttttttatacatttaccactatcagcttccttccttccttcacatagacaccactttccatcttgaaccattttatttcagcctgaagagcattctttaatttttttaatagagtaagtctcctgacatttctcaaattttgtttgtctgaatatatttttactttgccttcatctctgaaggatattttcactggatatagaattcgagatttttttgtttgctttgttttctttctctgaatgtgatattttatcatcttctggcttgtattagttctgatggtatatccagtgaattgttaaatcttttacccctgttttaacgtgcttttttctctctaggcactttcaagattgttattccctattattggattccagcagtttgattataatgtaccttgtatggctttctttatgcttatttggcttagatttcattgcattttttagatttgtttatgtttgtagactgtatcaaatttggaaataattttgagcacaatgtcttcaaataatttgtatgcccccacccgtatttctggaattctagttacacatacgttactctaccaggtatttcccatgggacagttatggtctgttcatttttttagcctattttctttttagaatccagtcagtttctattatattagctttccttcaagttcacagacttcttttgcaatatctaaagtgtttgtaaatcagttcagtgaatttgtcattacagatattatgtatatttttctattctgtgactttatcattacagttattatatatattttttctatttctattttacatattttattctgtgaaatttgatttttcatagtttccattactcttcaatattacatatttttctttgaattattgtgcatactgaacatacttacaatagctcttcaaaagtcttggtcagctgggcacagtggctcacacctgtaatcccagccctttgggagggcaaggcaggcagatcacttgaggtcaggagttcagcctgaccaacatggtaatacctcgtctctactaaaaatacaaaaattagctgggcatgtggcaagcaccagtaattctagctactcaggaggctgaggcaggagaattgcttgaacccatgaggcagaggttgcaatgacctctgcaatgagatggcgccactgcactccaatctgggtgacagagtgagactccatctcagaaaaaataataataataaaaaaaagccttggtctacaaattctgtcatctctattattcctggacctctttttattggctgatttttccactgattatgataggttgcaatccctgactttttcccatacctagtactttttggttggatgctggatattatgaatgtgacattgctgaatgactgtattttgttatttactattgagtattgagtttcattttgctggacagttaacttacttgcagatcagcttaacttcttgaggctttttaaaagctttgtcagtatgcaactaaagtaacctttgttctaggattagtttaactttatttcttatatgtagcctttttttgttctccactaaagacttcagctgctttagccaatttgaactccgttctctgtgtcctcaactcactgaagccctcgccctcatcatctgtcctctgtgtgggttctacctcccagtcagggggtctggtaaatattttcaagcagaaagccaagcagttttagagatcaaatcatttggtcttctcttagggatcgcagttctctgttatttaaccaacatctgagaacagctgtttcatacattgtctaattttctagttatttaccataggagagctaatacagttttagttattcaatcatggtgaagagtatgatttctaaaagcacattttttaaattaacaaattaaaaacaaaaagcaagaaacatatatacctaaagtattgattctttatgtgaggctgctattaaatggtgtggatttgaaggtacatgtgtgagtgccattttctggagaatgctgaatgtcaaaaataccaattgaatctaaatgtactctagtgatccccaggatttgtaaaggcattttaattagagattttctgaaaatatttctttacattgtgccctaaaaatgtactgaatacaggagaaaaaaatggaattgtaccgaccttagtacatatctaggccaaaaagattcctcaaaatacttaatagactttaatgaaaaacaaggaaataatttaccttttaggaaaaatcattaattattttatcaatttagcatgatcaaaattaaaaaattataaagttcaataggaataaaataatagatctttaagaaaagtagattgggcccagcacagtggcttacgcctgtaatcacagcactttggaaggccaaggtggggagatcacctgaggtcaggagttccagaccagcctggccaacatgacaaaacgctgtttctactaaaaatacacaaattagctggggatggtggtggcagcctgtaatcccagctactcgggatgctgaggcagggggaattgcttgaatctgggaggcagaagttgcagtgagctgagatcgggccactgcactccagcctgggtgacagagtgagactccgtctcaaaaaaaaaaaaaagttaacttctgatattgctcctcaactatgttcttttgacagtttttaccatttcattatttgccatcataacccatctgttttctcatcctagaaccctggcatcatacttgacacttcccaggggaaccaattcattaccatattctgtccattttactctgaaacaaatcttgatattttcatccattcccttaatccaagccaccattactttcagttgggctaccatgttagtgttatatcttatcttccctgtgtaaatttaccctacaccagcccattttccacagaatatttttcgaaatactttaaagctttactttcccccccaccccgccagaccacatctggttctgttgcccaggctggagtgcagtggcatgatctcagctcactgcaacctccacctcctaggttcaagcgatccacccacctcagcctcccgagtcactgggactgcaggcgggcaccaccatacctagctaatttttgtatattttgtagagatggggttttgccatgttgtccagactggtcttgaacttgtaaactcaagccatctgcccaccttgacctcccaaagtgctgggattacaggtgtgagccaccacaccggccgttacatttttttcttaggaaaactcaaatactaacaaggcctctctggtctggctagtcctcatttctccagcctcccttcataatctgcttcagcatgtttgacttcatgcacatgggtctcctggtcctggtcaagctgcgatgagctttaagacctttccatgtatggctcccttagtctagaatgccctttcccttatttcccttcactaattttctcagtaaataacatccctcagaggagcctctttcaactctgccacgcaagtgtcagcatgttgtagtcagttgcctacgtaacttgtttaatgtctggctctgcagttagagtgtaagttccatgaagacagagaacatatacatgttgttcattttgggggttccagaactttgaatgttgcctgagttatggttgatactagataagtaattattcaatcatgattttatattaggtaagagaaatttactttcagtgctgtgctcagaaataaacactctcagtcactattatggaagtataaattgatgcaacctctaggaaaatcaatttgaaactgtttttcaaaatctttaaatgttcaatttatttattattgtagttccaaatctggatatttaagggaaatattcagatatacacataattagtatatagcatatttatttaaacattatttacaagataaaaacttggaaatcttcaaacatctaatacttggagattagcctaaataactagcaggatttattggcttaagttatcaaaatgttttcatgtaattttgacatagccttcaatgaatcctcatgtacatgtctttaggaaagacagtaaagttgtatggaagagtctaaaagtttaaattaaacactaaatcatttgaaggaaaatattttaaaaacttaatttaaaatggtaaccatgatgtctcatttccgtgtcactaatcttatttaaattgtacacagattagctcaaaaagaaaaaaaattatgtaaacagaattattctgtaaaatcctatatagatgattgttgcttgtgggtgagaaataacatttatcttccattcttgttcacagcaaatcacaaacagatgttaaaaggtcctgggtctgtttttaaatccaacatattatctttgaattgttttataatgcatataaccctgccattttgatcagttaattaatgtcctgcttaatgatccttctttaatcacatacttttctgaatgggcataggagagacagagcatgtatgagatataaagccagtattcacaatgctcataggatcactggatagactaaatagatacacatagcctgaatatagtaatgtgttaaagaataaatgattaaggaccaaaataaggaatatatacatcaaaggtccaaggagattagagaaggcaaagataaatatggctatatagttatggacaatttcaggacaggagagctatggcatctgccatgattgcagacttttcctaaaaagagctgcctcaagttttacatcagggaatgttgatccatttgtttgtaaataaatggactagttttaacaaaataatttgtagtagatgttgatcaatgaagctgacttgttaatactcattatatttttgaacctctttatagctctccgagatgctggcaaacagtctattaatagtgactggaagattgaacactctggagccttcaatttggctggaactaccgttcattatgtaagacgaggcctctgggagaagatctctgccaaaggtcctactacagcacctttacatcttctggtatgagggaatgaattgataacatggcataatcaacttctcatggcaaggaatattcccagtgcacttcctctaatatttttcagatttgaattgtcacacagacatttaaaattatttaaaaagtggaatttttagaggttttgtaaaatgtgttttaaatcatgttgtctaaaaacagcaattattacaggaggagcaagatgttttagggaatttacagatgcaaagtacagatggatgacagggaatccaaagaaaacccttcttcctaaaaacatacatttactaactgaagaggatgtctatgaagagagtactataatattgcatgcaaatcacagcgttttatatatccatgaatggccattatctgactctgcataaaaaccttagataaaatgttattctacccgagagaaggaatttgataaatacatgttaacagtgctccccatcaccctgtttgttattaatggatttttgtaaagaattacgaaaatttgaatatttgggatgataagctttgttaccattagtaaaaaactgtatataggccagacgtggtggctcacgcctgtaatcccagcactctgggagtccaaggtgggtggatcgcaaggtcaggagttcgagaccagcctgaccaacacgctgaaactccgtctctactaaaaacaaaacaaaaaaattagctgggcatggtgacgcatgcctgtaatcccagctactcaggaggctgaggcaggagaattgcttgaacccaagaggcggaggttgcagtgagcagagatcaagccactgcactccagcctgggtgacagagggagactctgtctcaaaaaaaaaaaaaacaaaaaaaaaaactggatataagtgggttagaatttgaagagaaaaaatcaggatgatggaattctgtccaggctggtggcaggtccatgtgccccttttgaccttgattatggcagtgcgtgctaatggcacatgagccaaatgactgactacacagctggtgtgagttttctatcctaatggcaaaaagaagtctaaaattcagacactgcaacacctccttaagtccacatataaaacaactctaaaacacgatcaattaactgtttatttggagtatgatgtgctgcattatttaatatctccacatgatttaagataaatttgtcttcaattggagacatgtgtgttgctagtctagaagccagaggttcacatcatatattggcctatttgcttctactactttagtgtgcctgcagattacctggggttcttactaaaatgcatagtctgattcatttgatttggggcaggatctaaaatctgtatttttcaccaccttccacgtgatactgctgctactggtccacaaaccacattttaaattacaaggttctatataactgcaattaatatgctttaccaacagaaataaagggagcaaggtgagtggtgtgtgtaccttctattccaaatcagaataataataatatccatcattcttgaggactaagaattagacactatccaaaagtgctttatgttcattatagcatttaatcccccaaataatcctgtgtaatatatattattattactctagtttacagattaaaaagaattaaatatgagaaaagttaatcaatgtgctcagtgttgtccaataagttatttagctgtaaaaacctaggtattagtcactcttctatgctacctcgctgacacagaggtccaaagaacttggatccaaagcttagatccaagttctttataccaaactgccttaaatcaaaaatgtaagtatactttgaataatcattttgtgcatcacctcacagtcccattggatcctattatttaatttcagctggaaaccctactctctgccttatgccatctagcgagagaaaataaaatgaagaaacaaatgttatatgaacaatatctgtttcattccatgatttggtcacttataataacagtatcaacagcaaacatatgtttaatgattgtattgcataaaatgccattgtgttccctgcctttaataaatgtaacctcccctgtttttattttatggtataagaccaaggcttctttactaagcttcaaattcagaattttaaaacactatatgtgagaccttagtgttgggtggagggagtttccttgctgcagaatccttaatctaactggtaattaccaaggtttttcctggaagcatgaagcataattaaactcagtgaactatgtctaaaagaaggcatctatgtgacctggatttattcagtaatccaagggaaactgcacttctaagatattttttctttaatgactattacagattgaaggactgtactgaatttttaaaggcaatcccttctgctgccatgcttcagcatgtgcccctcaactgtaacatggtcacactttcctttttgcaaagaatactgccaaattcaaatggtttaagaaagagctaatggttttgtagccaatgtctctgttttaagtggcattagatattcaaggacaatctaaagttctatcaatgaaaaggtagtttattaggaaaaatagacacatttttatgtaattaaataagttgacaaatagctggtatttacatgttcatcccattcatttaaaaactatgtattaataatagtctgggtatagtcgtaaggtatatcattttttaaaaacccatttaaactgtctgtctttaaactcattaggctgaaagtcacttataatcagcaacatcaaatgacatatttaagccaaaataagtactatgatagaattagtacactgtatgtgttacgcatttgtgaacttaaaattattgtttttattgatatagttatttataaagtcgacacactagtctcccaatccgcacatcaaaatacatcttaggcattctgttgatatactgaacaaaactctgagaaaaagaaggaaagaaaatataataaaaatgttcagacacttaaacctaggcccatttcaattttcctatggaatgttaactctgcattacctatcattacgactaccttgatgcaggtaaaatactaaataaagttcttcaataatttatcataattttaaaatttgggtacatatgttttttaatgtatcatattatattatatagattgtttccatagatcctcagatccatagaagtgatatattccatgggattgcttgacacattttctaaaaatagatgtataaagaaatatatatatatactcattaactctttcattaaaatatgtgtgtatgtgggggaggggggtgggtgtatttatgtataattggccacactatccaattctgagcctggcactgggaaccagtagagaacaaaacagacatggtccctgcatatagttcagtccaacgtgtagccccatattcagtcgttttcatgtatttttatggtttattgaactatttatatatatatatgtgcataactgtacaattattaatattaaaagttcatgtaacataaatttaacttcaaagaaaacaatatatactacaagtggaaaatcagtaaccttgcttgctacaattaaaggttaactgtaagcatacctggagtgaaattcttgtcctccagtttgcttagaaattctctgcccttatgaagttcagtgatccccaaagtcatctatctatcttcctcttttgactcagcaacttcctgtccatcttttcttttctctacatttggcattagattgtgggtcacaccttgatatatgatagaacacatactcctgccgccacttttgcccacctccaactaaagtcatcttatacatttactatgctttgggaaactgtctagtccatcaaattgaaagaaaatgatctagtatgtctgacctcactcaaatgagcttttcttaagatgtttttagcatgaaggtaagtacgaagctccagtcttttcaaaagcatggcaatatctacatttaagaataatgtcacgtttctagtgtgcattaagagaagggtatgtccacaacagcaacaacaacaacaaaatgcacacaacacaatgagcattttaagtatcaatattgttaattttatgctttacattgcacgtgctctagtttgacccatctgccttgatcatttttgtatactataggtgctcctgtttcaggatcagaattatggtcttcactatgaatacactatcccatcagaccctcttccagaaaaccagagctctaaagcacctgagcccctcttcatgtggacacacacaagctgggaagattgcgatgccacttgtggaggaggtgaaggatttttaaacatttatctttccaaaacatcagttgttttctgattaagcattgataattaagacatatccaaaatccctaatctgcaattccaaaatccataaagagttagaaatggaaagttttatatgatatgtttagtggctaaacacctgaaatacttagaatggaagaacagctatttaggattgttaacatatctcaatatgactactctttgcattacattacattacattacattacattacattacattacataagtattaatatatttgtttacaggggcctccccagacaccattcaggttgttaggtactatttatgcactgtgttatttctatgaaatcttaaaagttctaaattccaaagtacacctgcccacaagaattacagacctgaattgaatataagaattatttgggccgggcgcggtggctcacgcctgtaatcccagcactctgggaggccgaggcgggcagatcacgaggtcaggagatcaagaccattctggctaacacggcgaaaccccgtctctacaaaaaatacaaaaaattagccgggtgtggtggcgggcgcctgtagtcccagctagtcgagaggctgaggcaggagaatggcatgaacctgggagacggggcttgcagtgagccaagatcctgccactgcactccagcctcagtggcaaagcgaaactccatttcagaaaaaaaaagaaaagaaaaaaaaaaagaagtctgtggaatagcaggattagaagagagttttatttgaaatgtctgttggacatctaagtgtgatgtcaagtaagcagttaggtatataagtctggcattcaggagagaatatcaggctacagataaagaatatatggatatttttaaatgccaactgagaatagtcaccaaagactttatgtatccttggcatttaaaaatatccatatattctttatctgtagactaatattgagtgaagagagagagaagctattagaggattgaaacttggggtatgccaccatttagagtttggagagatgaggagaaataagcaaagcctattgaaatgagtagccaacaacatagcaggaaaaaaaaacatgcaggagacaatgctcttctgtatggcaagtgaagagtattagaagaaggagggaatgatcaactgtatcaaaagttgcaataaataaaaaataatgtagactgacaatgattgttatacttaaatatattatagtcattatattttataaatgaaatatatttggaacatgaaagtcaatggttatcctataaaaattaataaagtgtttggctccaaagactgtgtggatggattccacagaaaatagcagaagaattgaagaaagagactctaggtaactcaggaatgttgctgaaaggagaaaacaaacgtggcaggggtaaaagaggatatgagtcaaaggagtttgttgttgttttcaatagggtatattatacaacattgtttgccaatgtgcatttttaagaatcaaacaaaaaactagggatgcaaaggagagagcaaaaaaattgctgaagtgttatccaaatgggataggatggtgaagttggctttaggcaaaaatatggacaactcatcactagtaacaggagaaaagataggtgttcggaagttacagttgaaactattttgtcaataaaggctatctggctgagagttagggtggaaaaggaagtactgacattttgaaaagagaaaatgtgaatcaatcacttagataatgaatgaaatgggtatgtgtattttgattatctggagtaatagtctgtttaaagtcaatggtcatgaatttaggatgataccagtccttatgatgtatgttaccttctagcaatgtacagcatgcgagtgcacttgtgaagtgagtttggaaattgccaagtgagtatgataaagtaagagaggagtaagtgcttgacctgaggttgtatgcaagaggctgaaagtggtggatcatggaatttaggtgcaataggaggaatataaagatatgggggctggaaagacagtaaaatggtgataggattgatggagtatagggtcttgaggggttaaagaattcttagtctcagggtgctaaagggaaagacttgttagtctcatggcactaaaaggctagaaatatagaggatgatatcagaaaatagagctgagattatagaacagaaagggagaggggtctggtagtggcagggaggagcatggcagctgcaccacgtctagatccaaaggtacctggaagtgatcaaaacaatggtcaccccactgaaggctacagggagagtaagaggctgtgtccttaggagaaagaaggtgccaagaatattcaaggagcatagagtgggaaggagcatcctttggcagagggctcagagctttgaggttctcacctgactccaggagcatctttgccagagcaaaggcaacatcaggggcagaggaatggtgaagttataaggaattcactttgtgccccaaggataaaaagtggttacaacaaaaacatttcaaatcgctctctcaatttaaaaaaatgttatcagtcacccttgccacaagaaattttcagtggccatgtttctcttcctgggccctaatactgccctatgacttgagctcttctatcctcccatcctctcctgctgatgctcccatatgcacccaaattcgcaaattcctgttcctctgctccactcatcctacactgatgccaggggctcatctttcttaaggggctgtacttcaccttctctacccaaataaaaaacaaaggcacaaaatagaagcaaacacattcacaacaaaaatatagttatatttttctctttaacatagctcagataagattcttagtcatatctgcaatcctaccaacaagcgcccatcttgtggttggggggcaggcaatggaggagtaaagtgatggacagacaggctgatggttcaccttataccactgaaacgcagttgttaaaatccatttacatttaaaactctagacaggaaaatgtttgcccagtaaatgtttttattctcattttttcctccttctgccatttttatctaatagaagctgcatcagaaggagttaaacatacagaacttgtcagtcttcaattttaaaaagcaaattgtctaggatcaacattcttccccaaattacattaattacttcctaaaatatgttcttccaattgctaagcatcaaggaatagaggttgactataaattttttttgtttcagggtcaggagaaatattatctattcttaaacataacttcttaattatcaacatgagaaaattgaagggcttagaggttaagtgacttcccaaggttgcatggcccatttgggtagagccaggattagaatcaatgactcaggggttcaagtcttctttcctgctcatcatactgccttcatgaatggctcaggaggcttcatgtagtttatttccacaaaatacagcatgtcttctagagattatttaggttttctttggatacaaatggacgttttattatattctgttatgtaagaatttagatatgcttttatttttacttcaaatggctgattttataaaacagtcattctaataatacacaactcctatatgatttgtgcttgaatagatctcctcttccaactctgctccattgtgtttagtcaacagttttcgattatctctatgttaatggggtgcatattcatttcaatgccaaaatatttctgggcttttggatattattttcctttgcagttcataaataaagtggatggacagaatttcaaggatcgcatcatttctgacttcatatcatcgattttatagccagaaagagctttctaatctttcagcatattcatgaattaaatgagagtaagttcaaagcacagaatattggaaacagattcatgcaaaatttatcttcaacagcaaagaggaataataatagcagtattctacttcataagaatatattaagagcaagtaaagtatcacagggcagtataaaatgtgtgtataagatgttatttttctaattctgttgtaagatattaaattgccaatactgtaataagtgggaaaataaacacttaaaaggatatggttatctagctaatttttatcataattatattttacatcagcatctcaaactaagttttaaaatggtaactcaaactaaacttatttcaaatatgtatttattattgtcagttattataagatatgaaaagcctaagagatgaaaattctctcttttaaaaggaatattgccttaaaatctctgatgaaggctgatcatctcaggtaaattttttcaacagtttaacatacatatataagttatcacactttccgtcacagtcttttgagtctaatgataattctagaaatatttgaattgacatatcattttgtattttaacatcagtcattaaaactagttcttttattttcaaacagcttgaaatgtttttgtgaaagaaatgttcactttgcgttagagttctaaaacatcttaaaatatttggaggaatggtttaaatttattttggcatctcagaagtgtggatcagtttgctacaaggttccttttgacattgaagacctgttttaagtgatcttagtctccagaggcattataaatatattactccaaaatatctgaggattgtgtatggaatcagcattaactgcataactttaagatttgttttgatctagtgaatagattactgaaataaaatagaatgaggaccccaaaattcaataaccccttatgaaacacatgaagagttaaacatgcttttaggaaatcctaagcagatctactttgaaggaaaaaaaataagccaacattccacattcttcacaccagtccaagtctgtctagcttatgactgtcctgggatcctctagacactgcttcccttgtccatatccagatcataagtagatatccaagcctttgggtccaagttgaggaaaacatttcagtattcaaaagcctataccttttaaaaccctctagaatatatttaacaggaaagaacatctataagggtgtgatttgttctgtttttacttttttttctttttgagatggagtttggctcttattgcccaggctagagtgcagtggcacaatctcagctcactgcaacctccaccttgcagtttcaagtgattctcctgcctcagcctcccaagtagctaggattacaggcacacaccaccacacccagctaatttttttgtatttttagtagagactgggtttcaccatgttggtcaggctggtctcaaactgctgacctcgtgattcacctgcctcagcctcccaaactgctgggattacaggcatgagccaccgtgcctggcctgtttttacattttaaaggtactatacatgtaccaaaataaacattatttgccaaagaaaatgcaccagaatatattttccattttttctctgcattattttatttcaatatttaataaaatttgatattatttcatttattaataaaaacatcttatattgacagaaactattcataaccttgatttttaatacctaagcgataatccatgaactggatttgccataagaagaactggattcctgataatttgtcatttagtttgcaaatgattttgtcaccattttagaaaacatagtattgagatgaacctcttagtatagaaagcactgacagcttgaattacatgcttatatttcactcattcattcctttaccagtattgaccatgcatccactattgctaggtggtccaaagatgaatatgtcttgctttcagagaactcacagtccatctagtggaagtcagataataataaaatcaccttactcagtgataaaggaagatatagaaagccttccaaggatatacctcggtgcaaaggcacccacgtgccaggtggaaggctttcttggaagtgaaaatgttattactatagtgtaaagtatgaggattggtgggtgggaagtgatttgatcagaaaagtaggatgaaagccaattcatgaaggtccttgagtgttatgctaacagttaaatttaacttgacagctatgtgatctcattaaaatatttgcatgcatataaatggcaagatcagattagttatatattaggtgttgtgaacaaagcaaagtaaattattttcattaaaataaaaaaatgaactagtcattttaacactcagacaatatccttagggaataatattttttaatgtaaaaaaaggataaaaagtaaatggcatgacatgattttgaaagtcgtttaagttaaataaatgtaggtgtaaaaaataatcagcattttacaaagatctaggaagcgctcagagaaaagtccttcatcctcattaaagtatatttacttttggttctcatgcttactggccattgttaatccaaaagaaaattaataagtagaaattttaaaagaaaattataaaaattataaagaaatttacaaacacacacaggcatacccacacacatagtctctgtcttacagagttctataatttaatttaaaattttagaatgttaaataatgtatagaaaatttcagttatgcatattgaaacactgaacccacaaccaagaatatgtttcagcatttacaatgcaagttctagtaatgtgaggtacctcaatagaatttagttttattttgaaatatccattttatgggttaaatacagagcatatattttatagtaaaaagtgtcagcttatctgtgaaactggaaaaggcggctcacttaatataatgtctagtctttgttaaatttccaaagcacaaagagttagtaaataaaagttacccttcattttcagatattgcaattcaatagagatgaatgcataatggttattttattttatttataattgtattcaaaacatccagatttccccaagactaatttaatgggaatgaccaagaggtgaagttaatcaccataaagcaagtaatactctgtcaacagcctacagctgtcataattcaggcagaaggtcagttatttcatcactttctgtttgtccctatgtgccacagtattggatgcattgtagatactgctattagatgctagaatggaaatttcctgtgttggctgggacatttaaatatataaaagaaaaactcaaacaataacatttccatatggctttaagatcttagttgtattttcataggtgtaatacgtctgtagctgagcaatgagtttttttctaattctattgtttttgttcaatgaaatttttaaaaagagctaagcttcccctagctgccaaaccttacaatataggagtcctttcttacaatgtaaatggaaatgtctcaattcatactcatgcaccttcatactttcttagaaaactactaacatgtccctaaaatgatgccgatacctatatcccttttgatataacaatacttatagttaaaaatttctttttcagtatctcagtacgtaagcagtaggtgaatataactaaggttaaatattttctgaggatggggaaaaaagcattataatcagccttgggttatttattctgtgactatatatatgttcagcaaaagctttctggataacgcccatcatctttttgtgttgcagttggcaaaatgtcatcatttaaatgaatttaggcaactgcatctattctgtaagtgtcaaggcttcaagttaaattttagaactaacatttatacttcataaaagtagtatttattttaatcctgcttttggctatcgcatcataataatgtagaaataatacctaagctagcattatacaaaatctgcataatatctatttgatatatatacttcaggtcataaaagagcccctgaagcataggaagctaagaggaagctgaccaaaaatctgtcccaaaattttacatttaggtaaatcttacctcgtgatgcctgttttctccatgtgaaaaaaaaaagagcataatgtcatttctgcttctctagcagtttatttgaaaattatttgaagttgttgggttttgagcactgctgtgattaagtctgaatctacacttatccttcttgacctaccaaggaatagcatggacagcttctaagtatctgccagagacgtgaaagactgcctttcctctgcaagttagcattaggtcaccttgttgcatgagctgcaaaggttcactcaagaggacctcagagggtgtagtttccacattcaggcagtttctgcactgcataaagtcttcagccaaggggactgcaatccagtccatgttccatttgccaagccatgcagcctgctgtggggccacctctatgtggaggatgagtactgttttctaattcatctgcctataggccatgattttttcctaatccactttttaacctgtggttggatgccatctcaaggccctccccattgctggcccaccagtgtacacttctggaatgccatagggtactggtaggaggcacacctcattccactcaaaggaaagggcctgttacctgcctgacactcttgcctatatggagctcccatagaataagttgcattccatcagtactccaagatttcctaaaaaggaaataacttagccaacattgtgttatcactgttgattgaactaaaggtccaaatggttttaataacattatatgcaataaccacagaattattatttaatttacacatgtatacaaatgcagttatgtttttatactacaaattgcggtaggactatgctcagagctattgagaggaaatcaaggaaagactctgaacctaaagctattttttgctgtttacttagccaaccagttgcctcttaccatctcccattcaaactaaagtaaaatgtactccaaaattattcaaactgcctctctgtctacatcccttccttcctcattcttgatgccagctgctctttctgttaattgagtggcagaatgacctccctgccaccagcccagcttttcttgtttgtcattaccagcatgaattctctaagcttccatgtcagtcatagtaccctaactaatgggcctttcaatagtgaaccagcagacttgtgatgtcttcttacttcttcatgatcaatctggcgtcaaaattttgggctgatttaactgtcttatagtgtcaaacaatggattaaataagattattaaatattatacagatgtgtatctttttctactcacaagaaatctgtatataagactttttcaaagagaagcagaaattagcacatacttactagacattttaattgtaagatgaataatataactcctgtaaaggaagtgtgcttacagggctgtgtaagcaaaaggaatacagcatataaattgtcatgtttacatcctataatcaaattttatcatagtagagaaagtagaaaagccaagttttctgaaatctggtaaaagatggtaagagtcccatttcttttcttacagatgatgacaatcatttgggtaaagatttctagaattcttggggtctttattagaggtgataagaataaaggtttgagttatactcaaaacaaatgtgctttccataacttattataaagcactaatgatgtacaaaccaaatgataaaatgtgcacacatgtttatgtgctttcagaaaggctcattagggagattaactttatggaaatagagctttccaccacttaatgctaaaagatggccacaatcctttacaatgtcttcagtttgtatcttgctaatttatgttgccatgatcactttgtatataaaacttgccatttaatttgtaacagggaatatttattactcatcccttttaagcctagaggtacattttgttatgtaaattataaataatatcttcattgttctaaaatttgtttaaaatatctttgaaaagtataataacatgtaacaaacctgcaggtgtaccctctgaatctaaaataaaagttgatggaagaaataagacctggtgttcaataaatcaattgagtgactatagttaacattaatagattgtacatttcaaaataactagaagagaataattcacatgttcctagcataaagataaatatttaaatgatgaatatccaacttaccctgattttattatctgaatatatcaaattatcacatataccctgaaaatgtatacatctaatatgaatcaataaaatttaataaaataaaaatttaaattataaaaaagttttttaaataaaaaataagcataataagcttatgaacacctcctaaatccattacataaaggcttataataatatttctttgtttatttgttcttttcaggagaaaggaagacaacagtgtcctgcacaaaaatcatgagcaaaaatatcagcattgtggacaatgagaaatgcaaatacttaaccaagccagagccacagattcgaaagtgcaatgagcaaccatgtcaaacaaggtaactctattccaagggcccttaaagcattatttgtccattagattgctgtcctttaaaacatgctcagaatatcattgaaatcacattttcttaaaaacattgccaaaggatacgtaccaaaatttaaagtcttaaataagcaagatctaagaaagcaaggtagcaaggccaagattttccacttaaggaaggggtattgggagggatggttgctgaggagtaattaagatcactttttatttaaaatcatttcataacctctaggtcacctcttcaaaaactttgttatttggtggaacatagctgtttgctcctgaattctccaaaacggtgtgttagaatttgcccacagtaacataaaccaaactgggactgccatgacccagatcccagcagagccaggccagtgtagtgtttctgattcctctggctaaattctcacttcctagcccagagttccagaagcaaactgcccaatccctgatctctcaccaccaactttgtgacccaggtcccagttactgtaccacagatgctttggtttcctctgacaccccccaatgagtattaggtaacaaagcaggcaagaaattcacaagtagaggacaaaacagcaatgctgagcagctgtaagtggaataggaagaaagaagcccatgccttggttactggaagttggggtaaagacaggtgagtggaacctgagtataattttggaccagcctagcaacgaggctacttggcatggctgccaacacagggctccaatctacctgctttcacataaaaattaaggcttagcttgattaggactcagccctggtgtccaaaatcctgaaaacttttagggatggggtgacagaaagagtgaggctggattgattcctctgaatattgggacaggaatatttactttgtcctgacactcaggaatttgttgaagcccggtgagttaggaaagagttgtaagttcttaggtagtcagagcattgatcttcccctcacaagagcttctgtaatggcttcatggtgaattaacacaccctacaattcagataggcagataatgtgtcattttatagcagtttataactgatataaccgtcttcatggccatctaccacaaagagtaggtatgggggagggaagagggagaggaacaaagttgctaattaaccatatttgagcttttctttcttaatctctttgggaattagtgtcatgcagacgaatggttagtcctgatttccctattcacacccccaaggaaaagtcaattactaaagccctctaaatctagccatgctatgttaatgagcgcttaaaagaatttgggatcacctgagatcggaagtttgagacaagtctgaccaatttggagaaaccccatctctactaaaaatacaaaattagccaggcatggtagcacatgcctataatcctagctactcgggaggctgaggcaggagaatcacttgaacccaggaggtggaggttctagtgagcagagatcatgccattgcactcctgggaaagaagagcgaaactacatctaaaaaaagaatttggaaaatacttcatctacgaagtttgaatttcaaggcttgctttctgtagattcaatatattttagatactgtaaaccaaaatgtatctgacacaggtctccaatcaatttagaagcttatattgccaaagttgtggatcatgacccatgacatggtctcacagggccctgagaacatttgctgaaggtgactgggttacagcttggttttatatgttttaggaagacataagatgtcagtcaataaatgtgaggcataacttggtttggtctaactcaaagccattgggggaggggtgacttacaggtcaaaggtggattcaaagactttctgattggctattggttgagggttaaattattatctaaagacctggaatcaagagaaaggagtgtctgggttaagataaggggttgtagagaccaaggttcatattatgtagatgaagtctcataggtggctgacctccaggggcaacagatggcagtgtttcctcttcagatccttaaaatgtgctggactctcagccaatctctaaagtatcagcaaaagacctggaaagggaaggggattccctatagaatgtcagtttccccaacaagacacagctttgcagggccatttcaaagtatgtcaaattatggggtaaaatagtttggtttctttgagggccctgctgtctgtcatgtgatattatagtagagtcaggttggaatttagtatcttattgctacaaagagtctatttggttagtcttaggatctctgttttaatgtcaatgctgttcagttgtatacctgagccccaaaggaaggagagtaataatgaggcatgtctacccaccctcctttcatataatggtctgaactagtttttcaagtttagttttgtccccttagctgagagaggagggtccattcaatcagctggggggcttaaaattctatttttggtttatagtagtagaagctgattatcaacttttcctgtcttttgcattcctgctctaacagtcctaccccaggcaaatatatgcttttaaaagaataggaaaatgatatataaaaggatgtgcataagggaaaagtaatggacatatcttcagtaatgtcatgttctttgcaccttcctgagtgtaggcttttcagcctaactgcataagtgtgtgaaccagtaaagctttttcatgatacagagtagtaatcaggtacagtgacctagggaattattcttgcctactgtcaggtccttgggtcatttccactcagtgctggacagatacataaagtagcatttttggccttggccctgtcagctaaagaaccaggatccttgctgttactgctgttcctcagaattctctttttctctatcccctttaatagatattaagatgctaaattatctgtgttaaataatgttaaaatacttcaaaacacaatttgttttatattgccatatagttgttccaatttggtgaaagagccatggctttttctgatacatcaggaatcttgaaagagctggatttgaggattagagcatgtttgttgtttcccaagttggtctgtgaaggagcagagtgtacaatacaacacactatttatttttcattccctgaactcaactatcttggagaaaaacgtctcaataatgacttggtaaaatgactagtttcaaaaggtcagtacatttctgagtgagaaatttttgcagctggagactggaagtctttttgttagagattattatctcccttcccttggaaaaggaggcaatttattttgaaccaccaagctgtgatgttagtgaggttaagcaaaatattggaaagaaagaaatgaacatgggcaattattaagggtcatcacaggaaacctttccaagacttactggaagagtacatcctttattcctcctgtctttcccctttctccaacctagtaaaaaaattctaattcccattcacatttattgagaaagtcactaaatggcccgatggcattctatgggtgaaatataaaatagatgaattcactagtaaatacctttgtaagtgaaggtctcttaaagataaggaaatgggatccttccaaattaagttctaagccacgaaaatgttttctttcattagaatacgttttatattttagttcttatttttcagtggttttcataaggaataggaaaagtaactttttataattatattgaggatctcaaatttttattttacttaaaaatatgagattccatgaaattgcaaatacttctcttttcagtatggagaacccagtagtgtcttctgagttccatagttggaaaagatatgtagatggacttagattgggattattttttggatattcttgtgcagaaatatgaagcagaaactaaactaaatttggaagatgtgcactttaggagaaatccaccaggggactccaaagcaaaatggcaggtctgcaacatgctggatagatgaggaaaaaataaccttgtaaagccttctatttcctttctcagaaatagaaacataaaatcatttacaattaaactaacttacagatgagatttactaggctgtaagaggatgtgactcctcaaaatgtggatcattgctaggaatacttgggtttggtaaatctggaataattaaggttacttctgtaaaacagagagaaacataaattctatttcaaggaatgtttatggccaggcacaatggctcatgcctgtaatcccagctctttaggaggccagagcgggtgaatcacttgaggtcaggagttcaagaccagcctggccaaaatgttgaaaccccttctctactaaaaaaatacaaaaattagggggacatggcgggcatgcccataagcccagctacttgggaggctgaggcaggagaacagcttgaacccaggaggtggaggttgcagtgagccaagattgtaccattgcactccagcctgggcaacacagtgagacttcatctcaaaaaaaaaaaaaaaaaagaaagacatgtttatcaaaacctattatgtaaaagtgttatggatgctaacaaaaacaaaacattgatacatgcctttgaggagcttatatattacaaagaaaagaaggccaaattcattaggtagcctttgagcccctctgcttccctagggaatatctaataagtcgtgtgagtgctacaagccaggcaatagagagcaaagaaaaggccagtccccattggttgaatggagaagcccttctaggaggaatgggcgtggggctggctgtcaaggatccaggcacaggattctacaaatatcatgaggtgaaaatagaaagtgtttggtaagcaagatgagcatatggtttattttccgaacaagtgggagatgaagctagaaaaatatatgaataagtatgaatcattttaaaaatgctactatatataatatatcctgaacctattgtatatcaggaaataataataaacccttttacaaattaaaaaatagaaacttacagctaataagtattatttcaggaatgtgcacagctaataaggtacctacaaataacctcggggattctgactgctctatattgtgctgaaatagttaatttgggtctccctagaagattgcccaagtaatgagaaatacagggaagattttaattgacaggaatcacacaaataccaaattttaagaatcacttttctgtcataggttttagttctttcctaaagtgaatttgggcaggtgtttagtggtccttaaggtagctctccatctagatattaaaatacgtatgtattagctgctgaatcagtgagatcaaagaataatattggagtcctgagagcctgtaaaatggagtcatgttaagtttagccctgagtctgtcactccagtgtctatgctcatatcaaagctagacattggctagcctaaagaagcatgtgtagctccatgtgggaggatatagcctggtcacagaaatctagttgctgctgataagtgtaataccttggtgattgctttatccaggtaagaggtcaatcacagtcttctgttactttgctaatacccccatatctctcactgttaagtagtctacagcctcatttgaattgttggtgccacaattttgtgacctttggtaaggtattaagcctctgtgtgcctgagcttccctttctgtaaatctggccacgatatttgtgatacccaatacatagggctattgtaaagatgtaaattacaaagaataagaataactcctggatattagcaattttatacttacaaagtcccacagtatagtgatatggtaagcagtgaaaggcagtttataatatgacatggaaaaagtctgatggacactgagagtctaataagaacaagttccaagagaagaaatatggagcactcaaagcaagaggaagcctgggcatcttgcagaaaactattgtgtttggttaaaaaaaaaaaggtataaagtctccatgtaacattctgctaactctagacgtgtcaaaatatatggtagtgatacgctttgactgtgtctccacccaaatctcatcttgaattgtagcttccatgattcccatgtcatgagagggaccggtaggaggtaattgaatcatgggggtgggtctttcccgtgctgttctcatgatagtgaataactctcatgagatctgatggcttttataaaggggcattcccctgcacacaccctctcttgcctcctgccatacgagatgtgtcttgctcctccctgtcttccaccatgattgtgagtgaggcctccccagccacatggaactgtgtcaattggacctctttcctttgtaaattgcccagtcttgggtatgtctttattagcagtgtgagaacagactaatacaagtagataggtatcttttaacttgtttccagtgactcttgctttactttcaggtggatgatgacagaatggaccccttgttcacgaacttgtggaaaaggaatgcagagcagacaagtggcctgtacccaacaactgagcaatggaacactgattagagcccgagagagggactgcattgggcccaagcccgcctctgcccagcgctgtgagggccaggactgcatgaccgtgtgggaggcgggagtgtggtctgaggtgcatacatgccccctttctttccccattcctactctgactcctagcttgtacaagatcaggttggatcatgttcagaatctgcattgaagttgatatttttctatactatttattaattttgttgatgattaaaggaatacattcaaataattttgaaatagaaaaatacaaagatatttactttctattctataaatattgcaacataatcaagggcatattttatacacattttaaattctgcatttttacttatatactatgactatactcttgagttggcacacattaaaatacacacttaactcactgcatatccctgaacatttaaaatggaaagaagaaaattaatgtttaattattatatgtgaacaaggaatgtgtttttacttaatgtttagtatattgtttatatttaatcacctgtgcaggaaacttaagtttcatcattttataagtaagagtaatatagctcagagaaagtaaatagtttaccctaagtcctacctaagtggtagagctgggatttgaacccaaggttgtttaactcattgcaccctcccaacccctacaggcttgtagtgtataacatacagttgtgttccatgccaaaccatagtgatttattttctgttatcatgatatatatctttgcgtaataataaatggcactcatgacttacacttagtggttgctctgaagcactttaggtgaaggtctggctgcatttactcatataaacatacttatatactcatgttcacacatgtaccaacacacctacacacataaaaaggaaaatcatccatctatgtaatttcaaaatattatacaggatgcaaaaatgataattaaaaaatgctgtattgaagtagctacttttttgaaaatgaggataacatagcttagataatacagtttctaaatgtctgtcaattaacccaaccccctccaaaaagcatattcacaaaaatcctggctttctcttttcttactattctaggttatactgtttaatggattctttttcatttataatgtatacttttgcaaatgaataccatatcatattttacattgaaatgaatcagttcagtctggagagaagaatcacatgagcatcagagaaacaaaataccccaccgcaacccaatcaaaacatttttgcaaactcttcgggagaaaattggtcagaaatattctactatacagatttttggcaccagctgagagaaataatatgtcataatgcaatatgccaattgaaaaaacgtctattgttttactttaagttaaaactcaattttatgaatcaggcatagtttgacttgccaaaaaaaaaaaaatatatatatatatatatatatatatatatacaaatacatatatatatgtattaaagggccaaatcacatagtccactttaaaactgaacatattcaaatacaaactttaagttatgagacaattacttatttgtgcaagatttaggatacctatttaaaatgtcattagttccatgcttaagctttcaggatatctggtatgccccacacacatatccagaacaattttggtcccaatgtccaggtagtcagtggtgcttgcctttagacaacaggaatacttcatacatattccatgatgtggaggataaatgtaaatgagagaagagattgcacctagagaaaattagtggaatatacatatgtgcttttatatcaccctcatccgttatacatctcctatttattaaactaaagaattttgaaccaaattgtattttaattccaaaaattatttagaattataatttctaggaatatataattatatacagaaattctaaattttggctaggcccggtggctcacacctataatcccaacactttgggaggccaaggtgggtggaccacttgaggccaggagttcaagaccagcccagccaacatggcaaatcctatctctactgaaaatacagaaattagctgggcatggtggtatatgcttataatcccaactacttgggcagctgaagtgagaggatcactggagcccaggaaatggaggttacagtgagccaagatcacgctactgcactccaaccggggcgacagaatgagactccatctcaaagaaaaaaaaatctgaattttatttttgctaagattttctctatttcatctttgaaacatgttttttgagaagtgacatgctggggaaattgttatttttcacaaacatgtcttccatctaaataaaagagtacatcttagaaaaagtaaaatgaatttttttacataattatgtttaaaatgtgatatcaaattttagtaattttaattttgatcatagtgcattatttatctttcttaaataatccctgttatattactctctgtaataatggctcagtatttctgaaaccacttatctccagcattgtgccttaagctccttctggcatcagatactggtgcttagcctgttgttacctttaaacttattatttataattttatctggcttttatgggtgatgggctcataacagattattggaaaccagtacttaattgagcctatcatctatatctccaattcaccaactttatctaaaacctctgatgttatcttccagtgttcagtcaagtgtggcaaaggcatacgtcatcggaccgttagatgtaccaacccaagaaagaagtgtgtcctctctaccagacccagggaggctgaagactgtgaggattattcaaaatgctatgtgtggcgaatgggtgactggtctaaggtgagaaccattctgtatattctcagtaataggtttcaataatgtcagcattgccctgggtactataaccacatagcatggagtttaggagggaaggagagtagaattaaacatcatgggatatggggcagattctggctggctgtccatgatcatgatctctataaaactgtgttaaaaatgaagataaaatgtacaaagcacttagcaccatacttgacacaaaggaagctatcaaaaaataatagctgtcattattgcttttttgttaattattcatatagttctcagaatattgttgcataaaactatctaaacaaatagaatactgtcagacaagtcaattcaaaatataattaagtaaggtagcagaagaaccaaataaagggaactcagctcttactagataaaagacagtcattttcccaccaattttgggagttgtgtatggtagaaatggaaaggaacaaaatgttgacatcctttggtcaaatcaagtgaacacaatttatatggaaaatgaacagtaagtttaattcacgataacagtaatgcctatttaaagtttatatgagtaaagtagagcctcatatagggctgtagaaaatgtctgacctgttcattctatgaaatactaataaaacccatgttttaagataaaattctgatcattttggggtgaaaatagatctcacatatttttcagaaatgtaaatatgaatcaattatcccactttcagctgtgatattatatactgactatcatgaaatcataaaattatagggcttagttccatgcttagatggtcataatgctttagatgagacataataaatcctctctccttccccttttattgtataaaagagaaaagaaagtgatggctgctggggtatggagaggagtataatagtttttcataaataaccctaaagggctttctgggagaaatattttcaatatagaaaatactgtgattatcccactttcacagtgttgccccaaagcaatccatggcatttgaaatataagctattttctcatgattatgtatgccttttgtctctaagaaaagtttgcatattaatattgcatctgagttatcagtaaactagactctctttctactacttacaacattcaaaattcacatttgaactctaaaaggatgcttttgtaaacaacataaatcgatccctaactacagcagtgagaaatattcagctcaatccatgggaattttgactggtgaatcacataaggaaacttcacacttcagaataaaaaactttgaggcagcacagaattctaaattaactacaactaatttattttatgttcaagatttgtttccttaattctaagggagacaaatagagcaggataatagggaaagacagtggcttggaagtcaagagatacggaggacaattctcactccctctttgcatagatgggtaaagtggttaagccactgaattaatgcctttgtgtctttgtttccatatgagtcaaataatgaaaatggaacagtgttttcaagctatatgtataacaacttttccttttttaattttatttcaatagtttgtggggagcaggaggttttggttacatggataagttctttagtgtatatgtatagcaacttttcattcatcattgaagatataggatagaataaggaagaagaaaaagtactagcagcaagagggcagggaaaatcacctgttgctccctttccattgtaggaactcatttgtttcttttggctagtgaaattctagatattttcttagaatgaaaccattctgctctgaaaatatttacaaaccacgtaaaaaactgagctatatttttccaactttggtgataaatagaaaaatttaaatgtaggccagccgcagtggctcacgcctgtaatcccagcattttgggaggccaaggcaggtggatcacttgaggtcagcagtttgagaccagcctggccaacatggagaaaccccgtctctactgaaaatacaaaattagctgggcatggtagtgtatgcctgtaatcccagctactagggagactgaggcaggagaattgcttgaacccgggaggtggaggttccagtgagccaagataacgccattgcgctccagcctgggtaacaagagtgaaactcaaaaaaaaaaaaaaaatgaaaaacttaaatgttagttgttgttaacctccaactaactataaaatacagaagatgtaattgcaaaaaaacccaaaagattcaagttttattataatatgtgacacagaattataagctcatacaatgctgcatgtggaaatacggctagcaaatcctatttgcttgacaaatactattacttttggttaatgaaacgtgcctactgtgtggcctctgggttaaatcttagttaaaaccaaagttcactagggagatcatagggaacactgattgtggttttttatgctaaactaaaaaaaatttttttcagttttatgaatatatgtatgtaattcttaaatataattggattgaattacttttaattggttttgtggtgttactgtatggctacccaactagaacatagcctttgtgagtgaggaaagaaaagaatagcttcaacaaatacagttgaccccttaacaaaacagatttgaactacacggatatacatacatatggattttttcaaccaaaggcggatcaagaatacaatatttcctggttgtgagacccactttaaggagggctgactttttgcatatgtgggttctgcaggacccactcaagtttgcatggactttgattatacttgggctgtcctaaaaccaatgccctcatatacccaaagaagattgtattcatctttattcctggccttttaacctttgcttgttggcctgtttgtttctttgtttggtaacttagaagatccagtaaatagtgcttctgtttgtctactttcggactttatatgaatataagtgcttttttccttaaagccatttctttcctttttcattataacgatctcagcatcacagactcaaacagtgtgcacaaattaaaaccagtggctccacgtgaattttattggtttcacccttcattttatacttctatgacattactttcatgttaaaatgaagaccatcccaaaataattacagagaaaaggaataatgaatgccatgattaagtttcagtgattaaagtattcagggacagagaaaacacacaaatctcttattcttatcagctgtgtccttgaaacaggaatagcaacaagatgtatgtgattgtaggtggatttctgtgctcctctgaggtcagttaatctgtcagtttcacgcaaagtctgccctatttttaaagtgtcaatactaaagtggacttcagccttggatttactttaatcaggaatattaaatgtacaatttttttataaagctagcactgaaaacctgctcctcccttaataatatagatgagtccctgggagaatcaaaagaaaatacatccttagattctcccactgcctaagaatcattgactgctattgggcaaaggtagtattgactaaatggaggatgactgaaaagatggcttatgcctcaaactatgttcactgcatttgtatcagcctacatgatttatatcatatatattttgggtggttttgtgtaaatagtggaaaaattgctctgggcttctgagggggaaaaacagattaaggtatatgcaaagagtgaaacttacgtcataaaattgttgcctttgatttctaagaaaaagtaatgcagcctttgttgaaaaatgttcacgtttatttcatcaggattacaatgatggcaaaaataggacacatacaatgtggctgctttgccctggcttgcattaacttacacaattatatgccacgttctgactatatctctctctgctatagacatgttcttcggatctttcttgggagaaaagaacattacacacatttcctgccaacttaaatcttcattcactcatttaagctcttcttagtatggaacactgacttgaaaaataacattgtctctaatgtttaatgaaatgacatttttttttttggtctgaatttgaccttccttcctttatttaaacttctgcaactcctgattttcattactggagaccagcagagaagcaaaaaaaaaaaaaaaaaaaaaaaagagtactattttatctacctgttttacaggatctgattatttatgaagttttatagagttaaccctttcatgcagtattaacaagtgatttaaacttattcaacagaattctgttgagaaacaaggcaccttaaaattgcacataattgttcctggtttattcttatatttatattctacaattcaaacttactcctttaaaattctaggaaatgattagttttggacacatataaagttatgacatattaacagatatttggacaggggatttatgagcctttttgaaatgacataatctaaaataatgctggaagcacagtaaatcattttggatgatttagttatacagcccagccagttgggtatatatttgtttagaagtgatagatacaaagcctgcagtataatgagtaatttttaacttatcctccaaaaggaaatcacaattatattcagcatgttgtattgaataggagaggaattagacaaatgaagaatctaaaaactaattttttcctaatgaataagcaaaatatacttatctagatacctgctttctagcaataaaaattagatttatgttaatgggaattctacgtattctgagctcatgctcatagtgaaaattttctagtttccttagttacaaatctcaaaatggtgttctacaataaattgttttctcattttctatgggaacaatgctttggctgaaaaaaaatatattgactacttagtaatttatttttataattaaagacctgtatatatctggattatttctagtaaaaataatttcttaccataaatattattgatgttactgaaatccacttcatatattatattgtcataggaatctgtaataactataagcaaataagtattcctaagttgttagcactctaattgtttaaaaaagttcaaaaaaagtacaaattaattagttatgccagctctttaagtgtgctttgcataatcaagcattataaccttaaagtgttctcctgttgcataattattaaattagaacaactcataacaagtgcaagatcaaagaaacaacaatttaacaaaaacattccttacgtacatacttaaaacaagtctagaaagacaatacaagatttattaccttgtcattttgagccttacctatattcagattggccagcagtcaatacaagtgacttgatttgcgccatttcacatatccctaaagaaaacattttctcttactttttgttatattggattcttaaggtgtgtaaatttgaagctctcagtaaattaataggctgtaggctcataggatctttggcctgaccatctgtcctctattttcttttttttttttaatttaattttaagttccgggatacatgtgcaggacctgcaggtttgttacatagataaatgtgtgccatactggtttgccgcactatcagcccatcacctaggtattaagccctgcatgtattagctatttatcctgatgctcttcctccccctgcctcaccaacaagccctagtgtgtgttgttcctctccctggtccatgtgttctcattgttcatctcctgcttataagtgagaacattcagtgtttgcttttctgttcctgtgtcagtttgctgaggatgatggcttccaggtccatccatgtccctgtaaaagacatgatctcattcctttttatggctgcatagtattccatggtgtatatgtaccacattttcttgatccagtctatcattgatgggcatttgggttgattccatgtctttgctattgtgaatagtgctgaaatgagcatatgagtgcatgtatctttcacgaaagaagacatttatgcagccaacaaacatgaaaaaaagcttaacatcactgatcattagagaaatgcaaatcaaaaccccagtgtgataccatctcacaccagtcaggatggtgatattaaaatgttcaagaaaacaacagatgctggcaaggctgtggagaaataggaacacctttacactgccttctatttttctatacagaagcttgtcacttcttaaaactaacattgacagtagtatgtcagacttatcacagttggtagcatttttttaataatcatagaggacatttctttccactgaaggaaaactcagtgagtctttgaaagaaatttgaaaccttgatacaatcaagaatatactgaagtaactgactagataacactgttttgatcatgcacccctgatgtctaatgttttttgcttttgttgtttttttctttacattgccaaaaggtacaaaaattaccagaaccaaaaattttaaagggggatttcttgctgccccagggctaggctagaccttaggactatggattccaacatgcctatactgaccaatgatggcaaatacactaccccaattaaaatcaacttgcagggagtccagagtcctagtgagaatttgtatagcttcctagttttaacataactaaatgaagcaggctattagagggaaactcaatcccttgttgaaaggatacttatttaaatttaagggaataattagcagcaaaagcaaataacctaattaaatactctagtagaatgtaaaaatagaaaatgttaagtatccactgaaactagagaataaaataaacacaattaggaaaataatatcttgtcaagtagacacattagtaaaattggtatatgccagaggcctgaatgtcattatttttataagatcaaatacatattaatctgacaattcttgactgggcacggtggctcacgcctgtaatcccagcactttgggaggccgaggtgggtggatcacaaggtcaggagttcaagaccagcctagccaacttgatgaaactccatctctaccaaaaatacaaaaaaaattagccgggcgtggcagcgggtgcctgtaatcccagctcctgggtaggctgaggcagaaaattgcttgaacccaggaggcagaggttgcagtgagtggagatcacaccactgcactccagcctgggtgacagagtgagactctgtctcaaaaaaaaaaacaaaaattctttaggctagcatttccaaaattttgttccatggagagctcattccttggggatgtggtctctatgtatgaaaaatgctggtgttaaataaagaaaatcaaatatctttgctgtaggacttttcaggtcttttaatattctactgtatttggtaaatcgcaaagaggaaactaaagtatttctcctttctttctgctttataccaaagatcgcttttgcagaggacatagctaatttgttatttaacataatacactttgggtgacttcacattagattattcaactttcaaagaatagttatgtaaatttttttttctagctagagaaaatgtgtagattgaaactaaactgaaattatctataacatagggaattattcctgaaataggttagcattttattcaaaattggtttctaattatgtctgcaaatatactgatgtttggagaaggtaattgcttacaatttttgtaattacaaataatcatgtaagacaggaaaatgtgaacagctatcccctaaaatagaaaactatcacaccgaaagctctcattgtcagatcagtccatcatctaaagaaatcaaagattgtgagcttaattttaaagcgtttggacattgaaaaaacctatcccaagatatcctaaaaaagaaacattttacattttattttctttgaaaactgttcacaacaaatagattagtcagtaataagtaggatccctttcctcaagaaagactttccattttgttgtttagatatatccactgagtacttacaaaacttgctactcaccattatatctggagaaaccatgcaaaatttcctaaacaatgactatcaaattgttttgtctctgtctctttgcactaaagagaatggatttttttttgcattgctgttatttttattttgaaaatctcctgagagtcttatttattgccactagatatacaaaatttaaaaatgaatttctaaaatgtttggattgctgaaaacagtcaagtacattggctgatatgatcgatcagagcagaaatacattaacttaaggacaatgaggcacatatgctgttatatatgctaccctaaaaaaatgtatacttcagagagactgagatagtatctctctctctttctctctcccctacgtgtgtgtatgtgcaacacatacataagtataaatgcaaatataagaacatgtgtttaatgccatttattttggaaaatgcaagagaaatattgtaaaaataaaatccagagggtttaataatatttccttcttcatagcttctagcacaattactagactattaaaataatacttttgatcactattcttatgcagcgtaatagggaatctataatttcatctcctaaaccatatctcagattaattcagaaagtaaatgtgatggagttacttttgatattccttatagaaggatggagcatacatgctaaatctcatttttgtgatgttgaacctcaaaaggattctatgttgcagggggtgagcaggtatgttcacatgaacaaatatgagaatttgatatgaattttataaaattataagcagtagtcttaacattgagtgtattttacttagatatggtgaaatatgtgttcatcaactactagagactatccagagatagacataaccagataaccaggataactagagaaatacaagtttaagacacaagaaaagtatacaaatgatcagccaattagaaagatatcacatgaggtctttggatttaaaatgtaacaaacaggctgggcacagtggttcacacctgtaatcacaacactttgggtggccaagacaggaagatcaattgaggccaggagttcaagaccagcctggccaacatggcaaaacgctgactctcctaaaaatacaaaaattagccagtgatggtggtacatacatgtaatcccacctacttgggtggctgaggcatgataattgcttgaacccaggagatggaagctgcattgagccgagatcgtgccactgcactctagcctgggaatagagcaagactctatctaaaaaaaaaaaaaaaaaattaacaaaatgtttttaacaaacagagccatgggccctgagctgggggttctggccttgagattttgcttcaggatgactggatggcactccagcatctacacaaccagggtttcagattggtgttgatcttgtttgcagaggaacagttccttagtccccctagcctcaaactccacatttgtaaaatgtaccaaagtaacaacaggtttcttggaatatcaaaatgctctcaccatgcaagtaaaagtaataatccagtgtcaatgatgtgtgtagtccaaggaaatgtattttgaagtccttaaaatgaagagtcaatgaaacacaaatagcagaatggattagaaaaatacatatctggccgggcgcggtggctcacgcctgtaatcccagcactttgggaggccgaggcgggtggatcatgaggtcaggagatcgagaccatcctggctaacaaggtgaaaccccgtctctactaaaaatacaaaaaattagccgggcgcggtggcgggcgcctgtagtcccagctactcgggaggctgaggcaggagaatggcgtgaacccgggaagcggagcttgcagtgagccgagattgcgccactgcagtccgcagtccggcctgggcgacagagcgagactccgtctcaaaaaaaaaaaaaaaaaagaaaaatatatatctataggtctgtgctataggacaaaatatgcataagtatatagagcgtaataaataaatctaacaaatatgtttacaagtaaacatgcacacacagaagtaatatgggagaagtggagtgagggatatcagggggcaaccagaaagctccatttaaagggtgcagacgctacgtaactgagtccaattgcgttcacgtatctctttctgcacagcacttctaatattggatgttatcacttttttacaccaacttgataggtggaaaaaaattacaactcattttgaaatgcatacattctttgactcagcaaaaattttccttatgaacattttaaaaaatgtttaacaaaagattttccttatgagcacttttgcataatttgctaaccatatttatgaagttgctcattgctgtagctttaagtcaagaaaaatttgcaaacaatctgtgtgtccattaactagttatagaactcatgatgctattttaaacagtagaatattgtagcttttaaaaaaatttatagataaatacatgctgataagaaaatttctccaagacctactattaagtaagtaaatgtcatgcaggagagttatgtagtgtcaacaaaggttatcataggtttgttaatcatatacatattaaaatgtttctacacagatgtacaaagaacattttatttgaattacattgagggaaatgaatttttttacttataattttaccatatctatagaattacttttaattttataaaactcgttaacagtttctatctggaatttttaaaaaattcttacttttttaatccttacaatttttcaggctatactattgagaatgattgatattatggatacagggagatgtgaaaatactatagagttttaggagagaattgaggacttgggactagaagaggtaagatagctcagtatatctggtttgaattctgtatcttctaagttaatgaatccaaatgaaataattcatggaaaattctgagaatagtgtcacatacacagtaactatgtaagtgctggctatattcgaattgtagtatcagtggggctagggagaaatggttgagtttgagaattttttatgagattaaaatgaaaagaacttgggttgattatctgtagtgggaggtaagaaagcaggaggtgttaaggagaactcccaggttagttttctggcctgagcaacttgtatggctggtggtttgtgatatgagacagaaacccctggagaaagattaagtttgaaagggaagattgtgaattctattttggactatgtttcaatgtgctcatcagatagttaaatactggtgagtagtaggcagactaggggagaggtatgggatggaaatagaaatttctgagttatcagcacctaaacggtgtttaaaatttcaaagtatatgtgtacctggggagagagtgtagcatgagaagaaaaaaatgcaattctgagaaactccctctgtaaaggtgtgtgagagaagcagcagctgcggcagatggaactgagaaagggttattcagaggagcaagagagaaatcatgagaaacagaaaaaaaaaagtatttttaaaaatattccatgtgatggggactgaatcagagggagttgagagtaccctatctttagtctcaactcaaacttcagctgccctaggaaagtgcttttggcattccaataactcctcatttttatttattttttttgtatttgtatttatttttttgatacagggtcttgctctgttgcccaggctggagtgcagtggtgcaatctcagctcactgcatgcctctgcctcctgggctcaaacaatccttccttctcagcctcctgtgtagctgggactacaggcatgcaccaccacacccagctgatttttgtacttttagtagagatggggttttgccatgtttctcaggctggtctcaaactcctgggctcaagccatctggctgccttggcttcccaaagtgctgagatgagtcattagccaccaagcccggccctcatctttaaaatatacatatttaacccaaaattcctgatcttattttctcaagactacagcccacttccagtttcttttttttttttttttccaaaacatttcaaaatcctctccctacctacccaggctagaagctatccttggcacttcttcctctatacacaagtagggttttgcctcagttgctcttaattcccaatataataccacaatcccttcctatatttcaccagaattagagtaacagtttccttacctgcatactcctcctcccacagctccgtctattcacgagatggttgcatcattctttcctatactcttaagtacttccagagatccaccattgattgcgtcaactaccagatactgtggctcaaagctttctgtattgtaacctaacctacgtctccagaattttctcatcattttcattaactcaagtgtttccactaagctcacgcctgagcagtttttacttctacagtctctatgtctttgtttatacagttctctttgcctacaatttgtttcttccaacaatccaagtcctcaaagaccagctggagtacctagtttctcaaagggcttcatcaataaatgacagccttagaactccttggtacatattgattacattagtttttcacaattattgtcttacattattgccatttcagtaagaaaatcttaactcctttacccttctcaaaaatatctcagcaaccagaacattgtactatatgtgtaagcaaaaaaaatttaaaaagtattacatatttaagcattgtattttttaaaattttaaattattttaaaatttttggggggtacacagtaagtgtatatatttatgggttgatttttctgactctaatttgataacaactaagatttcatatattttacaacaaaagatttattcactgatattttccatgaaagttaatcaacataattttcgtagtcatacaactctcttcaccttttcctatatcgtaactcaaactatttgaaaatatgtttttaagtaaattcacccttactttaataacagaatacttgagaccaaaaacagtttttaaaaaagttgagtttcaaggaaacaggcagacttcttttgtgtcgtcttgaatccgtttggctggaatacccaccatcaggttagatagccattatctaccttagaaaagaagtggtggatagaagcaaagctcatttaagaattttctcctgaattggcaaatacgtgtttattctaagttggaataagttaaatatagctataaaatgctatctgtgctattttaaatcaagactttacttatttaaacaaaacagaacaaaaaacacacagttctctctcacatggccacagagggatctgatccacttttgacatacaattgttggactagacatggaaagtattttatttgaaaaggaaatttaatgattgtcattccaaaaagttctctctggtgggaagatgtttcactggaatgacagtaataaaatagaaatgtcttgatatacttttttcactttagcaaactgatttctgatctgagttctcacagaattgcaagtgtgcccaagactttgtgtctattaattacttcttaatgcaaacatcatttttttcttccattgttgtggtgatcagtgtacactttgatttaaaacacattttgattattttgacagtcctttcacaacatattcagttctttctaaatcattcataagcaatctgtttgattttgtcacacacatttccttgatttgctataaatatatgtaaacattttcattaaagaggcaagaagagtttgaatgttagatccaaaaaaaataatgaattaattaaacacatacacacacatacacaaaaaaacaccctcaaatgcctgacctctaggaatggattcaattccaaatatccatgtgttaaataaggcagacaaattgctttaaaaagacactgaaacacagaccaaaatgaatagcaaatctttaaaaacaaacctaacttttgttctttagtatgcttgtttcacactcactttattaaaaagttgaaagatagaactgccaaacatatacataaatgaataggaatgcagcgctaataatttccagtagaagtcatcatttggtttccttatgaggtcctctctccactgtgaatgctatttcttgttaaaccactttggaataatccattattcccaaagacaaattacccaagtctatgctgttaaccttgttacagattggcacttatcattacagattatatcaggttctataagattgtctattatattggttgaggaaaaaacatttgtgctctgccagtgacaattttcccttaatttaggaattcctatttcttacagaggccagctggaaatgagtaaagcataacagagccttccttagctgttggcctggagaatacacattctctccaaaatatatatctttggcatagtctagaagtaaggaatcttgggtaatctctgtgctggccaagtgtgagaattatgatttttaacccctaaatgcactgaaatgtttttttttcctttaagaattaaaaaacagactgctgttagttgagttttttaatctaacaaaaatttaaataaacaccttagagtgatatttttactgttgtgttttctgcctcctctttggtaaagtatttaacatgacatttataggatttacagcttgaagagttttacagtttctttaggatgtgtttaacatgcatagattaatagttccatgaactcactgacaaactagtagattatataacctaaatctacgcatttatttataccgtaatctcccatatggcccccaaatctaagtaatctaaatattcagagtgacaaatgactagctagtactgaaacagtacttatatgacttttctgaagtcctgacatgaaaggtagaaactaacatttagttaataattttaaactttggcattttaccatggattctccatgtataaaactagatgtggaagtcttttctttagccccatgttcaaaatcacgtattacttcaaattataacttaatggacaaatatggaacattttctctaacagcagttgttagtcaaataagtagagttagtaattatctcaatgcatattttcaaaacgatatgattaaagtaaaatatcaaactgccagttgaagaaatatttcattctaacactaaaacatttatcagctgggcgcagtggcccacatctgtaatcccaggactttgggaggccgaggtgggcagatcacttgaggtcaggagttcaagaccagcctggcaaatatggtaaaaccccatctctactaaaaatacaaaaattagctgggcatggtggcagcacctgaaatcccagctacttggaaggctgaagcgggagaatcacttgaacctgggaggcagagattgcagtgagcccagattgcgccactcctccagcctgggcaacagacggagacttcatcttagaaataaataaataaaattaaatatttatctttttttcttttgagctttttgtgccaatcagtaagagcttctaacatatactttaattttaggacagtatgtgtgtatgtatatatatatatatatatatatttattttttttttttttggagacaaagtcttgctctgtcacccaggctggagtgcagtggtgtgatcttggctcactgcaacctccgcctccagggttcaagcgattcttgttcctcagcctcccgagtagctaggattaaaggtgtccgccaccacgcccggctgatttttctattttagtagaaacagggtttcaccacgttggccagtctggtctcaaactcttgacctcacccaccttggcctcccaaaatgctggaattacagttatgagccaccacgcccagcctaggacagtatatttttatacttcttcattcactttgagaagtattaataaatccttatttttacaaagaaagaattacaagactcagtgtcacaattctagtatagttgtttatgcaagttaaatacagaaaaatagcataattgttggctgcttgctggatagcaacagtgtaagacttcaaaaattagcatgcgggacagtccagtggatgccagagcccatggagtgcagaagccatacaagagtcagaggtcaatggaaagaatgagtgtctgctctctaaacaggagagtagttaagaggtttttaggaatagcccatttataaagtgtttagtgaaatgaagttgttcagaagtgcctacgttgcttcttggactagcagacaacaatagtctttggtgaatttggcagagacatgataatggctagcttataccatgagccatcacataaatttctacgtatgattcatgaattttcagtgacagaaagataattttatactttacaaaagtagattcaagttgtactatgtataagccttgaagaacccattgacatcatggttgactattctcttgtctcatttgggcactttagaaatttgtggatggctatttattggagcttgtgtagcccctttgaattaaacacgttttacttatttcagtatatttcagagcatgtttgctatgattcaccggaattgagtggatacctactaagcatagtggtgttcatataaactatgggaaagaatacatgaagatgatcttgataaaaatattcaactatatcataaaaggaacatttctatataaaataatgaaaatttagcaacagagtactttcatgtcttctgtgtagcatttgacccatcaaaaatttctttataacattgtgctattttagacctaattaacctcagttcctaaaatgtatcagattacacttgaaaaactttaatttcatcaggccacagattttcaacagtacacactcactgatcttgaacatactggagctatgacatctgtaaatgtctcaaggtaaatggacatttctttgagcatcttctataaggttgaagttcacctatttttcagtgttaaaccaaggtcttttttttttatttattttactttaagttccaggatacgtgtgcagaacatgcaggtttgttacataggtaaacgtgtgccatggtggtttgctgtacctttcaacctgtcacctagacattaagccctgcatgcattagctatttgtcctgatgctctccctccccttctccacccccaacaggccccagtctgtgttgtcgccctccctgtgtccatgtattctcattgttcagctcccacttatgagtcagaacatgcagtgtttggttttctttccctgcgttagtttgctgaggatgatgtcttccagctgtatccatgtccctgcaaatgacatgacctcatcccttttatggctgcatagtattccatgttgtatatgtacaatattttctttatccaatctatcactgatacacatttgggttggttccatgtctttgctattgcgaatagtgctgcaataaacatatgtgtgtgtgtatctttataatagaatgatatatattcctttgagtatatacccagtaatgggattgctggatcaaatggtatttctggttctagatccttgaggaatcaccacactctcttccacaattgttaaactaatttacattcccaccagcagtgtaaaagtgtcatatttctccacagcctcaccagtatctgttgtttcttgactttttaataatcaccattctgactggtgtgagatggtatctcactgtggttttgatttgcatttctctaatgatcagtgatgttgagctttttttcatgtttgttggctgcataaatgtcttcttttgagaagtgtctgttcatgtcctttgcccactttttgatggggttgtttttgtcttctaaatttgtttaaattccttgtaaattctggatattagacctttgttagataggtagattgcaaaaattttctcccattctataggtggccttttcattctgacgatagtttcttttgctgtgcagaagctctttagtttaattagatcccatttgtcaattttagcttttgttgcaattgcttttggtgatttcatcataaaatctttgcccatgcctatgtcctgaatgatattgcctagattttcttctagtgattaaactaagatctcagcaacactttccattaatgccataagtaatacaatttcaggagtgaaatttccatgttcacttttctcgtgttatttaacttgtcagcagtgtctcctgtctcattcatcttttgtgatagaagaaaggatttcacaccttgttttgtccaggaaatggacttcacaactattcatagttcatttcatccctttgtttctacaataatgtcagagttaagaatttgttaagattttttgcgtgtgtttttatttcctacacattttcattttctctcatttgtctgtgtttaggccaatccataaatttgtcaaatcattttgtcatctgagcctatgtttatcagtaatgccaaaccctgtctgctcagtgctatcatctgtcttagtagatataattttataagagatcatgtctgtatctgttactacatcatccatggtcatttgtagaaaaaatataaacatctgagttaagtaaacttcgactctacacttctgtaaacttgaacattgcttatacttcccccaggtatttccctttcagctagtttatttagattaaattattttcaggtaaaataaagtcattcggctcttattacctggcataagaatggcaggtaataatgtaggaaatggcaggaaattaagctttagagactgaaaacaagtatagggtttaagaaggtatatttcatttgtaaagaagattaagcctttttcttgttaccaagttgatttgctagcatttctatttgagcttctcatttactaaactatttctctaatcattttgagagtccaaagtgtttaaattattgagaattattctatcatgtttagtgtttgacatgtgagccacagcatagacataatttaatataatcttagacattgtcactaatgtccagggcaataaaagatttatttcattataaaagaaatataaggttgtcaatgaaaagagtcaaactgtgtaaaatatttaaagagatttattctgagccaaatatgtgtgaccacagcccatgacacagccctgggaaattctgagaacgtgtacccatggtaatcaggctacagcttagttttatacatttttgggaaacgtaagacaccaatcaatacatgtaagatgtgcattggtttgatacagaaacaacttgaagagggggctaccaggtcataggtggattcaaagatgttctgattggcaattgattgaaagaatttatttaaagacctggaatcaatagaagggagtgtgtctaggttaagataaggggttgcggagaccactgttcttatgcaagtgcagcctctacttagcaggcttcagagagaatagattgtaaatgtttcttatcagattcaaaaagatgccagattcttagttaattctcttctggatcaagaaaaagacctggaaagagaaggagattctttacagaatgtagatttttcccacaagagcagctttgcatggccatttcaaaatatgtcaagaaaataagttttggagtaaattactttgatttctttcagggcctgctatctgtcatattcttattgctacaaagagtctgctttgtcaatcttaaggtctcttttttaacgttaatgctggtcagctatgcctgaattccaaagggaggagggtataatcaggtgtgttctattgttaccagcagcaaatccattgagtctacagcaacctcagttcttgtctcctcagaagaaagaatttgactgagaagcataaggcagaaggagagaccaaggcaagttttatagcaggagtgaaagtgaagcagcatcattatctggggtaaatacccgaggtttgttgtctcatgccaggggcagacacacaataagtaagcttaagagcagaggtttaataggcaaaagaaagagaaaagagaataactctctttcgtagaaagagaaggactccggagtgtgtcttctgattttgtggtgaaatgcaggaggttttatagatgaggttgaggagacagtatctaatttacatagggcatgagagattggttggacccagtgtgccgtttgtttgcatagcacaggaagaagctggccaccccaccctaatcttctattatgcagatgggttctccacttggctggcatcatgttgactgttctttattctacacctggatgacaaagaaaaagggagaaggaccctcaatgttgaacatatctgggccccaggtagccttttcctattggcacagttgccggcattcacccatgcaagcttctagtttctatgtctgcagttcaattttacaggctgctctttgttagaaaagaaatgatttgggggctgcttttcattaaaagaaaaacattactaaggactctctgactctcacaaactgcctaaataatttctttctagctagtgtatgaaaaatgtattaaaaaactttagagcaggaatgaaaggacggaaagtaaacttggaagaggaccaagcaggtaacttgaaggacaagtgtgcagtttgaccttttgactgggggtgttatatgttggcatgcttctggggtcttccattccttctccccagttcttcttttggggtgagctgtccacatgcacaacggccggctcacacttgggaggggagcatgcgcagtgtgtttactggagttgcatgcatgctcactttaaggtgctcttctcttactagtctaatattcctaggaggtcatatacgagttaaactccaccatttttcctcttaatgcttatgcttgagcccacttgcccaattcctgagatcttattggaaagttgctgatcaccagtttcaggttttttctatctatagagaaactgccttccccaggggctggttgcaactaattattattttagagagacagttaacaacctcctgaccatcacctgatggtcgcctgacattcctggttgcgggggagggagagtcccacttctgccctggtcatgtctgcctgactatctagcataacactaccacccattcatggcctaaatttgtgtttcaggtttacttctagaatgctcttggctgaggggaggggtccattcaattagttgggggacttagaattttattgttggtttacatggtgaaattatctcatgtgtacccaagtacagagaagattgtactttccttaggtagatttaattgatgaatatcactacggcaatggaacaaattttgctttcagagaccttggggcttattttttggtggggaaaagggattatcgacatcaactttccttgtgtcttgttgtttgtctacgtcaaaaacttgcttaagtcctaaatccttgtaagcaattttctaagctgtttaagtttgctctaaagatgattgctttcgttttactctagtaaacctgggacatcatgattgtgtttcctattcagaattaaatctcgtacatggagtagattcatgaggtgctttgtttcaaaggtcttttggggcaatattaaactgtttggggaacagaatatctatcagacaatacaagactctctttttaaaatactctagtcagaaaattttccttgtaaaagaaatttcaatagcaagttatctggtaaactctgtatttctttcccatttgctggcaaattgatgttgacattttagcatttggctttttagtggaactctatagtgtgtcttgtttcaaatatacattaaattacttgatacacatgtgaagagcgagatttagcatttattagaaagaaggactgaaagaagggagaagggaaggaaggggagagagagagcgccatggaatctgaagaaacacctacttaagggtccactctactcatttgcccccttgttattaaacattttggaacatcatagcacacaaatgtatgaataaaactatatagtgcatatagtggaaataacattatatctggaatcaaaagacttgcatttgaggtttgtctgtccttatggggcatgtctttgtatgatctccttgagtcctaccctgattttcccatttgaattacaaaaccccttatcccaaacatttctcatcctctctcccagctttaattttttccatagtacctgttaacatgtaaattatagtatactttcctcctttatttttttgctcttaccctctcccccattaagatgtaagctcctgggggcccctgttcttgtctgttttgcttactattacatcccagtctccagacatggcacattggctcagtaaatatttgttgaatgaataaatgaaatacatgcctcacactttccattagcaatgttgttagggttatgagaaagataaccaagatattctatgtaaaagcatattagaggcatggaatataataggtatttcatatgtctgttcatttgtgtttattgtctaatacatgatctgtcagtaggttgtctgtagagaaggtgactagatgttttagtttatccaggactgtcccagtatgcctacagtctggcaaaaattattatcagcaacttatttcacaaatgtcctgatatggataataaattatatgatcaccctatctaaagatgaatcatgcatatgaattgtccttagagcaaaagtttacctcataccatataacctgagttatactaaaaatgcaataaaaaagctttcaaaattcattaatgtttaatttaacagtaaagtaggataatagtctaacatggcagtatgtggaaaagggaaatatttcggttttaacataagagaaatattagcaactttcaagtattaaatagtgcttaagcatttaaatgctgaattcagtattttttaagttaaaactctaattccagcacttcttgcctgtaaaaccgtagacagtagacagtttgtgaatttatgtgagcctctactttctcctctgtttaaaagggataatagtattcatggccttcatgtgagatattaaaataaatataagctttaacaaagtgcctggcatataataaacactaaataagtactagcttctttctcttagcattgaatggaggaaaaactttcagaagtagtactgtcagaggctttggaaccagagagactctgtcttgcatagggcctggtaaaataaggctgagacctactgggctgcattcccaggaggttaaggcattataagtcacaggatgagatgggaggtgggcacaagatactggtcacaaagaccttgctgataaaacaggttgcggtaaagaagctggccaaaacccaccaaaaccaagatggtgatgaaagtgtcttctggtcctcctcactgctcattatacactaattatacattatgcattagcatgctaaaagacactcccaccagcaccatgacagtttacaaatgccatggcaacatcaaaaagttaccctatgtggtttaaaaaggggaagaacccacagttctgggaattgcccacctctgtcccggaaaattcatgaataatccaccttttgtttagcatataatcaagaaataactataagtatactaaattgagtagcccatgccctgctctgcctatggtgtagcccttcttttattcctttatcttctttttttaaattatactttaagttttagggtacatgtacacaacgtgcaggtttgttacatatgtataccgttcaggacataggcatgggcaaggacttcatttcctttatcttcttaattaccttgctttcactttaaggactcaccctgaattctatcttgtaagaggtccagaagccccctctcttggggtctggatcagaggccctttcccataacagtactattggtttcctttgatcacaaggcaacaaagtggctttgtagtgtaactgattatttaaatattacatgactggctaaaagtggatgaaattgcctagcttccacagtggtagtaatctacttctaactccattgattttatgtcattgtgttttgttaataaatgttattgaataaaataccagatccatagtaaataatctctggtgtttgtattttttacaaaggaccatgaacataatgagtggtcagtaaatatttgaaaacaaaaataaataatgtagtattctgagacattcaagcaaactgtaattttaagactatgttagacaggacttctacttgcagaaagctaagacttgtcacaactgtaagctggcaaagtggataatagttaatgagattagagtctttactcttaggtagcttcaccacttagaaattttcaccacctagatgacagtaacttttaataataaattatttggagttttactttgatagtaatttagacctgaacctgcagctatgatctactacaataccttgtctaacaaaaaggaaaaataagtttcaggtaaattatttgctaaaggcaaataattagaagccaggtctcctaatttggaggtcagaattattttggctttttctttaatgtctgtgtgtttttaatcatagtgacattatttgaaaagatatttgattattcaatattgtcttctataataaaaataataaatagtttagaagataacttgggatttcaattgttctattttgaatgactgtccattttccatatatttgtaataaaagttttaccaaattatattttataaagaaaatacttactagtaagaacttgatattttattattaaaatattctaatgaaaattagattctaaggctaaaagattatttattttaataataaagcaaatctattagttattagtttctcaagcagaaaattatactgttttagtttaatgaattacagaatttccattatttcttggagaatatttttatttccaggttatgcccaaatagttacaaaacgtaatttgcctataaaatgcaactaacatcttttcttagaccccaaaattttataaaaggtgctattcagccattatctgctaagattatatattgtgagttatcatgtgtctactgttattttatgtcattttcaataatactgaaaaatgatgtgttactttgctttgctcatatcccttggagttgattatgtaagattgactaaaagtgtcaggaatagtctgtgactaattatgggcctctttgaaatatcgagaaccttctttatcacatcagagtgagctcatctttctaagccttctgttattcttttggtttctcaaatattgtgatctttttcaagatttacagaaattttaggaatagatactagaacagtattttgttctatgtaatattaatcccttaaaagttttagttaaactgtattgcattgtcctgaaaatacttttctaagcatgtctttatttatatgattatatccattgtatagagtggtattgagattaaggcttttaaaggagaaagaccatgtcaaagagtccttctataatagctggaaattataataaagcttacactgaactggaaatattcaaatcctgtagaagtttaagagaaaaagtcaggtttaaaggacataacatcctagtttgttgttctttgatctgctatttgcagaaagctaagaattcatcagatacaaagataatattttgcagaaatatatacagagtaaaacttagaaagttatgttatctgtagattcatgttcatgacatgcacataaaattccattattctgcagtaagctattgtcataacagaaatataggcttcattattgaacatgacatacaaacaactctaacataatttaccatgcaaatagtaatacataatttaccacataagtagtaccatgatactacttacagacaagaagcaatacaaagggtctatgttaaatacagaacatgtacttttggccagtaatttccaaactcagaccgcacagcataatcagctaaatacttttactaaaaatgcagattcccagatctcacatgaatttattgactaagaaattctacgtcttaaaatccatcattgtctttaaagaaaaatctctcctgtcattctgaagtgtacactcaacatatgaatatatggtttaatttataaatattgcataaatatgcataggtagttaggataatgtggaagctttcatggagaagctggatttgagatagtgttgttgtttttttgttttgttttgttttgttttgttttgttttgttttgttttgtttgagacagagtctcactctgtcacccaggctggagtgcagtggcatgatcttggctcactgcaacctccgcctcttggattcaagcaattctcctgtctcatcctccccaatagctagaattacaggcctgcaccaccacacctagctaatttttgtatttttagtagagatggggtttcgccatgttggacaggctggtctagaactcctggcctcaagtgactgccggcctcagcctcccaaagtgctggaattacaggtgtgagccaccacacccagcctaagatacaattttgtaaaaagacatggcatttaggaaaggagtattactctgagcacaactgtagaggtagaaatagaaattgcatggaaatgattagtttataaaataacaaattgtttttaataggatggagtcaaatacaaagttaaagaagtaaacacatgccagcctggatatagtgggatactgggctttatcttgtaggcaatggtaaactcaataaccaaagatttttgtccaaggagcatatatatgtaaataaattttgaaggaatgcattttcaattaatatgtgccattcattggtaggctgaggactaaaaacaaatcatacaatagtacattagatttgagataatgaggatttgtgcagaatgcttcttgtgctaagaaaaataagaaaagagatgagcccaatgatgatcgtaaaggaagaattgacagcaaagagaatgcaatactaatagtgacttaggaaaatacaggggaaaaaagtattacaaatgatatgtctgtatacttaaaagatgacaatcagaaaatatttaccaatttgtaatcagaatagaatacaccaagataattcatttaaataattctaattgtattaataaaccctttaagcaaaatattctttatctttttacatagaaaataaaatggctagtaaataaatcattattttcagaaacacaagcacatttcccctcttacatatagttttgataccataaaataacggtattttctcagacaaattagcatcagactatttgtgtcaaaaaacaaatttagtgatatatgtatgaaaccaagagacttccctggtaaaaattgttacacatcaaatatgttctttgcaaaatattttacaaatgaaaataacatttagttgaaatgcaagaaatcggttaaaagtgcacttgattaataaaagccgtatatgacatacccacagccaacatcatactgaatgggaaaaagttgaatgcatttccccaaaactggaacaagataaggatacccactcaccactcctcaacatagccctggaagtcctggccagagcaatcaggcaagagaaagaaataaaacatccaaattttaaaaggggaagtcaaattatctgtgtttgctgataataagtttgtatacctagaaaactctaaagactccttcaaaagactcctagacttgataaatggcatcagtgaagtttcaggatacaaaatcaatgtagaagcatgtctatacacaaatagcattcaaactgagaatgaaatcaagaagacggtcccatttacaataaccacacacacaaaagaattacttaggaatacgtttaactaagaaggtgcaagacctctacaaggagagctgcaaaacactgatgaaagaaataagtgacacaaacaaaaggaagaacatcccatgctcatatattataagaatcaatatcattaaaatgaccatactacccaaagcaatctagagattcagcacaaatcctatcaaattatcaatgtcatttttcacagaattagggaaaaaaaatcctgaaattcatacagaactccaaaatagcctgaatagctgaagcaatcctaagtaaagaacaaagctggagccatcacattacctgactttatgctacaaggctatagtaacgaaaatagcatggtactggtacaaatatagatacacagatcaagggaacagacaaaagaactcagaaacaaaaccacatacctatagccaactgatcttcaacagagtcaacaaaaaaatgcaatgaggaaaggacaaccctattcaataaatgatgctggaaaaattggatagccatatgcagaacaatgaaactggacccctatctctcaccatatacaaaaatttactcaaggtggattaaagacttgaacataagacctgaaagttaaaatcctagaagaaaaccaaagaaaatgcttttggactttggcatatgcaaggaatgtatgagtaagaccttaaaaacaaatgcaacaaaaacaaaaaggcacaaatgggacttaagtaaatgaaagagcttctgcacagcaaaagaaataatcagcagagtatacagaaaactaactgaatgggagaaaatattttcaaactatgcatctgacaaggactaatactcagaatctgcaaggaactcaaacaactcaacaaacaaaaaaacaactagccccattaaaaagtgggcaaaggacatgaacacacattcctcaggagagacacacaagcaacccacaaacatataaaaaatgcttaacatcactaatcgtccaagaaatgcaaattaaaaccaaaatgagataccatctcataccagtcagaatggctactatcaaaaagacaaaaaacaacagatgttggtgaggttggagagaaaagggaatacttatacattgttagtgaaaatgtaaataaacacaactactatagaaaacagtatggagggttctcaaacacctaaaaatagaactaccatttgactcagcagtcccactattgggtatctatccaaaggaaacaaaatccttgtatcaaaaagacacctccactcatgtttatcacagcactattcatattagcaaagttatggaatcaatcaaagtgtccaccaacagataactggataaagcaagtgtgtgcgtgtgtgtgtgtgtgtgtgtgtgtgtgtgtgtgtgtgtgtgtgtgtaataatatgcagccaaaaaagaatgaaattatgtatttcacagcaacatgaatggagctggaggccattatcctaagtgaaataactcagaaacagaaaatcaaatattgcatgttcttacttgtaagtgggaactaaacaatgggcccacgtggacatagagaaagagagaaaatagacattgaggtctccaaaagcagagagttgaaaatttaggtacttggtacagtgttcactgtctgagtggtgggtatactagaagcccaaaccttaccattttgctatatatctatcccctgaatctataaaaataaaaaagagaaaaaaagtaccttttacctgagaaattcagattatcaaatatttttattagcataatactaacatcatctaatctaccaagaaaaagcaattactttaataacatatctggctaagacatcttgatataatttataaacattttaaggccagagaaaataaggcagatgagtatatttaaagactgtaacaaggatccagctctaaaagtagacatgtgctaacttctgaacatcgatgattaaattaaataataataaatcaattatttgtttgcaaaccatgtgttagaccttggaaagctgtctgctcaagcattactggtgtcattcactctctttctcttcaagtcatactgtacctttttctttatccttctttactcttatgtccttttcattacccaaaactctgtctcagatcagccagaggttctcaaaggcattgtgcccaatttatgagcatcaatgtttctgacccatgttttgcattgactgtggatgttgcagctcatatttaattttaagaaacatttagagaatgttcccacaccctagaaaataataacagcaaaaaataaaaataaaaaagaacctaaacaaaccttgtatttctcctagtgctcaattacctgtggcaaaggaatgcagtcccgtgtaatccaatgcatgcataagatcacaggaagacatggaaatgaatgtttttcctcagaaaaacctgcagcatacaggccatgccatcttcaaccctgcaatgagaaaattaatgtaaataccataacatcacccagactgggtaagcagacaaaaaaaaaagatgcttttgaaaaacatagaaatgcttatggcttcttgtattttgtatattactttaaaccttgatagttgtaaatctatactgattattttggtttgcactaaattggatccatttaaatatgatttcgtccaaatggtcaggtgggtaaaaaagtcctaaaaacttaaactgctttgattcccaaagttgtccaatcagagccaggtccaggaaataatgccacaccaccccaggtctttttgtaaccaaaatttagactcggatcaatctcatggcagaactatcaattaagttaatatctgtggaaagatgagattgtagtgtaagccttagatttctccatggttgatagccttccttgtgatctgggtataaattattctttggagggacacagactaaaaaatgtctttcaagaagaatgggtgcatggatctacaccattaaacaagaagttctattttctttttaagttttgagaatatgatactaaataaaaaatacattctagtaatattgactatattgatatttacattgttttatgttatgaaatgccttcatatatatatcctcaatttctgttatttaatctaacccataattgagaattagactacatattttaagtagatatagcctacacttgcataacaaatactaatgaatgatttagcatttacatcttgactattagtagcatttaacagcactcttgcctcattgtcagtgggttaatttatatttaatacctttggttttaacctgtgcatataatctccaggggaacaattggaatcatacaaaataatattaccaaaatgtaagaagataaattatcatgtgtatttttccaggcataagactcaatcaaatgtgaaagcttggtttcttcgaaatacaaaaattctctttttagggccaaataattaactagcattcctaagaaataatgagttcaaggtgaataacactaattaagacaaaaagttaagcaattctagagcagatgtactaaatccatttattcaatagcagtataattcctttctccaacaattagttggagtccttgaaatattacatggcagaaaataatggattaaaagaaaaaatttgttaaaattgcattttctctatttattattccttgaaggtataccccaaaatacagaagcacaatggttaggaaaatctaaggtgtttaaaaatagaataattatattagaatacgattcattctcatatgcaaaagaaataattgtagcagcagtgactttcattatgcattccagaacacactgttttacaaaaagggaggccaagtctacatgaccaaatattctataccaacttctcatttcaaacacttcaactattgctgtaaatctcagtcgcttgtgatgatatgcattaatttttatagaagcctgaaatcacagctccaggtaatccatttagatgtgtctgttatctggggaaactaggaatatgaaataactgtgagcatatttttactttgctgtttccttgtaatttcaaccctaataatagtatttattaatttgtattcacataaaggtagatatattgagcacatttatttttctttttaattttctctactaaaattcaaaagcaacttaaatgcaagctatgaaactgaagcttaaaagtacaacacattgaacctgggaattatatctttaataggcctaaaaacatttataagtaaaaatattattcattctttactttttaatcataggaggtgtgtatgtgtgtgtatctctttcttgtttaaattccagaaggtaatataaatgaaccaaagagagtgtacaaaatccgccccacttaaacgcttgaagttggtttttactgacatatatgatatctgcatggagtgaattcactatgttctgtttcacagctgctctgactttcaagtgcctgggagatcagtggccagtgtactgccgagtgatacgtgaaaagaacctatgtcaggacatgcggtggtatcagcgctgctgtgaaacatgcagggacttctatgcccaaaagctgcagcagaagagttgacctctagcaggctggctggatcacagctcttggcaattacattatttataaacacacacactagcatgtttttcagaccaaatattatcagattacatataatttaatcaaattaatttatttttttgcctgccaaacatccaatgtggtgcttgttttggttacacaaacattttgatttatactatatggcttcataaataattttatatgaatgaattagttggatccagtaatataataaaaagaaaaaggaaaaaaatagatcattatacttaaaacaagttttcgttgtttgttagggctatctctaaggtgctactctctccccaccaataacattgaattatccagaatgtatactgacttagcataatagtttaggtgtatatgaagagaaactatttttgttttttggtgtcctgctgcagaattagcccattttctgtcacctgcaggagatgtgtaaacataatgaacctcatgctgttgaacaggtttttagagaatgtattatgaatttggttcagatttatagacatccataggaaaaattctgctgtaattataaccttattttgatatggaaaagaaaagtcaaaatagagactttgatcatgttcatgaacatgtacttgaacacaagtattgtaacaatgaaacactgtaatgatttacactgaatcacaattgcactgttgatatagtgtagagaaatcgttagaaatggtgacatcttacaaaaaatgtgtattattttaacatgttatcactagattttagctttttttaaatatttttaacaaagaaaacattgatccacccatttccctgtatctttttagcagatttattaaagagtatagtacttagcctcacgaatcataattagaaaatttactagtatttctcagccttttccctaggaacaaggaaaaacagaaagcatataatacggtggtcgtttcattgtgtttttcttccttttaaaaattaaaaagttttacaattatgtgaaacgttcaaaagccagcttaaaatttttcttgtgagaaaatattatacatgattcacatgatttcttagatttttcaataaaatatgtaaaacttcccactgagagacaattcttcatagacttgtcacatatccacatgtctgatgaacaaaggtactgtctacttttgttctggagtatcttctagaggatgtttatagagtgaactgccttggaagatagtatgtctcttgggagcaaagggcaaacatacttctcattataaaagtttcaggttccctaaaattggggtttctttactataagacaatccaatgtatgttctgaggtcacctggctctcttcatgtcaccctttgggaaatggggctcaacgagccagtacaggaaaagctgattccctggctactactatcgctgtgagtaataaagtcctttgtgtctaatgcaggagtctcatgtcttctaccctgaaatcataacaggctaacttgataagttgcaagtaaggtaaaacctcaaaagcttcacagttctttacatttctgtcattaatatttttcgccttcattttaataaatgtgttttaatatcgaggtcacctttttcctagattgaccattcctatgtaggtcctttaatttaattgctgagatatagggttaaccaatatcaacaaattttatgtgaaatagtagacgaatgggagaaggaaaaattgaaatagtaagttccatcccttgactcctgaatccataaatctaggtagaaatagcaccatatattggttgatagttcagaaaatatacatcttagagaacattatctcagactccaaagtgttttcatccacctggtaggagactaaacctttcttaaaaagacatatcattctgttaggccatctgcttcggggtgatggggagcatggtactatgagagatttacacaacagtgagcccctgtccacactttatttgctgtcacacaagttccttgaacaaaaacaatattgtatgaaatgccctaacagtgagtgagacatttgtttagtccacagatggtattttggcagaagcatcacaaactgggaaagcaaatatattttcagatcaactgactacttctgcaagaacaagccatggcctcttctgtgataggagtctaatgtaatcaacctacaaccaagatggtgtgttgcttctcccatagaagggtaccataatgtcttctctgctattattaggtggaaccctcagcagtgactgtagatagattgaccttggtgaaaataagttcatgttgcttagctcatgcataatctccactcctgccaccattatctctttatttttgagggtattggtcgaggacagaggtgcatggaagagactgatgaacattaaaagaacatgtcatcttatccacctgatgattgatcagtttctcctgagtatgctgtttggtgaacattcaaatgaaatataagtatataaacaattcaaggagttctatccccattctttttcctcagaacttcattattaccagtttttatcatgctcctttcaagttcctaccaaacccattagacacagcccataaattagtgcatatccatacttctggctgttttttcttccagtcaaaataaacagccagatgcacagcttgaattccttctgcgaggatttttcttactaatcattcaggtcacctctgtgcagggttgcagagctacagctgtctactcctggttatgctagcatattgtgaagaaccattagtaaaccaggaccaaatgttttctgtctcagtcaattcgttataataaattctctatgaggctgtgtgggttgagagagtggaggcaatgtagcagtagtaggacccttaaccatcagatccaattattcaaggaacttatgccttcagcttgtgctcaagacaaatcttgtacccttgatgatggagtgatattctgcacaggtaacctgggtggtgtcagacaccacccaggttataatgagcagctcaagttacatgggaatttggtgacctgtggtcaagcattaaacatttactagcatttcaatgcaaaccagaaatagtttttcaaaacagaaataattatttgtaaaaaggacacagctttctccaaagttattaagacctcactgtgattcaccaataggatcctgccagaagctccatataggatccttatgtgccactgattctttaaataccatcatatctgctgtgccatattgcctaaatagcagagtagcttctattgcaacctgaactgattatagattctctccttattctgtgcactacatgaaactggaagtctttgggattactcagtaataatgtgtaaagtagcattctaaaatgagttatacattgtcacagcccaaatgggatgtgtgtctcttaggaagggctagaggcaggaatttgtcctttacttagaagggatatctcaacatgtcactgaattcctagaaattttaccaagctgtgaaattccggaagtttttgaggaatcattctcaaagagaactggcctccccttcattcagggagttgtgggtctgagaatcatctctccaatgaaaactgaaaaagggaatgcaattatctggtatggtgattcatatccaacttgtgttcactaagtatagagatataatggttatataaatcaagaaacactttagtagaatgcccacatatttcagtcctaaggactccctggtcaattggccaataccaaaaatttttgcaggtcaaaccgttactgtcttagtctgtttggactgctataccaaagtaccttagactggctaatttataaacagaaatgtattgctcatggttctggtagttgggaagtccaagatcaagcaccagcagatttggtgtctggcaaggacatgttcatcataaatggtgccttcgttttgtcctgacatggcagaaggggtaaggatgctcgctaaagacttttgtaaggggttacttccattcatgagagctctgccttgtgatttaatcacgtccttaaggctctacctcttagtgctatcactaagtgggtattaagtttcaacacattaattttgtgggggtggcagggggaaccaacattcagaccatagcagttccctttactacattgaatccgctgctccttataatatccatgcacgcatggtctttggaagttaaatcctgtcacttggttcctggccatatggaacttattatactcattaaattctataagatcagttctatggcagcatttcccaacgttattcctggcttccagagaatagccactacagagttctttaaggattccaacgctgccttcaccactgtatctttcaaagccttgattagggaatgccctctgggccctcttggggaatatatttaacaggtggatgaacataactatcttattaaaaccaatcttcctaaatgtatacctttctctatactacattgtagcaaagaagtctggcatctcaactttgctcaatatgaaccactattgggcccagttttcagtcaaactgttagaattactctcagtcacatcaactaacacgttaaatccagaatctctacttaccacacacatatcaaaaaaaattcaagctaatccaagattgtatatcttccatcgtaatctaacatccataagaaacatccccacacagtttatatgactttgcaaaatctcataattcttttagaaccttaaagtacaacctcatcagtcacagtttttacctggtccccttggatcttccaggacttaagtctgagtatggatttagaagacatgacagatagggaaaggtcctgaggaaaatcagcagtacaattaaaaaaggtttgccgtgttgaggtgcctcaacacagtaaagactgtgtgtgtcaaacccatagttaacatcatattaaacagagaaaagctgaaaacttttcatctaaaaatggtaacaatcaaggaagactacaccactcttattcaacatagtgctgagaatcacagccagagaaattacagaagagaaagaaacaaagggcatgcaaattagaaaggaagaagtaaaatttggccctgtttgcagaggagatgatcttatgtattaaaaaaacctaaacactcttagaactgataaacaaattcagtaaaatctcaggatacaaaatcaatatacaaaaatcaatagtgcttctacatgctaacaatgacaacctggaaaagacatcaagaaagcaatcccatttacattagctccaaaaaataaaaataaaataaaatacctgggagtaaatttaaccaatgaagtaaacaatctctacacataaaacaaactataaaacactgatgaaagaaattgaataagacacatacaaatggaaaggcatcccatggccatgaactggaaaaaaataatcttgttaaaatgaccatactcccccaaacaatctacagattcaatgaaatcgttatcaaagtggcaatgacagtcttcacagaaatacaaaaggcaattctaaaatttgtatgaaaccataaaaggcttccatgcttattgcagcactatttacaatagtcaagatatggaatcaacccaagtatctatcaacagatgtatacataaagaaaatgtggtatatatagacaatggaatacagctcagccataaaaaagaataaaatcctatcatttgcagcaacatagatgagcctagaggacattatattacataaaataagcaagaaacagaaagttaaacactacatgcctcactcaaatgcagaagctaaaatatgttgatctcatagaagtaaagagtagaacagaggttgccagaggctgggaatggtaggggaaaaggggatagagagagatttattaaaggaagcaaaattacagctagataggaggaataacctctagtgttctatatcactgtaggatgaccatagttaacattaatatatattttcaaacagctagaagaaaaaggatattgaacattcccaacagaaagaaatgatcagtgtttgagatactggatatgctaattaccttgatctgataactatacgttgtaagtactgaaacatcactatgtaccccaaaaatatgtaaatatgtggctatatatatatgtgtgtgtgtgtgtgtaactattatgtatcaatttttaagataaaaatatttaaaggttttatttcagagcagtcacagaagctttttctgctcccaacttagaccttgaactttaaatctcatcttatcattttctttctctaagttcttcagcacatttagaagcaatgaatcaactccacagtcattattctctttgtttctgtgaaacggttctaatgcagcagatacttggtaactctgcacattgcctctgtagccacttagattatacaggcactaggggtgactataagtgagaatttaaataactgttgaatcactgcatgccatggatggccaggctcccacttacccctggtaatagggtcattcatgtctttaaatctagtcagataagagaaccagtttcaaattttatttttaaagttctattccccggaaacacttctggctggttcagtcagcagagcagtttcagagggttataggataatgtagttgagctcacacaactgtgagaggagatgggaaactgaagggctgtaagaggagttggaggattaggggagtcaccagccaatcaatccaaggagcaggcacagccagctaagaaaaactctgaaagggtagtctgcaaggaaatctatgggatattgttgcctctgtgcactttccttctttataggttcacagccaacatctggtagtgaatctgacttttctgttggtcaacaggaccaacagttgggaagaaaaaacgggtctggagttcaagagagcaaagtcaggctgcagtctgccaggcacatgctgcatctgtctaaaagagactttcaggttaatggatactgtttcaattttgccttcagaatctcatggaagtccctcttttggtcgattctcacctagaatcacacagggaagggggactctgggaaacataattgattttttaactatagattgttaatatggctttaatttttaacttttcccattttagttttatagcagttatacctaaagtgaaaaatacatgttcatatgcactctcaaaataacagcaaacttttttagtgcttaatatatgctgagcattctgttggccactatacatattacatctcacagcaacctttaaggtaccgttaatatctgtttttagctgaggaaaccgaacctcagtgagactcagaatgttgcccaagaacacaatttagttggatctatagaggctccctattacataaatactgtgcattcaattattctaattgccacccttatttaccaattttgaaaatataagaaatgcacaggatttatataacccaatcacagtctttccttgtaatcaaaactatggaaataatttctaaattatctcggtttgatgaaccttgatggctcatctgatcattgaacaggcactggagctggaaatactttcagatatttccactggctttcagtgatcttgaaagctagaaagaaaaaagaaagagagaataaaaggggaaaatgtgaattattaggctggtgcaaaagtatttgcaattacttttagtggcaaaaaccacaattacttttgcaccaacctaacaacagataaacagttttgcctgatgaagctgtatttaattctatttttccaattcttatggttcagaaacaattactatggatgcaaatccatccatgggaaaatggtactgtaatttttttaaatgctgtaaagaaagagcaaatgattagttgcatggtaagagttgagaggcctcagatacccacattcccaccacactgctcttccaatatagtaactctttatatgtgtttataccctacatcactcttgaacaaaggtattattgacaataagggactagaaaccctaagccagtatttttaaaattatgatcaagtaacttatttttttaagagttaacaggaaaacaatgaaggagttgttatgtgatcagataaattttgaaaatgtttgagttaacaaaacagaatctctccaccttcatgatgagcttatgaactataaactaccagaagagaattatagaggatgtcattttgggcaatggaatcctttttttttcactgagtatggttggaattcagattttaaaatggagcaccaagacatttttttaaagtttaattggattatcaactttcaatcatagttaagtcctaatagactggaagagacaacagcaatcattatttattgagcaaagggcttcattagggtcttcagacatgacttatttggaagaggccatgttatagggctgctcttttgtgaagtatcctttagtgtaaaggcccttaaaacaaaaatgtgaaatacagcatcaaacaaaagataagaagatgagagtagaaataaatcactgtaaggtttcaaaggagagaaaaatgataccttctagcaaaaatatgtaaaggttttgtaaaaggctaggtatcagcgatgacccctgaatgacaattaggaggtagtcaacagccacggatgggaaggaaggttccaggcagcagagctggcattagcagagacacaggttctcacttataactgagggctaagaaatgcccacacatggatataaagatggaaacaacagacactggaggctttataaggggggagaaaagaagggggccaagggctgaaaaaccacctatcgatactacgttcactgtttgggtaatgggttcactagaagcccagaccccaccattacgcaatatactcaggtaataaacttgcacctttaccccctgaatctgtactttaaaaagtaaaagcttgatttcctgattttcagtcatttaggctacctacagggatagcaatgagaaataagaattgatggttttggggtaaaggcagacaaaggatggtgggagaagatggagaggctgagacgaaacttgtaagtagaacgagacagtatcgaagcctcgggcaactagggaatgacagaagtattgaaaggaaggatgcctaaggaaaactgaaggctcataccacctacctcatgctttggctaaggaaaaagcctaatcaaatatatttggatctaggttctgtgtctctacttgccaatatagagagccaaagacaagtaaatttcttcttgaaggtgtgtgttattccccaaagaatcttttaggaagagcaagcagcctgagaaatatttgttcattagatatattctggcagcaaccaggaaaatccagaaagtaccaagcacatgcacatacacataatatacttgactcttgaaacacttttggtttcactgttttgttattaactgtcattatgaagtacctatttctttatctagtaaatgcatttataaaaccatccaaacctattttaatattgtaaaacagtgatagagttctggtccaaaacattcttagagaaaatgttaactgcttaattcagttttacaactataagtagggcagatattttttaatacagcccctcatgtttattgctgtgaagaagataagtactctccagtgtcctgcttgattcaagaacaccccggctgctgactcttgtaaggcatatggcactcttctgagatctagtgctgatacattccacatgtaaccccactgcccctggaagagaaactttcctgctgagtcagaggggtttatagagatgtgaaattaacagacaacctatgtcttttagaagctgctaatatatctatcctttgccgtctcacaagtggggaagtttctcctccctccagatggaaatccatactttcccagtgagaagtatgggtcacctaaagcagagtgccttgtaaagagagaacatatctccattaaagtcatcacgacttgctggctggctacaactgcccacagcctcactcccaccaccttggctctcttaacagcagatgggttcacttagaagagcgtgtcatccaaacccagcagccatgtttttttggggttccaaatgtgccgtgtgaacaccaaagcacattgttaagagcatatacagctaggaacagagtcaaggggacctaagatagtgaatgggtcaaggtggtagactggggcactaaattactgtagcaaactatagagcaaattcttgccatttccctccccagaacaaagctaacaacctaaacctggttaggttgcacaagagttgaggctctggaacatgagaagaagcataatcctgagtatcacatgtgaggctgtggaggcagggcctagtcagctgtgttagcttagcaatgttcgaagagaaaaatcaagcactgtctccctatacgtgactgtttcctgtgctccgcattgcgggttgtaacacagattctggcagcctttattcaaacaatagtttcccttaaattgttatttctgactctgaatgaagagatattacgtgctacacatatctaattctgtcaccctattaattgtaatgagtatagccccatctgtttcggtcaagcaccctccatgtacatgtgtgtgagaaaggtagggcagtgtgctgctttgtttctttgtccctgtgcattgatgtatcatctcgagagcagtggctgcgtgcagctgagagacttggtttcagatgcagtcagagcatcctcaggcacattaataatggaggagtctgacaagagcagctttgcctgtctttgttttccactgtaggtgaagggagacatggatctctctgttttgccaaataacaaccatcctgacaaattcctgcagcttgacgtaaagtctttaacgaggagctcagccctccttcaggccagcctggtgaggtttccgggtggaaattatcctgctgcacaacactggcaaaaccttgtctactcacaggtaagatctaggggcacaaaaatacggggatggaggcttgtttctttctcgctatctgccatttcaccatttatgcaacaagaagcctataggaacagagtacaaggtagctgctctgtcttccaacttagtctttctctcttccttaacattaggaacttttctttaatttattcataaaatacatggattctctcattcattaattcccctcctagcattagcttctctgcctatcctcattttagatttcaggtggccctcatttactccttcccttcaaaaattttcaaactaattgttatatgcacaaataagactttgggggaaaaactcccgtccctatcttttggtgtaatctaagcataaagcatcagaagtttacattgtgggcataaacaagcctctaaaacagctggagatcttgcttctgcctcccttagactagctccctttcatagcatacacagaagacttagaaaacagaacaatggaaacctaattattgaagggaaaaaatacagcgaactcgccacttgaaaaagtgctagctattactgtagatactcttattttccacaggtgtccatgtggacaaggaataccaattagaccttcaaacccagtgcaggttttatttctcttttcttttgcattttccttctttttgctgaccaaaagagaagaataaaactgtgatgagttccatcagctggagtaaacataaaggccctaactgttgcacagctaatgaaacagaaataatctttgctttaagacatgaaggctaatggggttaagagttagtcaatttagaaacaggaagaagcatttcattacagaacagatgtgactgacctacaaacccctgcaagtcattaaatcctttggagtggttcaaattccctgaacagaaatttgttttcttttaagaacagttgctactcatgagtcctggtgtaaagtgactcctttgtggtaagtttgtgggctccttgggacctttatcatgagatcattcaaaatcaagtacactcaaatgattatgtaagtgtttcctccacctataaggattttaatttatttccattgtaaggcagcctattatgacaactggcattttttgaattttgcatcaatcactttggtaatcctcaaacccttctgccatttcatacccagccatcttgttgttgttgtatttgtaggcgttctttttttaagttttaaatgaaatgaaatgaaatgaaattgctcctttttcctccttattgtttatatcacagaataaaatgattcaaaaatcagttcagaaaacttggcccttctatgctatgcagtttagtctaagaaaacatatccaataaattcctttgaggttggaacacattgatctaacatcttttgtttggtactgaagttgacctatttccttcatgtggaacttcacagtttaaaactctgttgaatgttgttcctaaacctaaatgaaatgcaaatttttaaaaggcaactttttctacaggccccattgggtggaaatagttattcaaagaaaaaccaaagaggtaaacttctgcttcataggtctttgaatatgtgttgttaatcattataaacttcaaataaacttgatttaggtatccttttagcctaagaagaaatgttaaatgacctagtgaaggccagtgtactaattggccaattattaatgcatggagtggagaggcaggacatcaagtacaaattcaggtaatcaggtagatgtggcacaaagtatgagtaacaacaacaatattcaccacttcactgtgcaatgcatcattaactaattctcttttggggatagatcttaaaatccatgattgatatattcattggataaaacaataaatgtcatagaaatggccatatagaagttttaaatatttgccatgataccacgatagcatgccatgaaagaagacactgaatatgcaggtacactgaggtgttgggcacacataaggtggtggctaccaaatagttcttaatttaaagctcacactccattggggagtcagtaagtcaatgggaagaacatggaataaagaagttagaaacttggtttcttatctcaaattcacaataaaccagttttagagacatctgtcatgacccttaattcatgcctcagtatttccacttgcagtattaggataatatttattttccatatttccttaaaagtgagagcaaatgaaacatgaagtaaaagcaactgagagccagattttcctataaaagatcaagaatatgtatggaagtatgtacatatgtattgttatttataccagtatttcaaaatgtattgaagttatcctttcattagaatttattagcagataattccatttccattattttataaatattgtggatgaaggggtgagtgtatatgtgtgcacgcatgcacgtgtgtgcacatggtggttgaggggatgtactcaataaatacgtcaacctgcgtgactaaaccaagcagtagatataataccacatgaaatctacacaaactccagagttgtgtcaactgatcctttcatcccacaccacacaagtgcatggtgtttaggatatagactaccttaccgaatggcaaagcacttaacctgcagtcattaccttcaaactcggggtaactcagcagttaaaacagagattccctagatttgaaatgtcacattgaattcttaaatattggtatcattttattatcaatgacttatcatctaacttttaaaattcactttccatttgcagaggaaactctcctggtcatttttatatgagctaaagcaataccattcaatctattttttttttctttctgagacatagtctcactctgtcacccaggctggagtgcagtggcacaatctcggttcactacaacctctgcctcccagattcaagcaactctcatgcctcagcctcctgagtatctgggattacaggcacccgccaccatgcccagctaatttttgtatttttagtagagatggggtttcaccatgctgaccaggctggcctcgaactcctgcctcaaggtatccatccaatttggcctcccaaagtgctcaattataggcatgagtcaccatgcctggcctcaatctaggaaaataagcagtgatggtctcagttgattcagtaaccagggacattgtagttcccatctatgcagatactcaggtctcccatatttgcagagagtatacacagatattatttgattctattatatttatacttctccttaaattctttcaccagagaaataaagaagcttcacaacaaattttatgtcagtgtaatgaagaaacattcaccaaaatctaatgtttctacctgttagattaattttggggatgtttctgatgaaggcatttagaaatgtattccaaatatttctgccaacccctttataaaacaagtaatgaaaaaaggctgatttttttaaacaaatgtgataaaataatgtgtttttcaaacaaccccatcaaaaagtgggcaaaggatatgaacagacacttctcaaaagaagacatttatgcagccaacaaacgtgaaaaaaagctcatcatcactggtcattagagaaatgcaaatcaaaaccacaatgagataccatctcatgccagttagaatggtgttcattaaaaagtcaggaagcaacagatgctgacgaggatgtctagaaataggaacgcttttacactgttggtgggaatgtaaactagttcaaccattgtggaagacagtgtggccatttctcaaggatctggaactagaaataccatttgacccagcaatcccattactgggtatatacccaaaggattataaatcattctactataaagacacatacacatgtatgtttgttgagtcactgttcacaacagcaaagacttggaaccaacccaaatgtccatcaatgttagagtggataaagaaaatgtggcacacatacaccatggaatactatgcagccatagaaaaggatgagttcatgtcctttgcagggacatggatgaagctggaaaccatcattctcagcaaactatcacaagaacagaaaaccaaacacggcatgttctcactcataataggaagctgaacaatgagaacatgtggacgcagggaggggaacatcacacatcaggacctgtccggggtttaatggcaaggggagggatagcattaggacaaatacctaatgcatgcagggcttaaaacctagatgatgggttgatgggtgcagcaaaccaccttggcacaggtataactatgtaacaaacctgcatgttctgtacatgtatcccagaacttaaagtataatttaaaaaaattcaaatggcaagaaagaaaaatgtgtgtcttttttttttttccatttattgtggtgggccttaattttctaattagcagttgcacgtcagaatattttcagactaactcctttgttatatcttttcctggcttctgtcacatcagtttcagaatcaaggagcattccagactaaacccgtgagatggagggaaaggctaagggcgagaggctgctcttccattgatttctagacaatgtcatttactgaatttatttcctaatcacctttctgcactctttttcaattcagtcacactcttttttcccataaatttcaatgtctttcctttttatcatgggtttttttttgtgtataattgtatttcttctgtctctgaacacacgtcatgccttcctaagactgtctctattttcaatcttccatttattgttttgaaaaaaacagtgctggggccgggtgccatggctcatgctgtaattccagcactttgggaggctgaggcgggcagatcacttgaggccaggagttcaaggtcagcctggccaacatggcaaaaccccatctatagtaaaaatacaaaaattagcctcccgtggtggcatggcctgtaatcccagctactcaggaggctgaggcatgagaaacacttgaagctggaaggcagaggttgcagttagctaagatcgtgccactgcattctagcccaggcaacagagcaagactgtctcaaaaaaaaaaaaaaaaaagtcccagcactttgggaggccgaggcgggtggatcagcaggtcaggagttcgagaccagcctgaccaacatggtgaaaccccgtctctactaaagatacaaaaaattagctggacttgctggcgcgcacctgtaatcccagctactccggaggctgaggcaggacaatcgcttgaaccggggaggtggagattgcagtgagctgagatcgcgccattgttctctagcctgggcaacagggtgggactccgttgaaagagagagagagagagagtgagagcgtcagagagagagagagacagagaaaggaaggaaggaaggagaagaagaaaaagagaaagaaagaagaaaaagaaagaaaagaacaatactgcacaatacaatcatttctcctttctaagcttatattggatgacaatgtggtactttgcaggtgcttatattatctacgaagtagattgatagcatcatcaagttcttcagggtaccaagttgtactaaatttataggattagggaattggccacggatggtatatttccaaaaagaacacccaaattgctcctccaaactgttcttagttgagacccaaatgtctctggcatgaaagcctatattaaaggtaccttgtatgttataataccacctgtgagcacaaagagccctggttatctgcagggaaaggcaggacataaggtttcagagaagcctgaatcacaccatggagggtccatgggctttgtctaagattttgaattttaccctgaaaattttgaagaatcagtgaaaaatttaagcagaagaatgacacaatcaaatatgtgctttagaaagctttccattctagcaatttaaaacaaaaattttgtgttcacaaaagagctgattttctgagaaagtgtatgtgctgacatatgaaatacatgcaaaatgccttcttttcactaagattatgataaggattacactgaatgcatagatcaaaatggagaaaacagaaatctttatatgaccttgattctctcaatccatgaccatgatgtatcgttttattttttcagttcttcatatggccttcgataatatcttgtaattctccacacaaaactattccatataatttgttaggtttacatctaaatacttacattatttttctcttggtaatagtaccttttaagtcatgttttataatagagcattactcatgcatactattgatcattatatactgattttgaatccagaaagtgtgttaacatctattttgcccataaacatccctgtagataatcatgtcatctgctatttgtttatttataaccctatttcttttatttacttatgtttctattctttttgcattgctttgagcttccactgcaaaattatatggacattgtgattactagcatccttttattaattctgaaactaaaataagtgtttctaatattaaaccattaagtaaactgtgttctgtaagtttggggcccattcccttaattagcttaagaaaattttctactagttctagttcactaagagtgtttgctttaaatatgtttgaatattttgaaagtctttttctgacctattgcaaaatttaatgtttttttcctgttaatgtggtaaatttcattaatattctaatattaaaccatcctgttggtataacatctttccctggtaaaaatctgttttatcttgttacatataatttgtacatattgtaggattctgttcagcaatattgcatttataattttacatttatgtgtataagagaaattggcttatacttttcttttactgactgccctcatctgaagtttatactaacttcaaaagtgagctggggattgttccttttcctattttctggaagaatttgactaataaattatatattttgagaatggtagaagttgactgcaaaaccctctgacatgctgttcttaaatgtgtgtgtttggaggaggtttaaaactattgattcgactagtcaaattatcacaggtttgttaattttttttttagtttttcttaaataagtttggtaagttatattatgtaagaaattgtccgactgcacataaatgttttaagtcgctcagattattttctgattgtttcttaatttctgctgtgtctcttgtcaagtcccctttacattcctaactgggtgcatttgtgtctctattatttttcttgagcagtattgccagagatatttcaaatgtgtttttccaatgaaatagctttcaactttgtttatcttctccattgtatatatttattccctttaatatgtgttgattctgtctttacatttatgattttattttgactgttttattatatttattcaatggctttatttttaagactttgaattcaatgcttaataccttattaattttctcattctgctttataatgcaagtatatatgcccataatattctctcaaaataccatttcagatccagccaacaattttgtaatgtagcatttctcactttcattctgtcctaaattttaaaatgtttattattatttctttgaaatgtatttttaaatgtcagcagaatgttttattttatgttgttgataatgatttctagatttataactaagttgtcaatggtcgaaaagcatggtccaagtgattttgagtctttgaaatttgttttggaatttaacatgctatcaattttataaaattttcagtatatatttttaaaataagtattttcaattgtttaataaagacatccatatatgtcacttgaacaaacttttgattttatggttcacatcttctttattcttttttttttccataagttattgaggtacaggtggtatttggttacataagtaagttctttagtggtgatttatgagattttggtgcacccatcacccaagcagtatacactgcaccatatttgtactcttctatccttcacctcctcccactcttccctccaagtcctgaaagtccattgcatcattcttatgcctttgtgtcctcatagcctagctcccacatatcagtgagaacatacgatgtttggttttccattcctgagttacttcacttagaataatagtctccaatctcacccaggttctttattcttaatgattattttgcatgcttgagaaaaattacatgtataaatttctctgtgtaattattttaagttttgttttataaatgttgagactattttattagatgcatacaagtttagaatgacaatattttactaatgttaactaactttattcattttctagaaacattctttatatctagcaaagcttttgaccgtgtctattttgtctccaaggatcttgccaggaattttactggtcaagcttgagtttcattaggtttgctgagtgtctagtaaggctttccacagtaaaaaaaaaaaaaaaaaaaaaaaacacacacacacaaacatatatgtatatacacacatatatacacatatgtgtgtatatttatatataatggtatatgaatatattatatatgccatatgtatcacctaatatatatatatatatatctcatcacatatgtataatcatcttctgctatatagagcacattcacaagagtcctgagatgtgtgtagtgtcacaaaaaaagaaagtgagccaaaatcttgtgaaagatttcaagggccaggcttggaagtggtctttcatccacaagtcaatggacataaaacatgtggccccaatataaaatcagaaacagactgggaaaggcagatatcctctgtgcttaggaagtggaaacaaaattagcgagcatttagtcagtcacaacacccagttctcaatgtttacatttgtctag

SEQ ID NO: 5654 - DNA, 479295 bp, Homo sapiens
  SGCD gene - 155686345 - 156125639 of chr5; NCBI Entrez Gene ID: 6444; Build 35; sequence includes 20,000 bases upstream of initiation codon and 20,000 bases downstream of termination codon of the gene
gacagttgttcaatttcgtgttcctttgtggcaggaatgatcaccagagggtcctatttggccatcttgctctgtctcctttcctatgttcacatattttaataggctattattaggcacataaatttttataatcatcattttcttgctgtattgaaacttttattaatatataatggcatttgtgttttgtgaattcttttgaattaaaatccattttttctgatattaatataaccacctgtggtgttttttggttgctatttgcacagaatataagttttcttttttttttttttttttgatttagagtctcactctgttgaccaggctagagtgcagtggcacaaacacagataactgcaggctcaacttcctgggcccaagcaatccttccacctcagcctcccaagtagctgggactataagtgtgcaccaacatgcccagctaaaattattttttgtactttttgtggagacagactttgaccatgttgcctaggctagtcttgaacttgggctcaagtgatccatccaccttggcctcctaaagtgctgcacagatgtgagccactgcacctagcaaattttctatctttaaaatgtcaacgtatttgtgtctttgaatgtcaaatgtgtaaatcagacagcataacattagatcacatatttaaatccattctgccaatctctgtcttttttattagagaatttaaatcatttacatttcaagtaattgctgataagcagatactttggtcattttgattcttcttgtctgtatacattttaactgttgttttttttttttttttttttttttgccttattacctgaatttgtgtctcgttttgtgtttaactgattttttaaaaatagtgaaaccatacttagatttctttctcatttcatgttattctttaactattttgtttatagttaccatgggaattacatttaacctcttaatattataacattcctattttaatttatatcaggttaacttcaataacacaaacaagtctgctgctttaacagttctgcccccactctttcagttgttgatgtaacaaaattatatattttcactttgtgtgtttaagaaacataaactgataatcttttaatgcgttagtctattaaactatataaaaatgtggagtgaaaaacaaatgttacaataacactagcttttatactaattttttaaaaaaatatattattttcctaaatcatgtaggaaacaaaaaatgaagttacacaccatttttacaatagtaccaactttcctaatttcccttgtatttacctttattaagaactttatttctttatatgctgtattagtccattttcagcctgctataaagaactacttgagactgagtaattcaaaacgaaaagaggtttaattgactcacagttctgcatggatggggaggtctcagaaaacttacaatcgtggcggagggcaaagggaaagcaaggcatgtcttacatggtggcaggagagaaagagagcaaagggggaagtgccatacttttttttttttttttgagacggagtctcgccctgtcacccaggctggattgcagtggcgcaatctcggctcactgaaagctccgcctcccgggttcacgccattctgctgcctcagcctcccgagtagctgggactacaggtgtctgccactacgcctggctaattttttgtatttttagtagagatggggtttcaccgtgttagccaggatggtctcgatctcctgaccatgtgatccacctgccttggcgtcccaaagtgctaggattacgggcatgagccaccgcacctggccagaagtgccatacttttaaacaatcagctgtcatgagaagtcactcactatcaagagaacagcatggggaaaatccacacccatgatcccatcacctcccaccaggtccctcacctgacatggggggattacaatttgagatgagatttgcatggagacacagaactgaaccatattgtaggccttcagtgtcctttcatttcagcttgcagaattcccttttatatttttcacagagctggtctagtgataatgaaattgctcagcttttctttatctggggaaattttaattttttttctcacttttaaatggcagatttgtaaaatattacatacttaggtaacagtatttttttttattttagcactttgaatgtatccgcccactaacttttgatgagaaagttgctaataaatttattgagaatcccttgtatgtggcacattacctctctattgctgcattcaaaattctctttgcctttggcttttgacagtttgattgtaatttctctgtgtgtgtcctttgaggttatctccttgggttcgttgagcttcatgaatgtttatattaatgtttttcatcaaatttgggaagttttcagccactatttcttcaagtatgttttctgccctgttctctctcttttttccatctagaaaatgatgcatatatttatctgcttgaagatgtcccacagatcccttaggttctgttgacatttcttcaattattttttctttctgtgcctcagacttgatcatttttattggtaaagtctattgctatattttcttcaaaattgctgattctttcttctgcttgcttaaatctgcgttttaaattctctagtgaatttttcatttcaggtattatacatttcagtttcagaattttattttggcttctttttaagttttctgtatttttattaatatttctattttgttcatacataatttccttgactttcattacatcttcctttagatctttgagcatttttttttttttttttgagacagagtctcgcactgtcgcctgggctggaatgcagtggcgtgatcttggctcacggggtttcactatgttggtcagactggtcttgaactcctgacctcatgatccacctgcctcggcctcccaaagtgctgggattataggtgtgagccaccacgccccacccgatctttgagcatctttaagacagttgttttaaagtctttgtttagtagatctgccatcaggtcttttttttagtgatattttctgttgttgttgttgtttttctttctttcaaatgggccacacttccctgtttcattgtatgtcgtataattttttgttgaaaaatgaacatttgaatctaataatgaggaaaatctggaaatcagattctcttcctcagggtttgctgccttgttattgttttgctttaattattacaggctatttttgtacccagaattagcataaggtgtcaacttaaggtctttttaagtcttttctgagcctgcaaatttacctgggcatgcataatgactttctatatcctcccatacatgcagttgcttttgaatttgaatatcctagtctttaatgcttgactcccaatagtacgaaaataaaaagaaatataaagttggtggcgaggcactggtcttttacatcccttggaagtcacttttgtcagaggaggaagagcttgcaacactggagggttgtgcaacagttgctgctgtctttttgtctgcatctctgtgatgatagtcagaacacagacttcttgatatttggaagacaggctcctttttgccggtcctggctcctgaaagctatgtgcaagctactccatgaacatcccgccagtgtgctgagtagtcaggggatgggtagctgctactgtgttaagagctgaaattgaccaaaattaaccacagtttactgttcaaccctcccctggaaatagcaagcctttagtagactccaaaataattacatcaggcagattctttcagtgaaattattgtctagttgaggagaaagatttctggtgcttcttaccttaccatcttcccataatcatctttctctatttatttttgtgtgaatgaatgaacagattatttgagtgcttgatatgtttcagacacttactatgcaatccagtgttcaaaaataaaagagagagagagagacaatattcttgctttcatgaaatttcacttccctggtaagagacaaacatataaaacagtcacaaaactaatgacttgtaattctacagaggagtacagggtttggaaagcataccaggggacatgctagtgagtggcaagagaggaagcttcccagaagtgtcttgtagtgtcaaccaggtaaagaggagcagtaaaaatttctagttagagggaacagcatctgtgaaagcctaacattggaagaaacttggtgagtttaagaggtgaataaacagagttgtgttaaaggtggatgaaattcaagatgaaaaaaatgttttgtataaagtggtttttaccaactataaaatggtttttctaagaaatgttttcctttctctccaattctctgacacctgctattttaccactccctgcttgagactagattccctgctgtcttaaaatctgtcatttcatatgaagttttgcaatcctagccatagatatgctatgaaagactcaatgtcaccatgagatagtgtggttattgaccccgaacaggagtggtcatttgattaggcacacaattagcaaggagactatggctttttaatatccttaattttttctatattgcattggttagaaatctaattggtttactaaaatgatatgcatatatagaagtaaatctgttttaaaaattatcaaataaaaaagtcttatacaatcatagaatacagtatcttagaataagagtcttataaagaccttaagatatgacctacttgaatatgttcttcagcaatgtcttagggatctacacagaggaggggaggagctggggttagggcagggctctgtgctccattaccctcctctaccagcagagttctaatcatattgggtttctgtatttaagttctatacaatgtcaacatcagttgaaaaatctttttttctttcataaaaagtttggaaaacactcacctaatatcatagttttacttagtggtgtgctagacccagctcttacccactgatggaaacaaaatgagcttatttcttctctgctccatgtttgctgacatcatgttagttatttgaagttagcaaatgctacaaacagagcttttatattttttatttttttcttgagagccagtgtattgacctatagttacaaatgaatgtaaagtaacagttccatgccatagctagctaagggcatgagtaggaaaagaaaacagatcttctgacccctattccagggctgtttctgagatacccagtatcacaggaaggcaaaggaaatttgcacttgttgcatgcctacacgtaccaaaggtactcatgtaggttaggtggttttattctcacaaagactctgagaagttagaattctgtctccatttttcaggtgtagacactagtcagaaaggaaattttttggtcccaaaacatttatttattgagtggcagggccacagttctcagatacatagatccagctttttcccttctaccatactgacatttattttgtgaccttgaatgtcacttccttgaacataaatttctttactgatatacttagaaaaaggtaatccttagctaccacatagggattctaaaacccaagtgaaacactgtgtgtgtgaatacattttataaattacaaagtgctattaaaattacattagtctattactcatataaaatattaaatcatgacaccactctgcttcaattgcatattcattaatagcaatgagaagcagtttagcatagcaattaaggacacagactttatcatcagacaggcttgagttggatcccatctttatctcttacccactattccactatgtgatttggggcagctatgtaacctctctgtacctcagtttcctcatttataaaatggggataattctaactcctaactcgtagaatttttataaagattaagtaatacatgaaaagcatttaacatggttccaggtgaagtgttagctcttaagaaaattagttggaattaggatcattatcttactcactgcactcacttaaccagccccataagaaaattgtctcagctccctatttcttacagacactggatagatgactattcgtttattttttaactaactttgagcttaatttgtttacaaagcccttgacagtacttctctttcaatccatatttgttttgttttgttttctgattttctttcttctctcatcttctctaagccatctgtctcagaactgtggaaatctagctttgtccctcatggcttaagcatgcttttatttgcctcctctttcttcttttccctctgccttcttgtcttccttgagaatttgttgactgacatcacatccatttaacaaataatgatgagttaatgattcacagtgcttgaagtttcatatggtaaaaaaaaagcctgtatctttcatcttaaaagctgtgaagacatttctcttaaattttaaaagattcagatttaaaagagaattttaaagttgtacataatttgtacttgatttctcacctttttttgttttctatttctttattttttctgctttttctctggaagtagttgtcaacatcattttttgattttgtgtgtgtgaggtaaagagagatactgtcattaaagcagctagtacacagtgagtacttagtaaatgttggctgctatggttatatgtaaatattatgctgataaagacagcctgtgcatcttctccaattctaaccacaaaacattatatccataagggtaaagtctcctgaaataaatctaagtacctccgaatgtctgtgggaaatctgatttaaggtagtaaagctatctgagtcttaatagctgaaggagtttgttacttaaatggctagtttgttggttcataacattttagggtactaggatcatagtctgctgaagtggtaggtatctccattaagtcaatgccattaacaatttattccttcttgaatgtagactccacaattggaattttagatttcgctactaatgtgtaatttactctggaatttgtaaaaatgctgttcattttagcttcctgaaaatatgcataaaaatgcagcacaggccgtgacatctactttttttcaattaagtatttgggtatcttttctattatcacctttttatacgtcctgaaaatcttagcccacaattcctgaaaatcttcagaaattgcaattccatgatcattgaatctgtgataagatggttcatgatccctatagttacacacaataaagagcaaagagtgcttagggaaaaagccagtttagtcaaaaatataaaattaatgaaacataaacaaaaggccaaatctataggagggtcactgtattggtgaggtttattccagttgaacgttaaggatgtgatgttcgaggctatactaatcagtatagctgtttaaacattttctgtcttgtgaaacttagtctataaagactaaacctgataataaaatttagatgtaagctgcattggttggtaagcactttaggtatttaggcagggcataaagtaaatacaaaatttaagattaagatttatgagtcaaaattaactataatatagacattgcattatattaaactgtctattctactagtattataattaccaataccatcattttgggtacagttttctggtcttctctccatcttttattccatcatctaacaattattatagtgtctactccagcctaggcagtatgctaggcgttggtgaacacagatgaacagaacagacactgtgcattgttctcaagagctgacagtctagctgtacattcagataaactaagtgacaacaataaataatggcaagtagtatgaaaggaaaatcataagattttggtagagaacatagcagaggacttaacatagaactgggtaaagagggaagagagggaagagaagtcttgtggaagaagggacctgtcagctatttccttcagcagttatacaggaggcataaggtgcattccattcagtgctttataattcatattagtaagactacggatttttttcagttacattactttttcccctagcttcattgagatgattgacaattaaatatggtagatatttaaagtgtgcaatgtaatgatttgatgtatgtatatgttgagaaataatcaccacaatcaatctaattaacatagccattacctcacatagttaccattttttctgtttgtgtggtgggtacacttgaaatctctcttagcaaattccaaggacagaaagcattattattaattacagttaccatgttgtccattaagtctccaatacctattcattttgtatgggattatttgtactctttcaccaatatctctccttataccctacctaccacccccttgtaaccaccattctactctctgttactttgagtctgattttttttttttagattccacatataagtagaatcatgcagtatttgtctttctgtgtctggcttatttcacttaacacaatatccttcagatttatccaggttgtcacaaatggcagcaggatttaccttgtttttaaggctgaacagtattgtactgtgtgtatcaatcacattttctttaaccactcattggttgatggatgctcaagtcattttcattttgtgactattatgaataatgctgcaaagaacatgggagggtaagcatctcttcaagatagtgatttttcctttggatgtatacacacaagtgagtttattggatcatatgatagttctatttatatattttttaggaattcccatgctgtttttaataatgatcataccaatttactttcccatcagcaatatgcaagggttctcttttctgtacatccttgccaatgcatatatatattttttgtctttttgatagtagccatcctaacagatgtgagataactcattgtgcttttggtttggatatccctgatgattaatgactttgagtatgttttcatgtccctgttagccatttgtatgtctttgggaaaatattcatatctttgcccatttttattcagattttttcttaccaagttttatgagttcttaaatattttggatattaaccccttatcaaatatatggttttctagccagagcaattaaggaagaaaaaacataaaagtcatccaaatcagaaaggaagaagtagaactgtctctgtttgaggagtgtattaacttatacgtagaaagccctgaagacttcatcaaaaaaactgctagaactaataaatgaatttcataaagttataggatgcaaagtcaacatacaaaaatcagatgagtttctctacactatagcaaacttcccaaaataggaatcagaaaaacagttccctagcatcaaaaatataactagaaataaatttaaccaagaaagtgcaatatctatacactgaaaactataaaacattggcgaatgaaattgaagaagacataattaaatagaaaatagcctatgttcataaattggaagaattaatattgtcaaaatgtccatattacccagagtaatttacagattaaattcaatccctaccaaaatttcaatggtattttttataggaataggaaaacacaaaaataataggaatcacaaaagacctcaaataactaaaacaatcttgagcaagcagaacaaagttggaggcagcacactccctgatttcaaattatattgtaaagatattgtaatcaaaacagtatgatacttgcataaacacagacacataagccacatggaacagaatagtgagcccaggaataaactcatctgtatgatgtgtggtcaactattttttaacaaagatgccaagattacataatggagaaaggatagtctcttcaataaatgatattggaaagttcagactttatcctgtgagagatgggaactaagagtgaaacctacactgtctaaagattaaagagtacattgtcaaagggctgaatgagggagattggaggcagagacagtaaatgattgtccaacccagatgattgataatagaggcctggattcaattagttttaagagaggatccattgaagaattgttattgaacattgttttcttacttaggaaataaactagaatgacatagttttgctatctagagttacaacaatgagtctggtctgtaaatgtaccctctaaatcataagaattaattgtgataattaagtcactggaaaatggcaaaaataagggtagaatttggttggctttgagtgtaaacacttgctaccaaagcgtacctattctgaatctatttaaatatcaactaatggggtggctcacaaaatagataatttagtaatatctgctaatatttgaagatttggtatgtaagagcacaataagcactcgatgcatgttaggtatggttatgtatataagagccacttttactgagattattttgttaaggccttgcacaaccataggagatggctgctgttctactttacagaggagaactcagggataagacagtttaataacaggatcttctgatgaagaagacaataatccagactgccaaattccacactagagccaagaaattctaacttctacaaatcacaaacatgatcgcaatttcaaaagttttgccttacacagttttccataactgaaggttaagaataccttcaggttaatggtgttaaaactaaaaggctatagtttcaaaattacataaagtattcacatgatgtgttgaaatgcagtgaactccaaaaatctttccaaaaccccaaatatagtttttcagtgtggaaatgttctgtgttttgattttgctcttaaaaagcagaaattgtgttgatactaatcatgtcactacaaaatgatgtttgacttcatcttttacgttgagctcaagtactgctgtggctcttgtaataatagaatattaaagtgtttctttaggataaaatactgatgtacgataagatcttagtgagagaggatgaatgaagtggctcaacacccatgatctcttataaatgtgacaaatggcatgggtagagaattgacccatttatctaactgtaaacccttgccaattcattattctatatgctatgtctgggaatttgaagatattatagtagttatttatgagcaagtctctttccttggagttctcacagaatgtctttcacaagttcagtgaagagacttagaaagctgattctatcaactcagcaagagaggttctatctctcaatgatagactcacacattaaccaacttcatgagattgatgtctaaattagaaatacaaatttttaaatttagcatgagaaatagtatcacatgcataggaatagctaaatcttctcttcctctaagaagatctatgcaacaagaaggaacataatgaaaaggataattaatgcatttaaactcagaaaaaggagagttagataaaaaggattctttaatggcagcaggctaagtcagcccaacaggtataattttgtcagtggtactagagacagtgaaagtcctccccacaaagtcttgtaagtaccttgaggataaggaccctgttttgtatctatcatatctccaatccctggaacagaccaaccactcactaaatatgaggagagttcattggctaagactcctttattcagtgcttgaatgaactcttcgtacttttttatggctctcattccttctatgcatccatgaatgacctcttttttttttttttttgagacaaagtctcactctgtcacctaggctggatggagtgaagtggagtgatcttggctcactgcaacctctacctctcgggttcaagtgattctcctgcctcagcatcctgagtagctgggattacagttgtgtgccccctcgcctggctcagttttgtatttttagtagaaatggggtttcaccacgttggccaggctggtctcgaactcctgacctcaggtgatccgcctgccttggcctcccaaagtgctgggattacaggcatgagtcaccgcatttggcctcttggatgacctcttaaatggcacattctttcgttagatgtgccagcatagttgagttggagtctgatatgctcatcaagtagccaatctgtctctttatgctttttatttctgtttttgtcaatttctttctgctttttggcggggagaatcagggcatgccaataaagcccctatgtgcattttacatgaaatatatttctttgtatctattacatcagcactccatcctaagatacgatataatgcagctcagccagactggcccagtctgttgcttctaacagtttctgctaattatgagagatgaggctcaggatgttaaaactgtgttgaagttgatcaaactggaagccttggggaaaatcccttaccattaaaccctacaatccactgaaaatacaggaatgtttttcttcaattcattccagcagatatttaatgagcacttgatctgttaagtgcagggttaaaggcaaatgagaccatttttgcctgcctttaacttggaataacattctgtttttggactcatattttaattttttaatagccttatctatttacatttagtgtttattcacttaccacttaggaatgctaaaaaggacttcctcattgcttaagaagaagtaaggagagaagtaggtaaccagataatgcatcttgaaacacaaattgtattttaggaagtgaagccccagcagtaatttcccatagtgagtgaagaggtgatacagtgaatcatctcctagaatcacaatctttgccctacgaggcagctaggtatcagaaaatgggaatcttttgcccaattcctctattacctatctgtgtgattttgaccatatcacgtcttcttttcagttttcagttgtctcatacaagtaatgaaaaggttggacttgatgacatattatttccttttacatcagaatacgctacagctcaccagttgagagatttaaaattatataaagttattttctctgcaatccattgcggaaaggatatcaggaattactagcaatgttcattattagtgaaataatatttatgaagcaactactatgtgccagccactgtgctagttgtggatttgctcaattatgtctctttcacatatctaataaaccccttataaagataaatcatttgaaatgtataatgatgaattatttgtctttgacagcctttgatatgtgtgtgtgtgtgtgtgtgtgtgtgtgtgtgtgtgtacaattgttgggttttagggttggattttgaggcttggtctttagtattaaccagcactcctcattcaagaagtttaccattagcttggaattcctgcacccatcagttgtgtcttgtaccactgagcactgatatgattgcaaaaataaagatgagtgatgctatgcattttttaagcacaggtcttatttatttctgccagtaactatggagtgcctatcatgtagtctagcttccttttattgatcaataaattttatttccaaataaaaatgtgatatttcaagagcttacttataagaagctataatgcaataagaaattatggaccagaaagaacgttaaaagaattggtcagtgtttttcactgaaaagaaacagaatacatggagccatctattcagctctatcagtatttgctttgtgctctttaattaatttcttttaaaaaggtatgtttgcaatacatttcattactaatcacactaaattaattttcaaatgtatgagttccttctgaaagtaatgacttagtttgagaatccctcattgtgtaccatgtatatatttgaatttccgaaacagaagatgacttcagcttagacgctgtgtctggccaatagagatattctcaaaatgtttgggtcactgttttgtcactgagccaaacttcctggtccagattcattccacagaaatgtctcttcaaagtcagtcagataattttgcccttggccatggaaaaatagcattggatttactctgttttgaagagccagagcagagtgagtgtcacttcccatcaggtattatttatgaaatgaactctcaaatgaaaggctggcatcgtgctactgccctaatcatctgccattagtttaagtctaactcaactgttttgggctttcatagaataaataaatacggtttctatcctttgcctaaatattgcctcataatatttctaaaaaacaaattaaaaacaaaaacaaaaacaaaaacggctgggcgcagtggctcacgcctgtaatcccagcactttgggagaccaaggtgggtggatcaggaggtcagaagatcgagaccatcctggctaacatggtgaaaccccatctctactaaaaatacaaaaaaattagccaggcatggtggtgggcgcctgtagtcccagctactcgggaggctgaggccagagaatggtgtgaacccgagaagtggagcttgcagtgagccgagatcgcaccactgcactccagcctgggtgacagagcgagactccgactgaaaataaataaacaaataaataaataaataaacaaataaataaaaaaccttctctgggcacgatgctgaagtgagtctttggtattttgtcatccataatccacctgatactttaatctacccaccaccttttctcaatttcctaataaccctacacagccattctggtaagatggaggtgaccctttctttttgcctccagggttgttataggagccaaataggatcaacatgaggacaccattctcctggtcacatggatgagcatgtggctcaatctggaaaatatctattttcccagggaaagtgagcatgtgactaccaatgggtgtcttaccacccaaaggagagagcaaaactgtgggtgaagcctagagaagaagagggagatagagtcttgattacatttcaactgttactcccagtcctgccttcacatccacttcttggctttacagttttatgattgagtacatctctccccccatcctcttttttccttaggctaatttgaatgagttccatctgctgtaaccataagggtcccgatgaacgcctcttttcaggcttttgctgtaactgctctgtggccctctctgtatgaccttactgtgttacatcagactaccccaccctccaccccaagtcagtggcacaacagaccacactccctatattcacagcctagcttgtatttcaggccttacagattttgcctgacaactgactcggtaatttctcacaagtcttttggataaatgtacgaatggcttattagtttttgagattgtttacatcttatgagacaagttggtttcctagtacaatacaatattttaacaggtcagaaagagtaaatgagatctaaaaagtcaagatatagaaagttgggttatatgcatgttcctgtacttggattttttttttaaacctgcatttacttacttaaaaatatctattgtgtacttcctacaagctaggcatggtgtaaggagtaagacacaacctggggaaagcaggctgggtctctgccctcatggagaacattgtctctcaggaaagattgacatgaatcagataaaaatacaaatatgtatatacaactaaaataagtgctagtctataggcttatataacaggggactgttgggtctcagggttcagggagaaataaattctagaggaagtgataatggaggttacatttaaaggctgaataagagataactgcatgaacacaggcaatttctaggaaacagtaatatctgtccagaaggtgagaacagcttttcttcaatctcctaaagtggaaagatacatgatttatttgaaggattagaagaatgagggagtggcagcagatgaggctaaagaagtgtgtgacagaccagttgagggttgctgctgttcccttttaggcaatggtcagccatttaaagatttgaggtcaaagagttgtgcaatcagatttatgttttaaaagatcctgtaacttagtaatcttaagtctggctcacattggaatcatctgaggggattaaaaaatactgttgcctggtggccatctgattctaatagaatcaaaacctctggggtgggaccctggctctagtcagcttaaaagctaccccaggtgattctaatataaatctaggcctgaacatcatcgacataaatgttgtgggagatgaggttaatactagcacctgtcatagagtggtccaagctgacatgactcactatgactccaggttactacctccaaacctaatatgttcatggattgcatcaatagaagtatagcttctgaatgagagaaggagttgttcctcctctctttgcgttagatccagtgtacctgcaaagtttgttcacttctcagcaccacactcaaggaggaaattaaggaaactgaaatattcccaggaaaaaagccaatcaggtgacaaagggaatctgaaacacgatggagagaaatggtcgagtagctccagatatgtttaatctacagtaaaaatatcctttgaaaaggataatgtaggaatctcagttttcaagtaagtcaaaagatgttatttattcaatgggtaaaaatgagggtctactatatacccatcctagacattggaaaaatggcagaaaatgaagtagacaaaaatccttgcccgcatggagcttatattcaagtgaagattgaagttttctggttcatatgatcttcagtatcataatttttaaccgacttctgtgattagcaaccatagaatatgtgatagggagacatattttagttgtaattttagaacattaaaagtggaagtctgtgagaagcaaagaggtcaccatgtatggaaggattccagcaggcacagccattgcagaggggattcaggaatctaatggtaagaataaaaaggtgtaataggaaggagactgatgaggagtcctttgcaaaagtgagaaccgagtacagtcctatcgtattaaatactagcagtgcctacatagtttgagcatttactgtgtgccatgcatttcgctaagtgattatcacacattatttcacgtaatcctcataacactcatataggtggaaagaataaaactgtcaaattatactttttaaaaagttaaaaacatgacatataaatatgaaaagcagatatgtcagatattttacttgactccttaattagtgggggaattggtgtgatggtaagactggttccaagaacatttgaggagctcattatttataggtttgttaacaaagggatgctagcagagactacattaggtacaagactggtaatgtcctggagggcaacaaatcatcacatttgaggttattttctctactggaaagaaattatttgcatctttatcagataaaagtctccaagttaacatgtacctgtaataaatctggaaatgtttttcaatagcaaactatcttcaacaaatgacattccccttaaatacttcttgagagggcctgtgaaacaattcccgcatatgatattgaaaaaaaaaagactaccttttggctatatttttcaagttttgcataacatttcttaacattagaagaattaagtatgttttcaggattttctagctagcagttataaagctgggtctcaaactgagatctctccagatgcccacattgaaatgagccacataacaagtctttggggagacatgagggcagggtctcgtgaatcatatcagcattgtttgattagggctgagtatcagcttgagttttttttaaattgattaccagaacattcaagattaacttcttcaactatttaaaacttctttttttttttccctgaaaagaagcagggcataaaacgtgaataataaacaataagcggttcattagcaatttgctaccactggctctcaaagactgtggaaccccacgtagaagtctgattctttagaatttgcagcagctattttctctgaaagatttcttcctcaacttgtgggattttattttgctattattgttaatttaggacgttgccatttccaaacatgaacattgtaattgttaatagtcttctatttatagaatgataattttgagctcttaaggtataaagcccagttctctggaatgacactttgttcagcctcatgtaactgactgcagatttgatctcactgtttttcttttctgtgagttaatctcaaggaaagacttcagtgttatatttagggaataaatggaaagtagcggtatagctggcttaatgttccaataaggcttcaggacagttctccaagtttaaggtgacaggcccctattacataaagttaaagcagcagaaaactagccactcaaatactttattctagaactcacactagatgggagagtacaatttggcttttaggttagagaaaaggtttgcattttgctccattaaaaaaaaaagtaaactgaaatgtatttataggcagtcataaacactttacacagattatctcactgaatccttaacaattctaccagtagattctattatggttcccatttcacagatgaggaaacagatcgagagaggttaagcaagctgaccagggtttatagtcagtaagatgcagagctaagattagacccaggctatctgattagaaggctagatgatatcaccttcccaaattatgctgcagtagagaaagcagatagaaaaagagagcaccaatcccatttctagcttcagctctggtattaactgtctttaaaaccctggacaagtcatctcatttgtctgggcctctacttccctctgtaaaatgaagggtggaaacaatttggattggatgatctctggggtgtctccaactccaaagatctgattctgtaattgcatcttgaccttagatgtgcacacacacctccccacaccgcctcccaccccactgcttcccaaggcgaaaatctaatcctgctcaaagtgcccagtgtaatttgatgctaaactcacgaccccaccgaatcctattacttacaacatcccctcaagaacatacaacacttaaaatctggcaagccagttctttagaataagttgccaatggggtgtgatttttggaagtaaaatgttaataccaaaaacagaaaaaagaaacagttcaaaacaaatgctcctctctctttaaatcacctcttttctacaatgttaccttgacaactttgctctggctctttagatatgggggtttttcagtgtgggagaagaggggtgtcctcctgttttgaggtttcctcttgttgcatggaaagggaaaatgtcaaaggtagagcatcaaatccagcagaatgtacacagggcatcttgagggagtgtcatccagaaataatcacaggtgcacagaattaggacgcattctgattcaaagtacattcttttctcttttctattttccataaccataacacacattccaacagcctataaaatgttacatttttggaccagcactgttgcagaacagagagcaacaaaagtgcctgaaaaataattgcattatttttagttgctgcagcaaaaaatgtacatatcaggttgaggggacagctccgaagaactgtaccagtgtggaaatgctaaaaatattgctccccctcaagcaattgaaattttgagcaaagatttaggaagcggcaggtagggagatcaaattagaatttacatctctcagctgtaataagcttgttatcaggactggcaagagctcagggggctgacaggggtcagctggggactcaagtgtaaggagcaagtgaaaaaggagcagtgttgagcagaagaaagagaggacttatctccagcatctagcactacagagcagaggctgtgtggagaatggctgaaaaatcagaattggttgtagaagcagttttctttctggttgtgagtatgagcccggcagacaccatgagcgctgttgcaggggagtcggcctgtgcttgacacatgtgtttcccattgatagctggagacagcccagtagctgtgagtcggtctgacaaagccatattgaagtacggagtacggtttcaaagcagtcagaaaaagaacgggaatgctgttcaggaaattcttcaggcatgggcagggacttggctgcagttctgcagttggaaaatctgactggggcagcttctgagcgcaggctgggcctgcacacactcagcgggccgagtggccacctccttcagagctgctcagcacgccctgggatcgcgggcggttttcatcggccggtttgtgaaacggacaagagaggtagggtactgttcagttcttgcgtttgcacgcgtctgttcactttctaagctatctgcctgctgtatttgcaggcactccgagtttttagtgtgtgcatgtgtgtgtgtgtgaattagcaagttagaactccgtcatgtaaacagttggcatggggctccaatctgtgcttttccccctttaaggtctgattttcagcagggcagagagacttcttttgaaagttaggatttagctggcaacgttattgtgtaaagaggagtatgtgaattccttatgttgtcaccctgctccaaccatctgtaacttttcctttctgcgtggaagggccgttcactggcaaggaagataatttcagatgaaactgtctgtgtgttttgcttcacttcgcaagagttttaatggggagttttttgttgttgttgttttttaatagtagaaaatggctctcattttaggagggaatcagagtttgaagtttctacgttggatgacactttcagagtgtcgaaacagatatgtgtgtatgggtttctaaaatcttttatataggagtttgactgtcattatctgggatttgactgtcagtgatatatttgcctagaattatgctggatcaacatttgtaattctgtttctataatcatttccaattttctcacttgaagtaatttgcagttttactctcaaaaaacacttctgtattttaggaaacatagataataaaaaagtaacagaaaatggcagtttactcaaaattcttcttaaaggacagagacatgatggtgtgaattttatttcattgatctcttggttttattttacaccttactgcaaaagagctttttataaaaatcaaagttttaaaaattttcagcacaacagggatcttagtgttcctcttcagttttggttcttctttatcaactctattgcagtatagattttttcctctcataggaaagctataccttgttttatgtacagcatttagaaaacacacagtacaatgtcattgcatttgagagactggttcagcccaaagccgagctaaaccttacaactgctttacaattactagcacagcaatctgtgacaacattggttttttccgaacggggcttggccaaaagtctggttggggagatggatgaatgaatggaatcttggatacttcttgagtagctgaagagtgactagacctcttagggtggatctctgtgacaacaggtgtgcatttacttgtgtcctacaatctttaaacaagtagctaatagaagagcctgaagttaatgctgaaagaaaagtggagagccagcatttctcattgcttcctctgcataagacctagaatgagaaggcacacattctgtcctgttggtagaaggtcaggattttcagccagcgattttcttttttcttccaagtgttgtacttggaggagggacctgggacaggactggcagcaggatatctttaagagatggttcatgaacattttctttattagtttcatcttcgtgttggggtggtgtggggagggtttggggactgcagggcttgaggaaaggaagggggtgtagttagaagtcaggatggactgtgaccttatttttttctctaaagtgcctaatgagtgagaaaaatgccaagacagattaggaactggcatgaaccgtagtcaagcccactgccaatgaaaaagggagccttccatgagctcgggtgtcatactcctctatatttagcgtgcgtcaagcattgagcagaagaggcgtgaaatagcaactccaggttgcaggattataaagagcagtgcttgaaacttggtagaaactctatagtttctctcttttttagaagtaaagtagggagaagtcaagctctcttgacatctgaagagaaaaagtaagcagcggaagggggaaggatacagaggaagaaatccaggacagaggtggaggcagtgaagggagaggaatggccacaacacaaactgggcagtgagggtggagggaggagcccttggcacaggaatgaaacacatgtattagaaatagccaaagccaccaggcactgatttgttggactggaggtgtgcagatactcagtggccttggtgaagagaattgttttagccacttcaccacaggagactgcatggtcagcctgccctgccttctggaagtaatcagaaagcacattttgtaagaatggcattgcctgagggttcagatttcctaggcaaggagggggcaggctcttcagaccttatttttaacccatatttgttccttgcagagacattactgccgggagtgttgagtgaagggaccaggtggagatggtgagtaattcccgggagcgaagcttgttcaaggccctgctcatggtcattttattattaacataaacttttgaaaaagagaacaaagtgttatatatgccttatcctgatgaagacatttctttaattttacttttttattttaaaaaatctgcaggccaggcacggtggctcacgcctgtaatcccagcactttgggaggccgaggcaggtggatcacgaggtcaggagatggagaccatcctggctaacacggtgaaatcccatctatactaaaaataccaaaaattagccggacatggtggtgggcgcccgtagtcccagctactcgggaggctgatgcaggagaatggcgtgaacccggaaggtggagcttgcagtgagccaagatggcgccactgcactccagcctgggcgacagagcaagattcagtctcaaaaaaaaaaaaaaaaaaaaaaaatctccaagggcacatactacatcgttggttgtacatgtgttgagcttcccaaatccaaaaatctgaactctgaaatgtttcaaaatttgaaactttttgagcactgacatgatgctcaaaggaattatttattggaacgtttctgatttcggattttcagatttggaatgctgaatggtaagtataatgcaaatattccaaaaatccaaaaaaatctgaagtcagaaacacttctggtttcaagcatcttggatagtttcctaagccacgtctgacgaacgtgctggtactgggggcagaagtggggttgagagagggaggaaaggtagaggtggtcagaaatcttaggtcaggtcctggctccattcatcttcagatctcaggtttcctatctgtaagatgatctgatacctctgaattgttttctgttttcacaacctatgatttttgtaatcctgaggctcttccttttctttaagaataactcttagtctgtctcccttaaggctgggtgtcttgagtcatttcacccatttctccatcttttcctgcactctttctttactcttctttgaacatatttcagtgagccttctcctgacaaaaactatggctccttgagctcaacttagtcatctgaacaatgcacattccatggtgaggacttcatacatgtgttaaccgaaaaggaagagggtgattgtagggagaggaagcacagcaagaaagaaaaaaatggaaggtggtatcatcttgctgtggaagaaaagtggttatattgtgaactgagctcagggtctgcctcaaacgaagactggggtcctggctgtgtggccataggcaagttacatcatctccaaaatgtgtcccaatttcctaatctctaaaatggacaagacaaaagtatctgcctaatagtgtgttgtgagattgtacagataatgcacttagcattgtcttttgcacacagtaagcacttaaatatgtcaaatatattaatacatatagttaagatgaactgagatagcaccaggcaaatcaacaaagagtgaaaaaggtagagcaaggtaaaacaaagagttcaaacaatcagcaaaggaaaggatgttttactctgaattatctgggttacttttcctgtgttgcccaaatttctctagaaattccacatttccctttgtttcacttttcttgccacacagaaaggtcttcattattgtttcaaattcctattgcagagtgtgaactgcctcatacaaaggaaaccatgtaagctgtagcctctgacctgcctctcagacaggtctgtaggactggggaggaacatgtcaccgtggttcacttagtatataaatcctgtgagattggtttgctcagaaagctttgttggtggttgtattaatggagctcaggatgtgtaggaggatatggatgcaatcactttattcttctttttcactgataaagcaatggcacctattagagcaagcacaattccctgataaaaactatattgccagggattagaaactccctccttgctcagaccacttttccttgccagagtgataggatcagactgtcttgtgagcaccttgacttccaaataatatattgtgaatgcctggaaaccctgctgttacttgctggagttgacatattcagccactgaaactattcattgagttcagagtaaataaataccagggtaagctcctctctccgaacgaatcattcgacaaaatcttgtactaaccctcattggggttgtgatattggcactgtgtattcaatgaaagaaaattgttccaggataaggacagcggggaacagagccacgctgtgttcctttcattcctatcgttacctatggttgacttctctcctctctcttattctataatctttctagccctttcgctctttctttattgggttccattcacccttgcaagtttcttttctctttgttatttgttcagtgtgtgcttaccaaagtccttatctgcttccctcaggggtcaggaatattggtaataggccagtgtctggacagcataatttttaccaggtagtgagaaagattaactcctagcattggctgagaccttcaaaagtttgcgtccccacccctctgatgttaccaggctgctgatacaaacagcaggtcataaaccggcaacccaaaggcttggactataggtacattttggttcacaaagtgtttttttgtttgtttgttttaattgacttatgaaatatttaaacatcttaagatatcataatgttgatcttctagaaaaagctgaagatgggcattccctatgtaatttcttgggcacagtggctggtggcctgtggtcagctcctgtccttttgagagggcatatgcctacctcattcattgaccccgctatctgacctgtacatgtttacatttgtctgctctatttttctagagtttctcaactgaaccaaagaaagcagacggttatttgagtgaccatgttctctgttctctcaagggtggtgcatattctagacacataggagagaagttagggcataattaagttgtggcttcattctctcagagaacactgttgagatggtctaagtctctgttgagcagagtcgcaggaggacagtatggtggccaagaatccagacctcaaaattagaaccacctcatcggattatagctaagactgaaaacattaaatgtgatagatatcagaatactcacaatctctggggaagggaattgattaagaggagtaataagagaattttctcgggtgatagaaatgttccctctcctgtttgaatattgttcccaaagatgttcagatttgtaaaactcattgggctatgtagctaatatctgtttgttttactagaagtaaattattcctcaatagatgtacatacatatatacatatctacatgaaagcatgcaaagtgcttagaaaaatgcatgctgtttagctatttttatcatacttgtttctagaaactttgatttaaaaaatatgtaaaatgaccaaaaacgagatgagcatttcctttcctaccacaggtttcattgcaagcatttgagagcgcaggtaatagctaaagattcttgccaaacacaattgtcaagggagaatctactggatcaattctaattttatgaaactattgaatcactatagaaggatgtgcctaatttgttgtagctgcttttcatgatgctgtaaaaatttataggttttagagacatatcaaagatggtttattacctgggacaaaatgcctatacttagagtaactttcactctggctggaatacagtagtcactcaataggtattcaataatatgtcttaaaattaatatccatattaagaacttctagctaatacaatcacaaaaatattgtttttattagtaatcacattgttataatcaattattcacatatatctagaagcatttaatataagaaatgagagaacaggttttccagccaaacactctggattcaaatgcttgctatgcctttaacaagcaaagagatttggggtagattacttaaccactctttctcattggctcaactgtaaaatagaaatgattgtgaggcaggtactaattatatgtctgtgaggattaaatacatgtagaacaatggctagtacatagtaccattatacaagtgtttgtcatttatgtgtgctttctttatgttagaaaagtgatttttttttttttttttttttttttttttttttttttgctatttgtctctaagtattgctcaaaatctgtgtgtagatggttggtgaaagtaatgtgaaaccaggagttcaagcggaaaagacagaaacctagaatttatgggaaacatactggttttcagtttagctgactttggtttttttttactgccttactctgtgacgttgattaagtcacttcacctccctgaaccttgttttattgtctgttaaataaggatttggattttatattgtccatgttccctttaggccttgtgtgtcactctgatctcaagtgtttgagtcatgttcattattattttattacacagcttggtccccaagtcacagaagagctgtagtagcttgactcctattgtcattatctggttctggtgggaatcatccatggggttttagaaagcaccgatcttgtacaacacaaagtagctggtttgctaagagtatctgccactactattaggaaagctaaccatagaagtggccatgatggggtagatacagcatcctttgcatgtgaaaatgacaccattaaatctgcgatcagatgtttgaaattatttttgctgcccaagggcattcagttcacatattcttttctggtcctcaccttgcaacatcaaggaccaggctagttttatatagagccaaatcttcaacaattcttgcaatgccgtcaagtctttgttcaactatagccttttccatgaggtcaacctttcccatgcttttaaatattgagcctgctgtattccccagcccctggtactgctggtctattttcttttttttttttttttttttggcttttttttaggaggtgggacttttcctcatagcattcatctccttgtgacataaatataatattcgctggtgtttatgtttattatctgtctccccatcactacctctttccaccgctgtgagatcagagctctttgttgttgctcattgatatatcccagatgccttgaacagcgtcaggggaggaactgaaggatggcacatatttgcaggtggtggcagtgtttcaaatgcatttcacactgaatatacgtctatgataattctaaataccttactttgtattcaggaaaagttaagtctttgcctcagcctgtgagtaatggagagaaaacccggcctgagtttaagttcagaccctaaccaagttactagttaggggtctttgagaatactcctgaattccttaggacctcagtttcttcatttatgaaatggttttaattatatcgatctcccatagtgttgcaggaatgtatgcacttgtgtatctgctaattcctggtagaaatatgcatgtgtgtttcacaaatgtatctgcctgaaagcacctcaactagtacctcatacatctgcatctctaggatggaaagaattgatgttcatcaatgctgaaatatcttctggttcatcagagataaatattttaaacttaaatacaaggtatattacaatttgtggggcaccttgataatatttatttaaaaactgtacagatacactttgacctggcaatctggtttctcaggacttgcctgagaggtatatttggacctatgtgaaacatgtctgctctatgtctatggctttcaataatactcatatcctggagtcttaaagattcatgtcccgaagcccagtcttccttccccttgaagtccagattcgtttccaagtgccatcatagtgttcttgtttatctgtctccttatctcactacctcttaccatctctttggaatctcatgtgccttcaacattaacacgcctgtctcttcccctatcattcccctgcacactccatccccctcctgccctccaagccttctatcctcacgctgttccctgtggggtacccttgtgcaactggctgcttatgctgaaaccttggggttctccttgactcctgtcctttttgacgccccatgtctcaagccacagagaatcctgttagctctgctttcccacaagattccagatacagcaactccccagcttctcacccacctgtctataggcctgggccactgccacctctctgaagacgattgcagtagtcgcgggcacctgttctccacacttccattctcgctcctacaacccatttcctagagaacactagagtgatcctgaagtgaaaatctgatcatcccatttccatgcctaggttctgcagtggttactgttgctttctgtatcatacctgaggtttttactgtggctctgagctcctgcttctttccccttctgcctgtgcccaagctaattttcaaacattctcctccggtgcactctgatctagccacactgtcctcctcacctgccaagcgagctcctgcctcagggcctttgcacttgcttgtccagtttcctctgactgaaatatttccccagatatcctcatgctttactctcttgcttctttgtgtttcgttctcagatctctctgggatggtcaggcttaaccatctcttaaacaggaactccttaacacctcagcactgttcccttctgctgcttctgtgttttcttcataagactgatttccaagaacaagtagaaaaagttacattttcattatgataggtaacaaaaatgactggaaacaacctcctcgctatttgtctctgagctggttaagttaaatatcatagatccataccatttaaaacagtctagctatttttttttaattttatgtttttatgggactatcagttatgttaagtggaccaagttagatttagagcattatgtaaaatatgctcttgtttgtgtaaaaaaaatataagtgtgcatatgcactgaacatctatattgaataaagcctgaatatgtattaaacatttctgtaaggataaaaaataagctgataacactggttgcctcagtgtggggaggctgaaggtatgaatgagagaattgtttaactgcatgttctttgattcttttaaatatatgcacttgttgaatttgttttcggtaaaagtttttcaacactttggtattacatattttagctaagaattggaatatataactattaagttaatctgaatatttgtttaaaaagaaactgccattcctgggctagttcacataaataggtgcttacttttctggatgaattttgtaagaagcaaatgttgttacatcaaaactaaaagtgatgaattttttaccattgtctaaattgtgccaaatatttgtgatcccagactaatgcctggtatggatggctgactaaaaaacaaaccttgaaagcaaacagttttacctaaaaactaatatggctaatggatttctatttctgtaccaggatgattcaaaatggcttagattccacaacaaactctagaaactgtaatgagcctttgagggaacctatgcctcctatttatataaactggttacaatctcatagttacataattcatgtttacttttaaattcacccaattttaacctgtagcatcaccaagaaaaataaaaacttacttgatttgtatcacttgtcttattcttaaattagctaatgtagccatcagtcttgctgtatttttctctactcgttagaacctaggaggtgccccacctctttctacaaactcacctctcaccctctcctctgagctcattcaatccaactcttgagcttcagttcttcaggccgtagtgcttgctctgccttctgctgaaaagcttgcccccactcccaagtatcatcttaattgtctccttatcagaatgaccttccatgaccagagtggttcaccttctattctctattacaggtacctcttcgttcttcctagcacctaactttagttctaggggtttcattattgtccattattgtttattgtccatctctcattaaaatatgagcttgatgaaagcagaatatgatcattttcatccttttgaaggcctttatctctaggacctactgacatatatagtagatgtcaaaatatataaatattttactgttgaaaaatagattgggattggaattttttttgtaagtcaactctgtactttgccatgtctctccctgacagtgcataactgaacagagaactgcactcacagcacctacccccataaattcctttatggaacaagagattatgaagaagcctagtggggagcagagtcaaacgttagtaaaatgcctgtcaatgccccttctttttctcagctctgccttatggtagagttgatcatggcccatacaattttacaggcccaaaagaaagatcattaggaaacttgatggcattgatgtgtttttaggaagttcactgggttttttgtttgtttgtttacaaatcatccctgaaaacataatgcatttttgcacagcaaattggtaatgtagatactgtaactatttccagggggcaaaaaaggaaaacatttgttcttctcctgaagaacagccctgtgggaacaaagatgcaaacaaaaagtgaccacttcaacggtattagactagaatatgtgcttagcctcacaaagcggaccagctgtggatgctcctgacccatgaccctttttcatccctatgtcttctcaatgacctgtaagaagaggagcaataagagattttcacagtagccatttgattcctaccaagtgtaggaaggaaagtcagcatggtataaaattaatgaccatctgagtctaatcagagcagtttctctgttaagatattaaagatctgtcgaaaatggcagacttatcactttgaagctcacgtagcttccttaattagatggacaatggctaggtccaggtatcatgtaggttgggcctggttcaaagatctcggtgacaacttcacagtgggtaggatttgcataaagttagcaggcttctcagactggtgttgagccctgatgaggctactggaggtggctgcatggtcatcacagagtcactgaggtgttggtggtggttgaagtggtagaagttacacagggccacacagcctcaaaggaggttcttcacaagtccaagtccaagtcgatccttgacttcacaagcccaagtccaagtcaactcttgagattgctagattaaattaatatcaagtcttgactctaatgctatgcaatcccagttaggaacatttgcagtcccaggtaggaacatttgaatgcctgagaccatgaggttacagctctccaaaacatgctttagtaatatgaccattcagaatgaccttcttgggaaactctacatctaaaatatttgaccactatttaattaattaatgattacaggtggttatattatatgatagcattgtcttgtcttttggtagtttcttcccatctaatggcaaaacaacagaaagttttactgtattcactctttgggaaatataatcctcttacattttgtgtgcaagaaacagatgatccttaagtcaagtggatttgtttatgaacaggtcaacattgaaaatagttttatgacgaagtaatgctttggatttaagcctgcttagcattggtataattgtatgtgcctttggaaaaacaaagttgtataagtttttacttcttctgatatagctagttacttattactagagaatatactttactgtttaacgttggcttgatttttattcatttattcattcattgaacaaatgtacactcattcattcattgaacaaatgttttgctaaaaaatgcatttgctttatttccattaaaacaaacatgacaataaagtgaatcacataaatgtttgggtttcacagtgcagataaagtttatgtttatactgtagtattctattgtgcaatagcattatatctaaaagtacataccataacttaaaaataccttactgctaaaaacaattgggataagaaaaaactaaaaatattaggaatacaaacaagttaacaacatgaatatatacttagaatgagaaaggaaattaaattattaatttttaaaagatgacatcacaaaatcaggaaggataatattgctaataattaactgcctcacatacattttctgtactttctggttgtatagcctttaattgtctcttcatatgacagctatatgccattatcactttctgtatggacaatggaaagataattatttttatggcaattttgacaaaactttttaaatattgatggttgtaatgtagaatgcacacaactttacacaaagttacacatggtatacataacctacaaacccaagtattctggttaattatattttccacaattctcatacaaaataaaacacatatggaacatttatgattatatatgccaaattcaatgtacaatgtattattgacagtagagcatttgttttgatgaggcatcaatgacagttgaattctacatttgacattttacatatctcatgattatcaaataaacttttgactagcttctgtcttttctactacccatgtatttctggtgctgaccattgtaggtcgtgtttatatcgcatcgtgtcctttggtcctcttccttcatgtcaccatgcttggtgaattggagctatgggtggaaggagtattcctagaagacattcctataccaggagagctagcagtaatgtacctctactgggaagtgctgcaaaccatataaatatattctgcattcaaactataggaaccactaagccaacttcttcttagatctccaaaatgcatgtaaatcctccagagctaacacgaggggaagtcagaatagaaaaagatagggtttagcgagttgcagttaaaacatcttttaaaaatgttataaaattgtatgactattgtcatgatttactggggcctctcctggggtcttcaaaggcctggggtctgcccaagtgaggaattaacgttttaacttcaattccccgggcagtacatttgttccgggaaggaataagaagaatgatagattggagattgtcattcatctttgtttttatctttcaacatgttttaatttttgattagaaaaatgaacgtactcagcatatctaaatttccctttccatgcaggattctttataacagatgtatccattaccatatgtttgcatggaaaggcctccttttataattatttgtcaaaaagtgctcatccccttcactgtttctttcttatgtattttaatgagttggagactggagtattctgtttcatgggactcattaaagagggtgtggtggagatgacatgcaataagccactatacgatgcagcaaaagatccaagttataattcctgctcagcttctaatttgctgtgtgacttgaaaaggagctgcttcctcctggtcttgacttccacagctggtcaattttgtcttggacaaaattagtagttcccaggagcaaaggattctgcagagatgcctcaaaggtagccagaccctgctttaagcagaggaactccactttttttattttttattttattttattttatttttttgctattttacacactagagtttcttgcaagactttgtcttacaatgattaccctatgaaaaaaagtgaaagccattttttagatgttgtcccaaatgcttagaatcatctgggagatttttcacaatgttccaccctgagctccagattctgaaaatggagctcaaaatttgtactatatttgttcagtttcttttgtgtttcggtgcataattagggttgagtggcattattctagaccaatggcatgtaatcctgtctactcttagaattatctgggaagctttaataaatactgatgcctgggtgctacctctgtgattgttacttaacctgagtacagatgtgtgtttttaaaattttatttacttatttattttttgagacgaagtcttcactctgttgcccaggctggagtgcaatggtgcaatcttggctcactgcaacctccgcctcccgggttcaagcaattctccctgcctcagcctcccaagtaactgggattacaggcacctgccaccatgcccagctaatttttgtatttttagtagaaatggagttttaccatgttggccaggctggtctgaaactcctgacctcaagagatcccccttccttggcatcccaaagtgctgggattacaggtgtgagccaccatgcccggctgagtacaaatgtttttaacagctccatcagtaactctgatgtgcatccagggctgagaacccttagtcaagagaatcactgcattctgccaagttctaccagtatgtgtatgaaaacaagaaatcacaagcatgctacctatacctccatcctcttataaacatttattgaacatgtcatttccattttatagctacgtttatgtaatgacaccatcgattgggttgaatgacagagaaaaggcaactgatatagtggcaatatcaccagcttctgcacacttatttgtaaagaatttctcactgtttatcttgcctatgacaattccagattattgttcaagaccttaccctgccacaaatcctttagccctgcacaagcaggttaacttctctaatcctaatttggctcattcacaattagttgattaatatcaaaggaaattgcacacgtgattctaagattctgtgatcattttcttatttcatagaatatgatctgatggaaaataaaaacctaatttatttcaggcttataaagcattatttttacttttatttgatcttcatgtttaaaaaggccagtgattgatgactttgttgtgttcccgtcttcttataacacatccctgatctgcagaggaattatcagaagctgagatttaaaactgagatcctcttacaccacaaatctcactgcctggctgggaacccagtgctttgggagcctgaagtgaaaatttgcaagtatacaaacaagaacttgcccatggtatttagcttaaacctttacatacccccagacagcagcagagctggtagcagatgggaaatcattcattgggtcatcatttatgcattctgttttccattcaatcattccacacacatattccaacatatactaggtactgatttcggcactagggtatgtgtttggaatgagacagatgccatgtaggccttcatggagcatttcagttagccataaggaagaattcactcagtttttcaaatggaattccactgatgcctaacggccatgagttctctaggggatttttagattttatgtgtccattttaatgattatctaaaaaccaaaaaaaaaaatcatattgtgaaccatctggaagatatcctaataaccaaggatgtgattttagggcctgcattttggttttcattatggccactttggcaccacatattactaatttattgctattggctgagaagaaaataaatggagtaggtcttatttgtagggaatgcagtgtgtctacatgacagccaaatgaagtaaaaataagggctgtaccattatctgaatggagataggcagtgggggtcctgttatcacatggcttatgacagagtagagatgctgtgctcaggagaccttgtgccagagaccttggtaccacattcatatgatttagtttaaggcaaatcatcctttgtagtactttgttattttccagtttgagtgataggcattttctagctttatttatatttaattttaaaatttgttttggttttagaattggatagaagtgatatgtttacctacatttgtgttgacaattagtaattctagtataaagataatttgtgtcaacagcagggacttggaaaaccttccttattctaaagggcatcaacgtattactttataatatattgacaaatccttttctaatttctctctctctactgtgcttagcatttaactagttcatcctctcattagcctacgagctaatgttcacattttacttgactttgaccctcctttatgtttcttaaataagttgcctgataacggttagaattgcctaactcacaaagactaactcagggggtagttaggtatttactagactatcacttgctgaagattcccaaatcaagtggggttccagctgtgtgtctgtaaggaccccccttttaaatctgaaatagaggagcagtcaaagctgccacggttgccactgactggcaatacagaatgatagtgttcaaaattttttaaccacccccccaaataaattgcctgaataatatttttatattactaaggtgaactgctggggttaccttattttcttcagtaattctaaatttttccttcggtttggtagatctttgagcatctcccccacaaagatgttggaattctgagtcatttggaaaatggcctcctaggagtccctttccacccattatgtgtgtgactgtggctgtatcagtgcacatcagaagtcatggctgtgttaaatgagaagcctcaagctagcatccagagaagtcacttttgtccagaggaaacagatttttagagttgtcagagggtataaaagtagacagcagccagccatatctcttcatcagttgatttttttttcctttattttttttctcttctctcagcggtttaatgtgagtgcttctctcttgcctcgtttatttcagatgcctcaggagcagtacactcaccaccggagcaccatgcctggctctgtggggccacaggtatacaaggtggggatttatggctggcggaaacgatgcctgtatttctttgtcctgctcctcatgattttaatactggtgaacttggccatgaccatctggattctcaaagtcatgaacttcacaattgtaagtaaaaccatctaggtttgtttagctttcttccgggaggggaagcgtggggcaagatgatgaaggaatgtggaaaagtgatattattacagtaggactcaaaaaatctgtaacctcgtgttttggtgaaagagcatttctgttcagattgaatatggatattgacttctatctaatctcagttcttcgggggctaatactccaacttaaagatatttccctcctttagaatctcctgtatgttatccctccattttgataactgtttctgtagcctgtagctttcaagcactttgattaaataattaagcaatagagaataaattcaaagtattaagttttcagcaagtgtagtgattataaaaggttttttgaagtagagagttgaaacatttgagtaaaattatactgtgagcattatctatctaaaaattttaactatttatgcttgattatccatcactctggttagttaagaatatcctgggtttttcggaggacgatcctctttgccactagtctgggtaagatggaaattagaggaatgtagctgtgtttcatttttttttttaagaattgatgtttatgtttcttcaatgaaacttttgctattggtgtttggggtccctgtacagactggacatttactgttgtagttcaaatgaaaagaaaatcctgaaaaatgacttttggagttatttagaggttttatacctagaaattctgatctatactagtaatgtaagtagtctagctcattaatgaggaaatactgggcagcagtctgctgtattgagcataatttcctttcttgttctgatgtcaaaagtgagtaatatagattggcaataaaaataactcctaggtcaggcacattggctcatgcttaaattccaggactttgggaggctgagttgggaggatcacttgagtccaggagttcaagatcagcctgggaaacatagcaagacccgatctttgcaaccaagcaaacaaacaaaaaccaaaaaacaaataacaaaccaagaaacaaaccaaataacaaataccaaaaccctcttgtttgataaataaacatgacctttacaaagtaacagtaaaattttcatgtgacaatcccaaatatcatagtggatatttgcattttctaaattacaaagttcatttttatccttgacatcctatgcatagtcacactttcttgcctttgcttgtacattttcttctgcttggagtgcttttctctgtcttccctgtctggtaaaacttgtcttgctactcctgtagttccatttatgtatctcttattatatttaccactccagataataatttttacatgtatttcccagacaaactgaactttgagaaaggcaaaggctgcatcttttctgtgaatggctttgtccatcactcatgctagggcttcttggtgcttgacttaattagcactctataaaccaaggttacagatactgcttcaggcctcagaatggctcactttttaatatttgtggtaacaggaaaccataaaaacaaaaatattaccttgatgttacaaatttctatcttgagaaaataattcagttctttctaaaaaaatttttctttctttatatatgtatttatttatgtataggcagggtctcactttttcacagacgctgtaggacagtggtacgatcatagctcactgcagccatggactcctgggctcaagcaatcctcccatttcaatccctcaagtagatagaactagagacacacaccatcatgcttgactaatttttaaattgtttgtagagatgggtgtctcactgtgtggcccaagctggtctcaaactcctgacctcaagcagttctcctacctcagcctctgacagtgctgggattagaagcatgagacatcacatccagctaagagttcagttcttttgaaaaatgcagaaaatctatattgcagtagtaactttggaagattatatggtcagtttccatggggttgtaggcatccaaggtaatagttctagagtattagagcacattagcttccatttctgaattagactcaatcaatacttctcaacttgggctttactttatttttttattttttttatttttttattttttgtgagacggagtcttgctgtgtcacccaggctagagtgcagtggcacaatctcggctcactgccagctccacctcccgggttcaagccattctcctgcctcagcctcccgagtagctgggactacaggtgcgcaccaccacgcccagctaattttttgtatttttagtagagatggggtttcactgtgttagcaaggatggtctcgatctcctgacctcgtaatccacccatctcggcctcccaaagtgctgggattacaggcgtgagccaccgtgcctggcctggactttactttctttaaagacaagcagaattcagagaaatgtttaatcaggagagcaagatataatcagatttacattctagagagcttgcctaggtgatgaagcaatagaatggggaaagtttgttagagctgagggctctggaggatgccttgggtccatttggccttaagtcccagtgaccacaattgccatctgtcgatgtgcatgttctgtgatgttgttaatttgtatttcaaaaacttataaattagtaaaacttctctgttgcaatattaaacaggagaatactgaagctagggcagtagtatggaccttgcatttaaagacatttaaaagatggaattgatataccttgacttctggttggatgtagggttgagggatcagaagacattttggaagatttctggttttaggatggtgagatggctgggtggtgggtcctaaaaagcaaaatagaatttattacttttccactagaacttggctagtactcatgtatacctttagtcccctatttgaagctatcctcttaatcccttatttttgtgatttttaccaagactgtcacaaatttaatttgtagaacctgtaagatttaggggtagaggaagtggaaaatatgagctgaaactttgataactgtgatattataccaatactgcttctagagtatgttttatctggaagacttaatagaagtatatgtaaatgtatattgagtaccacttatatgacattaaggtaataatctatatgaaatcggctctttcctgcagttaactaaattgattgccaaaattgagagtccttaaagctttaccaaacttactgagataagaataatgctgttattaggcataattggtactttatagccaataatgcatttgagcaaatagaactgaagtgttagaaaattggtcttgccctgcaagttaaaagcatattttccatcaatcatggtataaaggatattcttttagaattataattctcttgcacaaataaaaatttactgacagtggagatcgtggggaaagaatgaggtattaagcactgttacgttggagaaagagaaaaaaatcaatgagatggcagtaaagcagtttatgcagagatttaaaaatatatgtaggggaagtcctagccagagcaatcaagaaagagaaagaaataaagggcatccaaattgggaaagaggaagtcaaactgtctctgtttgccgattacatgagcatatacctagaaaactctaaaggctcctccaaaagactcctagatctgataaactaaattcagtaaagtctcaggttacaaaatcaatgtacacaaatgagcagcactgctatataccaacaatggccaagctgagaaattaagcactcaatctcttttataatagctacaaaaattttaaatacctaggaagatacttaagcaaggaggtaaaagatctctacaaggagaaatacaaaacactactaaaagaaatcgtggaagacacaaacaaatggaaaaccatcccatgctcatgaattgaatgactcattatcatgaaaatgaccatagtgcccaaagcaatctacagagtcaatgtacttcctatcaaaatatcaatgtcgtttttcacagaattagaaaaaacatttctaaaattcatatggaaccaaaaagagtccaaatggccaaagtaattctaagcaaaaagatcaaatctgaaggcatcacattaccggacttcaaattatactacaaggctatagtaaccaaaacagcataatactgctataaaagtagacacattgaccaatggaaccgaagagagaaccgagaaataaaacctaatatttaaaatcagctgatcttttacaaagtatacaaaaacataaattggagaaaggacactctaataagtgatgctgggaaaattggatagctacacgaagaataatgaaactggatccttgtctctcactgtattgaaaaagttaactcaagatggatgaaagacttaaagacctgaaaacttctagaacataaaaattctagaaagaaaaacctaggaaaagcacttctggatgttggcctaggcaaataatttatgactaagaccacaaaaacaaatggaacaaaaacaaaaataaataaatggaacctaattaaactaaaaagcttccgcacagtaaaagaaatagtaatcagaattaacaacctatgaagtgggagaaaaaatttgcaattatgcatctgacaaaacgactaatattcagaatcgataaggaactctaaacaagaaaaaaaaacaggtgatctcattaaaaagtgggcaaatggcatgaatagaaatttctcaaaagaattgatataaatggccaagaaacataaaaaaagtacaacagatctaatcattagagaaatgcaaattaaaaccacaatgagataccaccttacccaaagcagaatggctattaataaaaattaaaaaaaatagatgttggtttggatgtggtgaagaaggaatatttatatactgctgatgggaatgtaaattagtacaatgtctatagaaaacagtttggagatttttcaaagacatcaaagtagacctaccatttgatccagtaatctcactgctgggtaactacccaaaagaaaaaagtcattatgtcaaaaagagacctgcatatgtatattttttttgcagcacatttcacaactgcaaagatatggaaccaacctaagtccccatgaacaggtgagtggataaggaaaatgtgatatacatacaccatcagccataaaaaagaatgaaataatggcttttacagcaagttgtatggaaccagaggccatttttctaagtgatgtgactcaggaatcaaaaatctgataccacatgttctttttgataagtgggagctaagctaagggtatgcacaggcatatagagtggtataatggacattggagactcagaagaggagagggtgggaaggggatgatgaaggatgaaaaactacctgttgggtagagtatacagtactcggtggtgggtacactaaaattccagaggttaccactatattattgatccatgtaaccaaaaaccacttgtatctctaaagctattgaggaaaaaaaattatatatatatatatatgtacacacacacatatacccacacatttatgtaggaaagagtgattattttgtatgtttggtttgttcaacaatttgagatttgggaaagctcacactgtaatcaaaccccctgtgtaatgacgaactataagaacgatgtcatctgaaagtgtttgtgaaaccttggtgatctatccaagattgaaaatctggaattttactttttttgtcagtcttgcattctgtgctatccccaaggatacatgctggaagagcctttccagtaaagcaatctggacaagcatcttaccaagttttctttgtctcagaggtaaatcagaagaaaagttattttgctttcttctgctcttagcagaatattccagtattcattactggcaggagattgagactacatatttcattttccccatacattggagagtgtgtgttttacctacactgtaaacacccacaaatagaccttagtttatcacacattgtgcttatacaaacgagctaatatttattaaatgtctcttctgtgctactcactgtacatggcccttaaaatcttttaactttcataactctacaaatttaatattgttattcccactgaaaacccaaggctcagagaagttgagtgacttgctgaaagacagctagtaagtaaaacgctggtgtttgacttcctgtctcaacctttccactacactttacctcctcctccaaattgcaataatgatctggctcttcaacagaattctgaagctggaaaaatagcttgttatctttgccaaccctgtgtcataggtcactttcatctgaggtatccagtgacgttttatgtttagagtagttccctggtagttccgaatgtttggtttttatctaatttctctttgctgtgtagctgaggaccttctccttgcattgttcccaccttgtgttttgtccatttgatgtgttaacataagcatttagtataaacttaatatctacccataggttggtggaagacccagtgagttaattcatgtgaagcattattagcagaatctgacacataggaagagtcagtgttgacaacagaaagtcatgagagacccttcatgacagtatagtagttcagggctcaaactctggagacagatgttctaagtaaaaatctggattctgtctcttactatgtgatttttgataagtttctcaacctccctgtgctgccatttcctaggagtaatgacaatacctacctcctaggattgttgtaaagattagaggaggtgataaatgcattgtttagtgcttggcacatagtaaacactttatagaagtgtttgctatcgtcgtagtcatcatcatcatcatcatcatcatcatcatcatcatcatcatttactgcaggcttattctctgccaggcactacactgtcgcagttacagtttgcaaatattatctaacttaatcattatccaggctgccactatttggataccaattttacaagggagggagtggctcaataacttgagatcaaacagctataaagcctcagagtagagattcgaacccaagcagtctgactatggatcctggtctgttggctagtttgtcatattgtggggcagtgcataatgccatgagtgtcagaaactggattcccagccctaactggccatgaactacattgcctttctcttctggaacccagtataccactaaatgcattggactagatgtcatctcgggcatcttcctgtttgcacactgatttttgtcattttatatttccctaggctgtatgaagtctcattctaatagagagctgttacttttgctagtgcattctaccagcccaatcagaataacctggcctcaaagaccttccaaaatactgtagtattgatcatgtagacaatcatttagcacaagtggttattaagtgacaaaactacaaaaggcttaggagtcatcagtggatggcatgatatcttatcccagtacttgtaaaattagatgaaataggaaccttaggagtcacctcatcagacatccttattctacagatgttggaaccaaagtagatagcaaagttttctgaccagcttgagcaccccagctgctctggaaacttctctcagtagcagggattattctctatacatttttgtagccctgctcaatgcctgctattcagtaggctttcaacatgtgttaactgtagattgccttttgcagaccacacaaaggagataatggatatcaagtatctgatcatgttgctgacatggtaggacctcagtaaatgatagctacctatacctgtagtatatagatctcctgatttctattttagtttctattcgttaacattacaaaatccaaactgttgtcacttgtgatcatgtaagaaatgaatttccatttatttcataaaaactcatacaggattaactttataaggttttcacatgatgcacataagaaccctatgagctaagcacccttgttatccacatttgacagaggaggaagtggaggctccaagaagtgcagtaacttgcccaaggtcacacagtcagtgaatgatgaaactgggatgggttgcagggagtctggctctacagtcactgctcttcttcagtacacaatgctgcccattttccaagggctatttttcatgaagacaagttgaatttgttcagtgcaatgtctaaaacatggtttatttaccctgaagtaagataaagatccactgagggtcagaggaaggcattctaatgcttgtaaattggacacattgtaaaacagtaaaagccagagagaacagccagcatgttccataactcaggaccctgacacatcatctgttttgagtaagctcaaggaactgcgacccagtcaaactaactcaagttgaggggagtgaggatacatataaagtacatggcagacacttagaatatgtttattgaataaatgaaagggagaaaattatgaataggcagtcactttaaattaaaatgtataaagatgggttaatagagctttatatgacttctaaaatgaagtattagttgatttattaaggtagatcataaatgagatgagtgcttgaatttgattatgaaaaggtatttttaatacagacactcgctctgtgtatcaactacctgctacattttaattacatgagaaaagaagggtaatgatggagtgtgaaatagattaaaggtaggagacttcatcctagctaatatacagatttgcttagtaaatgggtgaaagtgatattattggcattagttatacttttcatttaacactgttaatatattgtgagtttgagtagcatccgcttcaatgcgggtgccagcttagcttggggacttggaagtgcttcctctactgagaaaatcatgcttccatctctcagtgctttgactgtgtggtcacttttaatccattagctcaatccatccatctgaaaaatggccaaaatgttgttttttaaaagcaccataaaaattgtaatgcagaaaaacaaaaaacaaaaatttatttttattccatggtcagtcctaggatatggctctctaatgtcctatttggtttgaaacttcctgtgttttatacctttgtgagaatgtaaagcatcagggatgatttgggtatcataattactgcaaataacatgaatcaaagctgctgtaaagttatacaatctattgggcatatctgcttcaattgaatcagtatttcttaagcacacagttgagtatactatgctttgtgtagaaactaaagattagaataaaacaattctatactttaagtactcataatttactagggaagaaaacacatgtataattttagtactttccacaaattaaatgttttaaagaagtatgaaagttgcggaaagaataaattagctaaagttagagggcactggaaggcttcttgagttgtgtcaccaaggatggataaggccttttgtgtggtggtggaagcagagaaagcagtgtgattatagtctggaagctggtaagttaaacttgattggggagcctcaggcataatggttctagtattgagagcttaggccactggaggggaaagaggggatggggaaagatgagaataggagctgacatgagtaaagtcaaaaaggctgcaaattatagactttggagaggtcaaactgaaaagcttgaattccaattataaagaaattactgtgcaactttatcctattatttggacaatattcgtgaccttttccacttacgagagttttcatacaactaaagttatttttatgtcctagaattgagaggaacaatgttagaaaatcttcctggaaatattttttgtctttgtatatcacacatagccattcacacatggaaacttcagttcttactggtcatgttgctgtgagctctgaataactctcagaaatctgaacttgtggccacatcacaaggatctgttcatgctgactgagttattaagcaatcatagaagagaagcagcaaatcccaagggcttgctgccactgagaacctgcaggtcagtccttccatggtagacaggggtggggttaggtgattcaaactgtagaaagaaccagtaaatatgagttggtttcccatcagttggtttgcctgagaatcattagttaagatttctaggttcagagttgtttgtaaatgatctttctagaatgacactgtctattaaggatttaaaattaacattgaagatgtctatttagtcacacttgtcatgtcacaatgttcaacagctacacctggctagtagctgccatcttagagcagatacagtttatttccatcatcacaggaagttctttgtttcaaaactggtccaaaatctaatgtcctacttcttagctacatcttggatggcatggtaaggcctgtgaaccaaaaagttctttgtgcctcaccatacaacaatttttgcctttccttcctgtgccccaggcactttccaagacccagagctgtgggattaaggtaggaaaacaaaccaaaaccattttaatataaaaaggagaagaaaatttctcataatctgattaacagccaagataactactatgttttttaatcagctttgtaccttttccacacattcattctgtctcatttcttcctttcaatattcttaattggaaaagttctgagactgtgctagatttttcatcttgcctgggaggagcaaggtggacttttgttgggtgaagagctgtattcaggaaggagttgcagggactgtttctgagccatattctcccaacttgtaaaatatacagttggatcagatgatacataaggtccaacaccctcaaataatttttgtttttctgtgagacagagtctgactgtgttgcctaggctggagtgcaatggtgtgatcccagctcactccaaagtccgcctcccaggttcaagcgattgttgtgcctcagcctcctgagtagctgggattacaggcatgtgccaccacgcctggctaatttttgtatttttaatagggatggggtttcgccatgctggccaggctggtcttgaattcctgaactcaagtgatttgcctgcctcggcctcacataatttctgtgtgtgatcactgggtcctccatattccctgacccagaatgagaaagatggacatcttttttcttctagaagtgtgagggtgtgagtgtgtatgtttgcttactctgtatctgcttagccaaagatccaatatattaagtgccagggagtatatcttatgtgcctttataaatttctaatcttcattcatttaattacttaatgaataattggtctgattatctattgctacacaacaaactaccccaaaacttagtggcttaataaaacagcaataatttgttttactcatgattctgcagattgggcagagctcaggggagatggcttgtctcttttccctgatgtctagcaccttagctgggagactcaaaggcctggggtatctcaacagctgggactggaattatctccaggtgtgtttacttacatgtgtgggtggttgatgctagctgtcagctggaacctcagctggccagaacgcctacacacagctcttccctatgggctaacttgggcttgcccttaacgtggttgctaaactctagaatatatgttccatttaaagaagatggaagtgcatagcattgttatgaaccagactcagaagtcagattgcatcacttccactctactctgctgtaggcagacacaaagtcctgcctaaattcaagtagagggcatatgggctccacttcttcatgggggaattgcaaagttctagaggagtacgtgggatgggagattgtaatggattgaatagtgcccccctacattatatgctcctaatccttggagcctgtgagtgttaccttatttggaaaaagggtctcatctaaattaaggattatgagatgaggagataattcctggattacccaggtgggccctcaattcaatgacaagtgtcctcataacgatgaggcagaggaaaatttgacacagaagaggaggaggcaatatgatcagagaagcagaggttggcatgataggaccgccaattaaggaaagttgatagccactagaattgggaagagacaagggatagattttcgtctagagcctccagagggcttggaattctggcttctagaactttgagaaaatttatattgttttaagctgagagttttgtgataatttgtcatggtagccacaggaaactgatacacagatactgctatggccattttaggaaaagtacaatctgtgcaacagtaccgccaccatcaatgctattaagcgtgcagtcaccacacctgtattgaacattgtttgaacaatgttaagtgcctggctttgttttctcttactcctcacaatgaccctgtgaatggggactattatctcctctttctatgtaaagaaactgaagcatagaaggcttaattcacctgtccaacctttttagctagtgggtagccaggtcaatatataaaccaagatatgtctaacttcaaagcttatgcttttaattttctctgaaaacatttagtgtcaaaaaggaaaatgaatgtcttataaacagtaatgaatttacttgtataatgttcagtggcaatggtggtcattgtatagctagggtcaatgaggaatgggcattttaaaatgacttcagtattggctcagccattgtcgactcaagcggttttattctcatgaaaaattttaaggggtcatactaactacatagcttgtatttatgttagaagaatcataattttgttgcttttcagttacttttgtgcttcactcagttacatgtaaactgcttgttgctttgataaataaagttaaagaataggcaaacagttctcagtagtagggcagcctttctgtttattgtagaaacctcactgaatgcttgtgtagataaaaattatgcattttgaccggcttttaattaccagccagctttattaagtggagtacttcctaggtctcatgcctaatatgtactatggtcaaccccccaactttagaataaataagaatgagcaatggataacagaactcggcaacactgactttctgcagaatcaggcaagtcactgagccagtattcatgaggtaaagggttaaagtctcagtacattctggtcccttagctaatcatccagtttggattggccgatgtatgggagttttgaccattattacatgaggctgtcatctgccatgttaagtaaccatgttttctctctttctctcataatctcttaattatatgataaaataggaagtattgtccataaaacccaaagacagaggaaaagtatcatttgggtcactcagtcactccctgggtaaaatcagctttgtgccatacatagttgcttgccatttaataaatgaatgctttatagttcatataagcaatttcaggtagtctgaattgaaacctgcattgcaatccttggcagggaggagacagcagaaataatttgtgtcttgttcattcactagtggagagccttgtgcttctgacttatttcctagtctcagttaagtgaatggtttctattggaaatcctcacctcttcaagtcaattattactataattatgatatattgacagccttatgaatgagaaacagttgtttattcaacacatgcttgttgagttcctacagtgggccaaggactatactaagtgcttgagatatgagagtgaagaagagcaaatgccgttcctccctcatggagctatctgtctaatggggaagggattggaattactaacacaatcaaataaatgtaaaagaacagtcaggataagtggatggtgtaaagaaggcaggaaggggtgatttggcataattgaagaggggctttcaagtcaagatgattgcacagatgttaaaaatgaaaactcaacaaaggaagccaaagtaaaatgaagaaatgggcatctagtaatgttgtatatggatctgcagaaaatctgatgtttcctctgggagaggagttgactggtggtggtggtgggtggggagacaggtgggagaggggtggaaggcaacttttccatgctaccttatgctgttgaacatttggtgaggagaatgcacttatgtaacacttgtgggattcaagaaaaattaaaaataagaagctaaaagggaagagaaaagaatcataaatagaaatagggaaaagtcatgacagttggtttcttaaggactatttggctaccttgtggtataattggggacctcacctgtgaggatagaatcagactataattactcatagtgaatacaaatactgtatgtgttatgaaaaggaaactggtttataacaggtcttttgctttcttctttggagctggtttataacaagtcttttgctttcttcattggcacaaaactgtatctggccacttacaggtatatcaacattgacctcaggattcacaggttgattattgtcattaattaataggataacatgtattaagagcttattctgtgccaggtgtgatactgagcacttaacatagaacatattatctaatctctgtaacagccctagaagatgagtcctataattaccctcgtttcccagatgagaaaattaatctagagaagaggtcaagccactttcctaaggttgcagtaagtcgcagagctgggatataaagccagcctagacccagaatttctaacagctgttgcacatatcctccctgatgctcagcagtctgagaagatactgtctccattcctcagagccttagtctctgtgcttgtggtattattaagatgagtcaacagcagggcacatgaagaatgctgatggtctccagtatccctaagatgcactcatttctggaactttcttaatgcacacatatgaagatgaatacttattcacagctggtgctatacctcccatacagcttactgagaaattgttttctctttgtgttttctaatggaccttattgattcttttctgtcatattgtatgaatcacctactgaacttagaaaggttaagaggcctcacaactggtggacttaattatgttggagcaaatcctctcagtccagacttctcaaattcttggttcattttccatttgactctcattgtccagggttgccctgatcccatagtgcaaagtgatagtgacaggagcagccaaatgtccaggcagacaggggcgggtccccactgaaaccccacctccaagctaaagacagtttaaagcctgaaagcaaagctacaacttaaatcctcagatcaaattcagaacttgtcttcctgtttggtgtgctttcctctggttgatccctacccttcgcctattttacatatacctaccctttcctaattttttttttttttttttggagacaaagtcttgctcttgtcacccaggctggagtgcaatggcacagtcttggctcactgcaacctctgcttccctggttcaagcaattttcttgcctcagcctcctgagtagctgggattacaggcacctgccaccatgcctggctaatttttgtatttttagtagagatggggtttcaccatgttggccaggctggtctcaaactcctgacctcaggtgatctgcctgccttggcctcccaaagtgctggaattacaggcctaattggtttttttacactgtagtgtccacctttgagtgctgtcttcactttaacctttattgcatactcacaacccaatcagcacacacttcccatcctgtgcctataaagactccagactcagtcagtagagggggagatggccagactttgaggagaccactggactttggagaagagatggccagactgtgaaagacacagcctgactttgggggaagacgactcacccttcccatcccctctccagctcccctttctactgagagccattttcatcacttaatacaaatcttagccttcaccatccttcagttgtctgcatgacctcattctacttggatgccagacaagggcttggcgcccaccaagagtaggtacccagaaaggctgtcacaccagccgtttgctctcactgacagagggcaactgccccacatgattgaggcaaggggtcaattgagctgctaacacactgccacctgcagatggcagaactaagagaatactgtaatgctgtaagcccctctggggcttcggggtcatgggcaccctaacctgggtgctgctgcaggccccatatggagcttgctcctgctggagcctggagcgcccaacaagatcctgtagttgcttgttcatgcgctccctcctgcaaggggttgagcacagtgggcaagccaaataatagggcacccctgttgcaagtccaatgaaggggccaagaaaaatcttgcaccaaaaggatgattcggaaaaatcctgatgtgcacatacatgtgattttaggagagaagcagtgtaatttaccaggttttgaagaagacagacctggaagcttctgctctgttactgatgatctagacaattattggcaaagtacctaatcttctctgacccttcctttactcatttgtactagtgagattagcaatacttgtgttgaaaagttgtaataaagattagagataaccagaaagtagagtatggtaggcactcagtgctagtttttatccctgtcaacttaaaacatttggagaattgtcttacaaagaggaaaataagtttcagttgctaaaattcagcacagagtcataagctcatgtttaaaggaatgactaatagagtcttaaaagcatatgtaacttgggtgttgctgaaaatcatcattactgtaagaaatacggtgactcaaatattttatatgtacacattattgctggttcaacttaaaataggactctgtgaaacacagtaaactatagctattctggtgcatgagatggcctataaagaggtaaactaaaataattattggttgtgatgcatcctctgaagtctacagagagagatgacaacgtgaaattgcatgtggattactttggacatggatcagcatttgcctccctggaaaggcaaattttagtagaagcctaaaggaatgatactgagacagtcatgggaagagctgggcaagattttaggccgaaggaaaagcaagttcaaaagccctgattgagaaaggacttagagtaggctgtctatgtgtagtgtcaagaaaagggaattgccattcagacagtctccactgtaggaacacacaccctaagtaggagccaatgaagaagcaacacacatgtacttgagtctccacactgcactatgtcattcatgagaggccatttgacctttactggcttatttctgatttgtatggtgtgatgcttacatcaggtggttcaaaatctctgccttcttggaagccctcttcaaagccaatattcctatttgtcaataaaggttgagtgttcaaatggtttagaaatagcattcgaggctggcacgtggtggctcatgcctgtaatgccagcactttgggaggcccaggcgggcggatcatgaggtcaagagactgaaaccatcctggccaacatggtgaaaccccatctctactaaaattataaaaattagctgggagtagtggtgcgcatctgtagtcccagctactcgagaggctgaggcagaagaatcacttgaacccgggaggcagaggttgcagtgagccaagatcacgccactgcatgccatcctggtgacagagagagactccatctcaaaacaaatgaaaaaaacagaaatagcattccatagtgtgactactgtgaacctcgtggctagtctctgggatggaccactatggagaacttttccaataagggatacttgggagcatttcatgacatatactctatttgctttattcagagtcacagcaaccttcaaacattgtaaatggactccactatctaatcagggaattatagcaatatattaattgccatttctgattatttgcatttaattaaggggtactcttgagaaattgaaggacagcataacctcaaaatatggctttacatctgggataattgactataatttctgtctttgcagctttccctaaattgtttatttctccagatggtttctaaaatctatgattttaccttttttttttaatgggtgagtagggttttctgataaatgcttatatggtttagtttttgcagctaaattaaagcttaattagtcaaaaatccagatctgtgatatgtttatgaagtttatacaagcataattaatttcagttaattgcacaaatagctttccgtgtaaacaataacctcttcactactgacctctaaatgtcagatttcagtttatctacatttctagccttccatggtaactcacgtatttctaaaagtattgttctttcctttgatttatgattttattaagggagtcagtgattacccctgcaacccacgtttcatgttttgaaaatgcagtgaaaaaagtataacattgcttttgttttgatggaagcagaaaaataatttaaaatatgattttggtatgctctcctaagtttatttcttctcattaagttacctaggtttttttagtctatttgaatgacagctcaaatttcattgatcagctcaatgtcaaaaataatagctattatttttttaaatatcctgattgtttccaggatttctcttcctgagaagaataacattactgtaaactgagccagattctcttgctgtataagctgttgcctttgcagaggtatttacaaagccatgcctaattctaagaaattattctctgtaagtatgccttcacttttgattggcaatgaaattttcttattagttcccttatttccctaataaatcttacatatagattgaaattgattaattttgtctttttctgtctacctggttgaagggaaaggggatgtcattgcttcaggagctctttcagaagacccagaaatgtctttcccaggagcacacagaaaaactcactacctgtcacattggcctgacgggagtcacatgcccaggtctggacgaataactgtacccagggaatgtgattatgatcattggcttggtggtctcagtcacaagtcccacacctaatactcaaggcctctgggctgtgcagggaggtatgggcagcagagtgaaaatgagtcattgcaaatgaaagaggaggggatgctgagaaagcagtcacagatctatctctcagaactgaatctactgagttatgctgggattatgacagcagaagtctgggggaacctcttgactttaaagtgacttttccctcaaaatggtcagtatatatgaatttggaatctgtaaagtgttcttccttgctgtattcctccaaggttcactaacaatcagtcttatagaatcaattcaaaaggaccatgtttttggtgcctatcttattattagtgtcagggctacatttttttttttaatgcgcaatgaaatccatgaaatacttagcaagaatactttgcaaatttggctttgggggcagtgcatggcttataggcagaaggaaaaatatctgacaattgcataaattgaaaaacccttcatccatttctaggctgcagctacctataagcagttgaaaaaggagaaatccagtatgtgtgtgactttcaaggaatctttaatggttcaatatctttttagttttgtacacagactataggaaggtcatttttccctatgtgtatgaagttggcctccctccctttgtgggatttttgctcatttcagaggataagaaatgaggactggctattgttagtgacaggacagtgcttcaagaataatgagagtcactcctccttttccctaaagattggtaaagcaaaagtacacactggcttggaaactttttccaaataagtatctttgccattttctctccagaactgtagagagcctccttaggacatttgagttatggtctgggctttttcacaagctatgagaccttgggcatactacctgtcgcctctgggcatcatggtgcatgttggtaaaacggagagttgcaagggcatactcagatagcttttatctctaacactgtacacttctacaatggagagaagtttaaaaagggacttctgatttaaaaatgacagtataaaaatgtgcaactcaatttaaaaatgggcaaaagacttgaatagacatttctctaagatgtacaaatggtcatcaagcacatacaaagatgctagaaatcatagtcattagagatatgcaaataaaaagcacagtgacttatcgcttcacactcacatcctcacactctcttacctactaaaatgtctgaagataaaacagaatgaggaattatctattaccaaaaactaggaattccaatcagtcttttcccagactctgggaggcgtcttcatgaaccttcaaggtttaggaaactacattaatggacacagttgaagatagtatatgatatgctttcagaaacaggtcatttcctcccctcaccaggagttctttaggagatgctttatcttctgacctgtatttgtaccctggatgcaaaaatccagtgtcagtagcaactggaaagatgagcgttttctcttctttctgcatggatgttgtttttgagttcatctgcactacagttttctttccccacatacatatgcatacatgtatgtatacacatacatatacacagatatacacagaagtatttgtgtatctgtgtatgcataaatatgcccataaatatgggcatatatgtgtgtatgtagacatatatacaatatatacatgtatatatgtatacatacacacctatttacatgtatgtctatatttccatgtgtatatgcatgtatacataaatacatgtaaaatatacagatatatttaaatgtacatgtaaatatatacacgtgggtatgtgtatacattcatatatgcatatacatgtatacatatgtgtatacacatatatacatgtaaatgtgtatgtatgtatgcataaatatgtaccttctatacataaatctctgtaagcaagagaaggtacaagaagacatgagtagccatgcaacctagaaaatgttcttaataaatttcatgtgttcagaatgttaaagacaaaagccttcctgacaaaatgaaggcaactttgcaaatgtgagaccattcagtcagtgcccccatgggtgctcctgagagcagcatcgcgctgggataagtttttcctctttgctgtgtgaagagagggcatgtggagtctacggaaaaatactaccaagtgaggaagaggaacatcatcctgagcacttgaagaaagagcactctgatgaaaacaattcacaaatcagaagaaaggtttagaaaattgaggtcaggtggtggtggaacagggcagggtcattgtgatttctccatggcaagagtggaaatttggaaggacagatcaggcatagatagaaagattttaaaatcaggggaaatcacccaggaaatgtacaggtactaaaaaggcaatagtcaaataaaaacccactttggaatcagcaaatactttgtactgagaaaaagtaaattagctaagtgaagaataagaagaggtgctttgcagaagaaaaaataaaactggttaaagaaatacatgtgattactatggaggatggagaatgagctatagaaattcctaagaatgagagaaattcttgaggaagaggctagaactggagctaacatagcaacaatacaatgaagaacattcttctgagctgaacctagtgtcagttttcattgaaagccagacaaagtgaatgaaaagatgaccacacccagataaatcctggcaaagcatatgttaccagtgtaaaaaaagaaaaatcttgcaaacaaagtcatgcctatcaaagaattctcctttagaataaagcagaaaacaataaaatatctagatacttttgaagggaaaaatgaattccaagaatgttttagtcagataaatggtttatcttctataaagaaatctaagatgctttctcatgtattttaagtgtcacaaaacataacttctacaccctcagtttgtgccagccaactaatagctaagtacagaatagccccaaaatgagagacttgtgctataaaatgactgggggaggtaagctctggaactattaacatatgaaaaatttctaaacattttctgcaaattataaaatgccagttgtaaactgttgagaaacacataagatgtttatctaaaattcagtatctaaaatgccagatttacatccacaaaggtgagaaaggggtagaaagaggatgcaggaaagggcatggagatatgaatttctgcaaaatgatgtgtattatgtaggagcaatttaaaaactaacttttcagtttttgatagtaagtaaaatgtggattgaattttttttaaaacaacaacaacaaccttaagaggtatatgttttccaaaccttgagaggaaagggtaggaaattgttattcaaaaataataggcagaaagcacaaaacagagaagcaagcttgaagtgtattcagattcatttttttaaaaggctcaatctatgtgttaattctaacctagaatcagtcatgtagttttgcaacatattggaacatacggaacaacatttagctgtagatctttgaccctgaagggatgttgacaatctacaccattccctcctacagtatggaagctcccctctgacttattccatgtggcagccctgtggaatggtcctaaccacagccagacggggagttagcattaggcccagctgtggctcagcctcgctgatgactatgcctgctgctttcaactgtggttgtgttgtaagctaggtggttgttggaggtgccgcacaagcttggtgacacagcatgaacattgtgccaggataaatgtcatgactatttgagctaggtttgaccttcagcaatgttgtgaaatctgtgcccttatgtagaaactatttgttcatagtttctcagcattttcaatatattttttaattgaggagctttccaaaacatactaaaacctatcctagcctttacccttccaaaaactggagtgcttcttcagtatctttagcttaaacagtctgtattcacgcttgctttttttttttctttttttcgagacgaaatctcactcttgtcacccaggctgtagcgcagtggcacgatctcggctcactgcaacctctgcctcccgggttcaagcaattctctgctttagcctcctgagtagctgggattacaggcgcctgccaccatacccagctaatttttttgtatttttagtagcgaccgagtttcaccatcttggccaggctgatcttgaactcctgactacatgatccacccacctcggccttccaaagtgctgggattacaggcgtgagccactgcgcctggcctgtactcatgctttttagcacataattgtggttattattttctatcttatgacatgaaatgtctcttccagaagaaacctctaccgtaggaagcaagaagacaggatttttttgttacttgcagtacatttcttattctgtcaaggcttctgtagcttcatttttttaaatggcagtacttctggaccgtagaccagtactggctagcaagcaaagcttcatctgtatttacagccactctccatcacttgcattaccacctgagctccatctcctgtcaaaagcgtggtggcattagattctcacaggagcacaaaccctgttgtgaactgcacacatgagggatctaggttgtgcactccttatgagaatctaatgcccgatgatctgtcactgtctctcatcacccccagattggactgtatggttgcaggaaaacaagctcagggctcccactgattctacattatgctgaattgtataactatttcattatatattgcaatgtaaaaataatagaaaaaaagtgcacaataaatgtaatgcacttgaatcatcctgaaaccatcccctgcaaaactagtccctcgtatcaaaaaggttggggaccgctgctctatatgcttgaaggcagtgaggtacaccagatgattccctgtaattctctgcagctctgagatctataagtgtctgtggaagcctgtgtgtatgagacagagggtttaagcttaatagaaaaggtaacataacacattattaatctcttcatggcaagggccacaaaaccatgattttttttcacctaccccagtgcttagaactgagtagtgaacatagttgatactccataaggacttttgtttgcagtgttgtttttctttatgtcccttaagtgtaccaggagcaaggtgaagaggaatttgggggctttggattaggagtcaagacatcccactggcaaacctgcatctaatgtggcctgaaacaatccacttagagttctctggttaaatttcctcatttttgaaaccaaagtcttggattagattggggttatagactaatagttggccagtttgtctagcagaagtgtattattagacctgcagggcgttgaatatgttttggttgctgttaatttgaaagccattaaaggaggtgcatgtgccttgcatttcactatggtgcttgccactccctattggataatccaagtctattccactcatctacatttcccttactagcttttagaggcatttgatagtaattaagaaaggtaggggagagagttagattttaaatctaaatttagctcttctgctttgcaaactccggacagtcagtgtgcagaggtttgtgggatttttttaatagacattgggggtttaaaaccatttgactaattagaatggattgatgtgggaaaaaatgtcaacctaggaaggcacaccagagaaattccaaatggggtttaaaatggaaatagaaaagttgaatcaggctacttgttttcaggtgctttctcttcacagtcattagtttgatctgaactacatcaaaatggccttaatggccctagtcacaagagctattacaggttgtctaacttggttaaattcttttctgctctaaattgttaatgattcagcatttcatggcttgagtcaggtgttctcagtgggcaccctccataaaggtcagttgctttccagatatcagcatccaagtttaaggtcgcagattctgctcagtgaccttgagagaataatactttattacgcacaggctcagaaagcacagtttcatggagggagacctctggttggcaatgacaggaaaagcaaagaggctgatgaaaaaacagagtgccaagaaggcaggggtgtgggattgaggacagctctccaacaggcgatacatgttgctgtggaagagggaggagaattccctgtataccaaacacagttaagagcttcacatcacatcttacctgtctcatcctctcaggaggccaggaagtaaacactatcatcacaaggtcacagatgaggaaactgagacttggaaaggtgaggtaacttgcccatgtaagagcattttcagagtttgtacatgaaatatttcatgaagggcctattactattctctgcacactggtgtctgatgaatgatttatgtgctttattcgtttatgatgatattatggtgtctgaaaatacatttctagtaaacgttgacataagaacccttttgtcacctgcatgggattgtcagtatgaaatttacaagactgaaacatacacattccaagagggagtgtggtggatgcatgacagtttttttacggagttgatagagatcatttcatgacattaataggagcaaaaaaacaaaaagtagaggggagattttgaggacaaacagaacatcggtgagtaagtggaatattagggcagtcggcaaagaaatatacatttaaaaataattggcttcaaatttctaagattctgtgggaggctgagggaggaattactatatttttttatttgcaaaccagcaagtagatgatttgtgtactggaagggggaaaaaaaaacagtgatgtttttctccccttatggcatatagttaccagcctaggtttctatttttactctaccctagtccctgtgcatgattttcccttatttagaaaacttgcaactacaaatgtattgaattcattttcttacctttctgctaaatatagagaacaatacctatattttcatgcctagggattattttaagcagaattgagaccaattgaagcagtccttatgtttgtatcatgaaaaccaattgttttggtttttgagttttttattattttaatccactctggaagatgtttctctttaggagtaattttttgtattacaaattgagcaaatctttaaggttctcttctacagagacaaatctagtggttttaggattgatgaaggaaactctgggaattcctttcatgatacttgtaaggagtgaaaaaacaaggagaaaaaattgtaagtctagtagttgattggaaaaagttaaagtttcctcttggagaccatgtctaagtatgataggagctacaggcaggagagaaggagagaaaggaccgagtgtcagaaatgtgccacccctggaattgttccatcagagaggtgagaagtaagcccggaatcaaaatgtgagtcttttccttgatcatcagcaaactgcctttagaaccacgtttgtgatactgacaaacttactgtagtttcagggcagcttgattacagagactttgagttgtccattagacttgtcacactgtccaataaatgttcccccatcgtcattaggaagatatattcagtgccccatgatatgctccgtctaatctccatgcctttgggcctgatggtttatagcacatctttgtcttttaagtaacagaagacacaagacatgttgactacactaacgtgtcttttatatgttaaatttggacttttgtgtagcaactaacatgtcagagctattgtacattgaccgatattccatgtctccatcagggtttatgccatcactctaaaaaggcactgcatttcccttagttctcttattttaaaaactggaaaaatcaagctatgatgaaaagcagaggtctcaagacaattgaggcaatgtaggacataagtgaattgacagtggtgaatttgcagtttctaccaggccctctttggacctcagctagttaattgtgtgaaattataatggaaaagagcaaaattaaaaaacatggcaagaggcaggaaacatatcactgaatattatctaagaggtatggtatcgtgggatttatgttttatagcacctttatatgtgttaatccattatttgacttgcatattttactttggtgcagcttttcacagatatgtgatgcaataagagatggcctgtagtcatcaacaatgggtagctttactattctcacctgtaatcttagcactctccagtccattaagaagccatcaaccatggctcgtttgaatttactttctccaagaagtagtcttcatttgggcttagatttcacctcatcctccctttgggctgctttaaaattataggagcacatataatcacacttaacatttacttgtagataactttgtatatatatatatatcttcctccatcaaccaaaatatttgttccttgaaggcagggctagcaatttattcagaatactttgaggaaacatgggctattttagctagttaccttggaacagtggacatagctttgcctcctacaaattagacattttgaagcttttaaaactgcattcagcattccctcagcatactgattcctttcagcttgctgctacccattgggtgctaaaattttttgttctaaatacatgtctttcaggatcaaggagctttgaatatgggttttgtattttccttttatattctcttcaggtctttctaggtgacaatcatgtactcctttgcctttgtgtttccaccctgagatgccataatgaagatggcatttctctacatttaaggtgtagagaaatgtagtgatttgtgtcttctttcataccaccccagagagatggaatggccattcttgatcatcagaggtatttggtgtttaaatatgccattaagagttgctcataatttagctgtccagacattagagtaggtttcatttgtgctcgtgttagcattcatgtcttttagataatttacagaagagtgtaattttctctaaaaagatatctgtaagggggaacacttaccaatccaattacattttcgacttcttctttttctgtactctccaataattttgctggacttttcaagaaaaacaggatctcatatttttgtatatgtcttcagtcaatgctaattttagttttaatgttccctctttggtatctcctattgatttggtaagcgttacctttaatcacttaaaagtaagtaatgcaatgagaccgcccaaggctaacctatatttggaaaaatcgctacatttaagaattaatttaacaacagtctattacacattttactttggaaattcaccaggattctttccttctctgtgaaagcatttattacccagaagaaattaggcctaattttagagaatgccactgtgagccaaactgccttacatttccagaaatctccatgactctgactttaataataatgtttaaaattcacagaatttcagtgctaagagaaaatgaacggatagcaattgtaattagaatactaccacctaacttaagatattttgaagccatttaaacagtaaaatgaggcacagaccaagggctgttgctagctcaggccaagagggtgtgacatagtggcatggataattttgtttgggtttgtattatgtttggatccacatcacccagtggtcagcatggagggcttgatatggaaagaccaaccagactgtgctgtgtgggtgacgaaatagaaacaaagaccttagatgcctctttcatgttactttgctgagaagaagagtagagaaatgaaacagcagttgaaggggcgggagtggagtcaacggacattttattttattttttcgtgataagcagtaactcggataaaaatggtgcagtttggagagagattaataatgctacagagagggaaacttcagagctaagaaaatgttcaaaatacaaaaaaaaaaaaaatgcatggcaatatccttagtgttaaaattgctcatttcactctctagcctaaaatatatttttgatttaaggacttttcttacccaaaacctgtgccacagaaaatacctgtgaaacaagctcactcatgcctggcttgatcacaataactagggtttttagatcttccaagctgtggagaaagtaacacgtgaccaactatagcataacgcaaaagtaatctgtggagtcattactgccagtcagcttcacatgggagcaaaacattaatagttttcttggtcatcagctattgagttttcagttgctcttctccaagagcaacagaaacctagcaaattgggcattttatttttcagcactcaacctattcgttgatggaagaaaaaaaattgattgatttttgctaaaaaacaaagcaaatttgaaagaaaaagtctcaattgtttcttggagcagaagcttcctgcatgaataaacaatacaaagcaaccctgtctttttttttttttttttgagacggagtcttgctctgttgcccaggctggagtgcagtggtgcgatcttggctcactgcaagctccgcctcccaggttcacgccattctcccaaagcaacactgtctttttgcccctgacatgctgacagcataccaacactccagccgtggtgtgaggcagcctgagtcaaagctcgcagtctcgctagtgtcattcagctctgagaatagcaattttaaataaacatttgtgacatgttcgaaatgaaacacaagcaaaatgaatatcaaacctacttactatagaacatcactcttcacagtcttttttgttttgcgtgtgtgtgtaaaatttcagatttaccaaaaaattgcaagagtagtaaaagaaacttttgaagatccttttccaagattcaccagttatttacatttcacttcatttgcttattctccccactccttccctttccttctctctgtcaacctctctctttccctctccttccgattttttccgtctgcttccccatatgtgctttttaaaaaacgatctgaaggtaatttgcttttaaatacttcaatgtgtatttcctaagaacagtaatgttctcttacataagcatagtacaataataaaatctcaggacacttaaaattgctgtaattctattatctgatccacagtccattttcagattttgtcagttgccccagtaatatccttcacagcttttttttttttttttttttttaaagagtacttgttgaagcattaatggtgctacctatggtcttgtggtctggctccttataaagacagtgggaaaatgtgagagtgagaaggatggtcacccatgtgtaatattaatctccagactatagctgtgctgtgtgatcatttccaaagtgtgccccattaaatgattgtttcaagaaatgccgtggaaaataaagatgttttgttcaaagctgaggaaaagcttaaacaattctttccccatgctcactgcattcactccttgaagatgtacaagagtgcattggcttataaaagcatctgaacgtttatgtatttatgccataaggagactgtattattttttaactcaaattctctaagttaattgactatagcgcatcctactgaagccctcatctacctatacagagtttattttggaaactctgctatatttttacagtatttattttgctttaaaattttctcttttatttatttttattaaaattgtgagctagtcaaccttttaaaacattgaaaatgactgacattttatgacaaaaatgtaagatctacattattgatttatcgtatatgtacagttatagatagaagatcagtgacttcatatcagtgcttaaccgtgtgaggcaaacactagattctgtaacaggcaaatctatgtcagcagtttaacaaaatagtttgttgctcactcacctggaaacagtggctgcctgggatgaaagctctgctcagttactcaagaacccagtctaaaggaggttttgccatttttattgcaatggctccccatatcatcttgggtgttaacatccacacagcaaacatagagtgagagaacacaaagaattgtaggggaaatttgtatgggactagccagtgtcatttacatgtacatctgttgacaagatttcacccacaacgtcatgactgatggaagaggggctaggaagtgctaaccctggttgggtaactgctttaagtagcagcttcaaaatatgaaaggtgaacataaatttttgatgaactaatctccagaagtctataatcatgcatatgtaatttacaagtttaactttgatattttgttaatcatatgttatctcacattgaccctaatgagattgggaaggcaagataaatatacccatttacaaatggagcagctgaatctgacttttaggtgatcagagtagaataaaatggtttatgtgcatcagatttttttttattggttactaatcaagtatctttgtgtttttcaaaagtattttagccttaattatactttttaggagaaaattatacttttaggagaggaagtttattgaacttgccatagtctccaaatttaccagggaattaacaaaagtggcccaaggtgctctctattaaaataatttaatacaaatagaatttttaaaagatataatttccatttgttgacagtggtgaaaacaggaagtttgtgtctgttgattctggggtttcactttgagtaccatggctaagtaacagatgagagccaaaattaatcatcaataaaaaaaatgactaaaaatataaagcatgcctcttcaacagtttttcataagatataaatatcttgaaaccactaaaatgaaaataaaacattacagagaaaaaaaagtcatgtaaaatcccaaacctctattttaaaaaataaatcagtgttatgaggataatgaacttaatacttactatttaattaaactttaagctaattagtctaattaattcatctgataagcatcttaatattgccagcattaagctgaatcttctagaatgtggttttaaatttggagggagtaatttaatgatgcttaatattggttgtttacactgcaaaataaatttgatatgttaatggatgcccaactcccatcgcattataaaatttatgttgattctcactgcttctatcctgcaggctagcctattcagtattctcacaacacactatgttttcttattagagcaaatatcacagccaaaaaagtaatgatttgttataatttatgtaatatatgcctttattctctaaataatgttaagctccatgaaagcaagaattgtttctgtcttggtcactgctgaattcagagagcctagtgcacgacaggctttcagtagacaatggagtacatgaatggatgtcctcactgaaaataaagccagcagtgcacttagagatgggaatggtgtgtactggtgggttccagcattcaagatcagtaaaatgtaggctaaaacacacactctttactaccaataatgtccattaggtacccccattcttggctataccattttttaagtaaaatggatagagttaattatgttgtttctggtgttgcattttccattaattgcacattgatctcatgaatatgaaatctctggtatgagaaaaactcaaggtctatggattgtgtttgttatccattgctatttaacatagtggtttgaaacaacaatcatgcttattaacttccacacaaatatttttatttctcctatgatttagcaatttcacttctgggtatagatcccaaagaagtgaaatcggggattgaggcagatatttgttcactagtgttcatcgtagcattattctcactagacagaaggtagagcaacccaagcatccattgacagatgaatggataaataaaatgtggtatagacatacaatgacatgttattcagccttaaaaagtaaattctgacctgttttgcaacatggacaaaacttgaatattttatgctaagtgaaatcagtcatttacaaaactcaaatgctgtatgattccccgtgtgtgagatagttaaagcagtcacattgctagagaaggaaagtagaaagatggttgccaaggggtgaggggactggagagttattgcttaatgatacagagtttcagttttgcaggataaaggttctgaaaatagatggggatgctttcacagcagtgtgaatgttcttaatactattgaactacacactttaaaaggttaagatggttagttttatgttgtgtattttaccacagtttaataaatgttttccgtgttgtgtctagcattttataattccccccacctatacagacccctgcaatctcatgaccatcaataagctcccagtatgtttactttctgatataagccaacttttgttttcaaaaaagacttttcctaccattttcccatcactcaacctaaacaaaataatcagtccttttagaatttttttcaatttttgtcactggtggtgagctattagtttattttctcttgtcacatgtaaaaggcaatataattctattcagcttaccaacagtgaataaaataagagttagtatgtggacaaaatgtatagagttctgtataggttaaaaataattttaaaaatgtatattgcatatgataaaatatagataattctaaagtataaaatcaccatcccagatactgccttttatgatgaatcactttttaatccattcagtcattgaatgtctaccatgtgctaaatgtttgcatctacttccatttcatctacttatgtactcacaaacctattcataattcactttattcatttattcttttaacaattattgaaagtacctatcagatgccaattattctaggttccaaagatgcaaaataaaaataaaaaatatctgccataaagcttgcattctaatgtggaatctgacattaaacaagataaaaaggaaaatacctatatttcagacagtgataattgctaaggaggaaaaataagtcatagatggaggttagaaaatgtcattggaggattagagttgaaagtttagatagtccaagaaaagcctcacataggatactgagtaaatatctgcaataagtagaggagttatgcatgcacatgtctgggcagagaggatcagagggagcagcatgtgcaaattcctgaggaacacgccatatggatggtgtgttcaagaaacagaaagaagtgtccttctgtgtggctgaagcactatgatgacaggatagagtagtagggactagatcatggagtgtctgtaaatcagaacaagtttggaactttaatttttagtgacagaggaagccacttcctaatcagaaaagcagtgattatagtttttatttaaagcatctgtctggctgctgtaatgagaatacacagcagaaggggagaggggagaaggaaggggatgaggtagaacactattacaataatccaggctcacagagtggcttggaccaaagtgacggtgaagtagagagggtagtatttttaaaggagagttagtagaattttctgctggatagaatgttgattgtgagaaaaggagaaatccaggataacaccagtcttttgactttgaagattccttcagaattgttcagaaaactctcttaggaaaaaagaaaaagcaaaaaatttgactgcaaatgagaaatagcccactctttggatttgttttatgctgagtgtatctgttgtttagcattattttcctgtgttcgaataagaacaaagaattccaaagtgtgggctcccccaggtctagagcccattcaaggcacagcgtttgtggtcttgggtgtttcctagagttcttggtggttgagtcttgaaccctaccctttaattttctgttcttggttgaaatgatcattgcaaacatctgatttagattatttttccaggctcttttaagctcatctgtgttccctctgggtctcagagaattgctgcagtaacaaagaaacaagttaatgtactgcacaccttaccaaagccaaaggagacgttgaaatgctatactacttaaccaaatctcagagaaccctcacttgatgaatacatagtttgtgttttgtatatcttttgcttatttgaaaaatgtaaatacaaccttcctcctacaacagaaggggttgactaggcagaatttacaaaagctggaggagcaagcacagttttcaagcacgtattcattctctcattcactcattcaaagaaaatcttagcaaatgacttgcatgaggcattgtgacttacaaggctagcaggtggtttcacttgtgtttagaagtagtgatgcctgagtggcagatatttagaacgtggcttggaggttaagactgatgtaggttagacaccatttcagcaacttcctagccatgtgatattaaatatgtctgtaaactctgaagtttggtttgctcatctgtaaaatggggatagtggtactaatctctcaagatttttttgtgtgaagcaagagaattgatatcaagtgtgtagtgcagagcccagagatgtatataggcaggctgtggtttgcattttaatttgaattataggcaaagccaaggcatgggatgtgatgatacatctttttctctcgtaagtcgagtagaagatgtatgcttttccaggcattgtgtgcatggtggtagcatcagagtttgagacaccgtttcagtaacttaggaaacagaataaattgagagtaaatgatgaaattctccaagaagtctctctcattcctctcccatgacatcagctgaaaataatggcaattgagaaatcaaagacaaaaacatctcaggaagaaatgagttggaggtatcaaaggaagccagggtggaggccaaggtaatcaggcttgtgaattgcctgctgcattctagcagttctgaggctctttaaataaaaggaatgagggttatgaagtgagaaaatggggctgctgcaaagcaagcttgcttgagcactccttatcattatgtgttcattctggaaaaagaaaacaactcacagataaaaggaaacgtaaggctgctgatgcagagaatgggtgtcctctgcgaatcctaatcaagttggaataccatttttcattcttggcaaggaaaatcaaattggtcttttatacagaatacgaatctcgagctctaccctggggatggtagtttggggagctgggcacaggggcatggcagaagctttttgttatcattcatccataagcattatattccaatataaatgtagtactttgttctactaggtaaatgtcctcatgtaaacatacatgtgcatatttataaaattaatcattatgcattttatatttctatatgacacatatagttgagccatcagtgtctgtgttaaaaggtacactttaatatagaagtcataaaagcatagcattttaaagctgaaagtgatctttaaagggtttggtacacagcagaaagggagtataaggcagtagtatgattggaagctctagggacagtccgctcaaagctggggttcagctccaacatttaagcctctgtgaacttgagtaagttactgaaaccctccttgccttagttttctcatccataaaaatgggataataatagtatattcctcctatgggtgttagattgaatgatataatctgtgtaaatcacttaacacatagtaagtggtcaatgtatgtttttattattatcataaacataatttttacattatcatctttaattcccacaagttgttgaagtatgtatggttttatccttattttatggctgctcaaccaaaggcccaggaatgttaaattccataagtaataacagtggaagcaggaatcaaacccaggttttggaaactcattccaaaacccatactctcaggccacacagtgctcataggtccctctccacatatttaatcaatgcctcttagatggtcacctggcacatcatcatgtccttctctgccctaaacactcccctgctgaaagaagccagcgagaatatgtgaaattgctttgcagacttcaaagacctgtagaagctcactcatgttactgtccataaggaataaaagcaaaaagcctatcaggatatatacaagcataagcgcccagaaaatgctgaggactgctttaatggagtaatggagaacactctttggtgtcttgatgtacttgtaaatcgaggctaaatttactaaatgtttctatttcattttaatacaaattccgatagttattcaaaacctaaacttaaaaattatggttttcaagagctatgatgaggggtttaaaataaaaagtaataaaaatcagggacacgtgtgtgacatgttataataataatagtagggatataatattctctaaatctagtagaggatatatcggtgctgggatatagtttgtcagctttctaaactcttcaccaaaatgtgtaaacaaagtgaatttgtctcatttgagatgtctagaattggtgatttacataagagactttatgtactttcaaagcttatagtacaatttcagaaaaaaacagttattagattttaaactgggcattccaggtttttccttattagattttaataagggcattctggtgactaaaactaaggtactccattcatggcaaataactatttagcataattgtttgcatccttagcaacaaacaagctgtttccagtgtgtaacatgaccatcaggcaattttataagaagctgttaaagagtagataggcattcatgaatgccacctggttcaaaggactgatattatagcaaaaacaaagacatggaacctggaagtttaaccataatactgtaatgaaacctgggccatgtgctgtgtggtacattctatgctcatcactggggcttatcaacatggaaagtttgatgcttagaaatagaggtattggccgggtgtggtagttcacacctgtaatcccagcactttgggaggccgaggcaggcagatcacttgaggtcaggagatcgagaccagcctggccaacatggtgaaaccctgtctctactaaaaatacaaaaattacccgggcgtgcagcatgtgcatgttagtcccagctactccagaggctgagacaggagaatcactcgaacccagtaggcggaggttacagtgggccaagatcgcgccactgcattccagcctgggtgacagggtgaggctccatctcttaaaaaagaaaaagaaagaaagaaaaaaaaataggacatttactaggaatataggagtcctggggctgctctgcttctggtcactgtggagcctgggtgagtcactgtttctcttagcagccttgttttcttgcttataaaagggaatttgactggaaactaaagtgaagtctatccagtgcccataatggagaacatacatgggctcaaaatggcccttggctatctcttcacattagaaacttacatgtcatcactgcagaagtctgaaacagctgcttcattcctctagtattggaacagatcgtatcttctttgatgagtcaccagatgccagatgtagtaatttgcttgtttttaggggcagtcatcagaatatatgtatataatgaaatgccagaatcatttgaatatggcaagagactctgtgataaagatatgggggactgagcttgactgaatgtcaagtcttctctcatgctcatcctagggtccaggctgtttaaattgtgttcatgtatatttatatgtatttcggtgtgtacatgtttagttgccgaggttgagttatttgcagcaaggatatgctgttgaatccacacaagttaaatatgtgtagcacattcaatgccagaaagagacaagaagagggatgaggactggatacttcgcattgctggaatggaccatgttctttcttacttccaaatctttgagtatgtggttctgtcttcctacttcgttagtctactttactctttcttagctccagttctttcactagctcttaatataaatcccttcttccaggaagccttctttccttctttgattgcctaaatctatgtgagatgtccctcctgtatgcttctgaatgattgtgaatgtttcctatcaaagcctttcttgttctgtaatgtgatttcttggtgacttggctctctttcactaggataggaattccaagagaataagaaccttatctatctagttgattgagcttgtgtgccagacactgtgctggacagtgacgatagaacaccatatgtgtgttgaataatcgaataaatgcacaaattaaaaagttaagtgccaagagagaattaactcttgagttttatctacagagagatgcaattaaaaaacatctcaaaaagatgtgcatttttttcccccatccactattattgtcaatggtatcagatgtgatttggggtagtttctaagagattttaagaattctagactctagggtaatgttctctaatgcaacactatgaagacaaattgtgccttttgtttatgtgcaaactttggttgtcactccaggccttgggtgtcttaaagaaggagcctggggcttgttagttattgaaagccagttattccaaggtgaacctgcagttctcatatgacctaggaggaggactcaaggatggactcaggcaggagagatggcaggttgcgaaagcacaccaatgctgggtgggcagaatgtcttctgaggcatgggtgggtggtgcaggaatccagccagaaatgcacaccattaaaatcatcaagagaccactcaaaagtgtaggtaatccagagtctgcatttagatggagtgaagtgcagtggaaagagcaataacccaggaattcagagacctgagctctaattccaccttgactagtaaccagtcctatgcctttcacaaaccacctttcttttctagcttcattttctctttctgtaaaatgagggtaactgggccaccccctaaatttaaagtctagatttctctgtaggcaacaggcaccagggcactgtggtagctggttggtcagtgggaggctttgaaacagggttccctgcacatattttttatgctttttaagtatgattgcaagtaagaagttaaataagaaacagggtgggggaagcaacatagttcttcacaaaggtggtacattttgaagttaaagataaaaccatcaggagaagatttgtttaaattcaacaatcctcactggtattttattttcacaatatatttggacaaaggtttggacaagtgatacagaaaacatgttgaggatattagagttagagaaggggtccaacttaggccatctgggaactctctctggaggaggtaagagcttatctgggcctgcaaagaagaaaaggacttcgactgatgattctaaagtgggagggaaggcagacagaatcttccagattgagggaacaccacaaagaaccagagctttacgtgctcagagtgatggatttagatgcattgttaaatattaccgacattcccattttttgagcagtggcctgcactgtgctaagtgatatttacatgtattatctcctacagttgcccaaactaccctcacaggtctttttcattactgcctctggtgttgaatgaggccaggtggagatgtaggaaaagtaaacattttgcccctaagcatacagttaaagtcagagagtgaactctgaatcctcaaatccagatctcctatcaggtaatgatgactacagtgtttcttattttgttaggtgtaaatatggtcagaatgccttccaatctgttttagtgatagtatagttattgagctttccttagtttacacattcacaagtgtttttgaagcactgaagtccctgtgctgaatcagattgtgtggtcagcagtgtgatctgaggaccctatagtgtgtagggtagggtgtgacaaggtaaagagggtggactctgtagccagtttgtctgtgactatcttctgtgtgactctgagaatgtcccctggtctctctaaatctaaattttaacatccattaaagtaggtgatgaggattaacaatatatttaaaattttaatacaaatattaacatagcacaaagtgcaaatacaatacatgtggccaagggttataatcatcgtctgcattatcacattgaatggatgaatcactggacttaagcataaatatctgagtttgcaacttttaaaatgcgtgttgtttaaaaagtcagctgtaattcaggaaattcagtttctcaactgtaaagtaagggtgctaatagtcccttgcgatgccgccatatatcttaatgaaatgaaggatgtggaaatattttcagaagtacaaagcctcatacagatgtaggtggtattttcctgatggtgatccccttggggctccctcactctttagagcttcggagcactccaagtgttggagggatggggcacaagtgttggcttttttgtttgtttgtttggatgtcattacattgaaatcagcccaaaccatctcaagctcatcccagtagtccagaaagtttttaacattcccaagaagtatttcaaactggtcagccaacttaaggtatgtttattcattgttgtttcttgttttgttacttttttgtggggagagtacacaccagttaaaagtgtactttaaaaataatactatttatgaacagtcaggaatgaacatttcagaatgcctaatggattctgaaatcgtactgcactggagaaccatcaagcatacacttccaaatcaagaaggccttggggaatgagtttgcctcccatttccctctcattcatgcttagtaataaatggttttattgtgaagtgggtaacacagaagcacatgagcctcatgcatttgagtatgcgacagctccaagtggtgttgtttgaaagagcatgctatgtttaagtgtaagtgtaatcaatgtgtggtgacatttcaagattgtagaaattcagattctgtttctgggtgcagtattgaacaccggattcagaaacgactgttgtctctatcatgctacaccctggcaaatgattaatgtgcttttagcttaaataattgggaggggggtgcctcagggaatgctaaacatatatttaattgctatacaaatatgtcatttccttgctaattcaagttatgcatgggaggttatataataccagagagcctccaagcatgatgtattgcacctataagctgagtcaagggactaacagggcccagctgaaggcaaaatattctttgctaactctgtcttagcagatgaagaattagatgttgaagcatgacatggctttataaaagcagaattattgtttggcagagagtatggtctctaaataactttctgagatgttgggaagaaaatgcattttcaataagaaaagagggcccaaaaacaacttcaagaaaaatatccttatttaggggaatgtgcatgttgaagaagaaatgagtattgcctttgacacaaaataaaatatacaagacggtgcaggacattagtttccctatggccacgttcgtattatagcctaaaactgaccttatttgttttgatacctacaaaagcaaaggtttctttaactccaattcttgtgttcttccctttctatttcaactcttcatctcagagagggagagagattctaagtaagactcaataggtatgaagctgtgctaaattatcttttcaggctcagttgatattgatggattgccttgctttaagagctgtgtaagttggatttcacattctgaggttacaaagaggtcatatttaaattttggagtgagtctattttttgttgacaccaccaccaacctgtgattctgagttatcaaaaacaaatgtgtgatagccgggcaaggcagctattgagaaattcaagaagtgagtggaagaactgtattttttttcttaaaaaagcctccctatgatagtttccttgaacacttctgtttgtgccatagaccctggttcattagcagaaagacaatagatggattaaacacagaaggcagagtcattcaacgaccagatgccaagcaaatggcaatctttggcatatctagtgttctgatatgggcagtaatcaaacgactatcagatgtgcccaatcagttgttatttcatttgcaagggcctgaaggtatcatttaatttaaagcacaatggaatcagaaatcatttaatgactgattgctgtttctcctagaaactgattttggatttggcagtctgaagaccccaaagtgccagagtctatgcatgggctacattaaaatacagctaggatcttgaatgagttaattagaccagttcttccaactttttcagcaatgttgtgattcttcttgacaaaataaatgtaacttctaaaatttcctcccactttttctaaacttccaatatttttgttctataacttttagcaactgaagaggaataatagcaatccattagtattttaaatatttccctaagcctttaaacataatacagatactattttgaaatatagaatatcgagaccagaagatctcaatgccagccttgtaaaatcaaggttatttgtacaatctactaggatctcattacatgtacatactggaaatgtttatttgattctgtaatgagtgtaagacaaggggaaggtacaatacaattcttatctagagtaaggctgacacaggacttatacattgcctcccatcacactcccacaaatgtatacatgctcaaatatttgaataggcacaggtttttgaagcttcccctctccaagcctttcaatgataaacctctgcattttattcccctgggacttctgttggctacaaaagctgggggcaaccagaaccttaacaattgtatatttctgcaagatatatccctatttgaaattgtgccatggagggcttgcccaaaggtgggaagctggagaaattcctggtctttgtctcactggttagggaagccattcatatatccccaaactagggtttccctcctcatacagagactggatgcctaccccagacacttggtaagaagattaaaactcctacttttgaagaactgggactatctccagaaggatacaagtccaaagacatctgggagttatagtattgtttgctttgtcagccacagtccccagcctttttggcaccagggatcggtttcatggaagacagtttttccatggccagggcaggaggcaggggaggctgggggtggtgctagagggtttcagaatgaaactgtcccactgatctgacaggaggcagagctcaggcagtaaagctcacttgccccctgctcacctcttgctgtgtggcctcattcctaacgggccacaggctgatacaggtttgtgtaccaggattggagacccctgatgtatagtgtaacgattaagaacaaagagtctgaatccagatttcatgtgaccttgagcaagtgattaaatttctgtgcctcagtttcttcatgataacagttcatacattagaagcttgttgtatgactaaataatagtggctggtatatattatgttacacacacacacacacagagccttatgccacatattgataatgggggttcgataagattattgatggagctgaaaaatttctatagcctggtgatgtcatagtcgtcgtcttatggtattgaaacatgttactcatgtgtttgcagtgatgctggtataaacaaacctaccaagctgccagttgtataaaagtatagcacatacaattatgtatggtacataatacatgataatgataagaaatggctatgttatggtttatgtaattactatactttttattattttagagtctatgccttctgtttattaaaaaaaaaagttacatttaaacagcctcaggcaggtcctttagaggtatttcagaacaagacattgtcatcataggagatgacaacttcgtacacattattgctcctgaagatcttccagtgggacaagatgtggaggtggaagacagcgttgttggtgatcctgaccctgtgtagccctaggctaatgtgtgtgtctgtatctttgtttttatcaaaaagtttaaagtgggccaggcacaatggctcacgcctgtattcccagcactttgggaggccatggcggcgggtggatcacctgaggtcaggagttcgagaccagcctgaccaacatggtgaaaccccatatctactaaatacaaaagatcagccgggtgtggtggcatgtacctgtaatctcagctacttaagaagctgaggcaggagaatcacttgaacccgggaggcagaggtttcagtgagtcaagattttgccattgcactccagcctgggcaacaagagtgaaactctatctcagggaaaaaaaaagtttaatgcatatgaaaaaaattttttaataaaacttatagaataagggtataaagaaagaaaatatttgtgtacagctgtatgatgcatttgtgcttaagccaagttttattacaaaagagtcaaaatgcttacaaaaataaaagtttataaagtaaaagttacagtaagctaagattaatatattattgaggataaaattttaaaataaatttagtgtagcctaagtgtaccgtttttataaagtctacagtagtgttcagcaatatcctaggctctcacattcactcaccactcactcgctgacttacccagggagagaaacttccagtcccgcaagctccattcaagaaagtgccctatacaggtgaaactttgtattttaaatcttttgtaccatatttttactgtatgttttctgtttagatacacaaaaacttcccattgcatcacagttgcctactgtattaagtacagtaacgtgctatacacatttatagcctatgagcaataagctatatcatacagcctgggtgtgtagcacgctctactatctaggtttgtgtaagtacacgctatgttagcacaacgatgaaattgcctaatgatgcattcctcagaacacgtgcctattgtgaaatgacgcatggctgtatatacagtcagccctctgtatctgtgggtttcccgtctgtgtattcaatcaaccacagatagaaagtatttaaaacaaaaaagaaaagaaaaaggatagttgcatctgtactgaacacatacagactttttacttgtcattattccctaaacaatacagtgtaataactgtttacaaagcatttgcattgtattaggcattaaaaataatctagatatgatttaaagtgtataagaaaatgtgtgtatattatatacaaggactacaccattttataagacacttgagcatctgtggattttggtatctgcagggggtcctgaaaccaatctgctgcagatactaagggatgactctctatatacatgtatgtgtttgctagtactatcatattttgaaattttgcagggcaaaaaatatcatccaagtctaatattttcttttttgttgaaatgttcttaaattttggacgagaataaactaatgccttgggaaatgttgctgtgatttcatgagaagttgttgtgccacgttttaattcatagttaatgtctagagctttgtataaaccatttgaaaaggtgttgcaacatgtccctgttagcaactttagttcttttagcactacgtatattgaatgtattaggagtttctcaaatgcaagaaatactaggtcacactgataaaatacttacctttgtatggctcctgtttcagactctaagacatttgctatcttgcagcattacattatcatctcagtataacagtgatagatagcaacaagacactcatatctaccccatccatacattcaacaagcattttttgaggtccagacatcagaaataaagtggtgaagaatggacggggtcttcaacctcttagagcctacagtctggtgggacaagaagacactgaatacatgtggcaaaaggaaactgtgtagtagtgaaatggggaaagttcccttgccccctcttaggacgttccatgagggtgtggcttgcttcttcagtgtgcactattcaaacttctaaggggagcatacagataggcaggttgtagggctctgactccatggcagtgtctaggggtgaatgtttacagctgaaggcccggggggcatgtgttacagggtgctcttttagtttaaccatcataggcagcttgtgttagctcaattagacctctgacttattgcaaggacagaggctttctgtatcccagggttcttgccttggtgtcccggaagaattggatcatgtgtcggcttggagaatgagttcaaggttttattcagtgggagtagctctcagcaggtagggtagccagaaggcagatagttttcccttggagtcgggccccttggtggcctgtgctctcctctgactgccccagccaaactttgggtcattctgctggtcggtggcctgccagcatgctggtgcctgtcagtgcattcctctcgacatccagccacccatgtgctcctcccaacatccagccacctgtgtgtctgcctgcttgcttgggtctcgggtttttataggcacaggatgggggcgtggcggggaaattcaacatttgggcagaaaaacaaaaatgcctatcctcacctaggtctgtgggcacaggcccagggttggagccctagccagggatcatgccctcctctacccagcacttccctgccccgcttccatatcatttaaagggaccacgcccttctcttctcagcatttcgcttctctatcagtagggaaaccaagagacagggacaggacggacatgcttgaataaatgaaatgtaattaagcagttcctttactatgtggtgatctaagacctcaaatgttaggggtatttattttcacaagaatcctatagactacattcatacaagcttcacgctgtttgtggtacagtgaagccagctcacactggctcatgagagccaattgttaaatgttcaagaattttaccaataagtcagttgttaaacagctattattaaaattaaatcatttataaacatacagttaaataaattaaaagataataaatactcaaaactcatttcttcctacatttatggctgttgatgctcttgctgtgatttagtttattgtatctgtgtagcggtggacgcaccacatgatagcgtgctcctgtgcatctcttctctgctccatgtagagtgaagtcatgttaataggttgaaattggccatagtgagagtatttacaccacagaaattggcaagcactacaaattaagatcatccatctcccagagccattggtacatagttactaacaaagtgctgtcttactgcaatgtttgacatctagagcatccatctgcttctgagatttaactggctattcagatgttgtggaatgagctgagaggagccagaaccaggagccaggtgactcagattccagtacccactttgctgctggtgagttttgtactgtgggtatgccacttaacaaatgttggtcgttgacactcacaagagatgggtaagacctgattctttccctgaaaaaggccacattctaagcagtaaaagacaaagatgcatctaactaattacatcaattgtgatttaatggtgctttgggagtcagacaagtaagtctcatattggacacttgggaggaattcatgagaatacaatatgtggagtaggaactgagcagaatgtattggcacacagtaggtggaggataaccttggcaagttatgatttagtcatgtctggatcaaggatgggaagctttgtttggggggtggtgggaagtggcagtagtggatgacgtaagtttataaattaagatcagattgtgataagcagttgtgtaataccaatggagtttataaactattttttacacattgagtaatgatctcttcagtactttgaacataatagctccaataactgaagaaggggtaaattaaaaggattaatatatcagaaaatagctggaaaaccaatttgggaattaacatgatggagaagagacaatacgagagattgtaagaggtaacctgtactaaacagttgatagtgaccattacttatccacaaaaaggacaattattacatctatgatcagggccataatttagctacttaagttcctagacattttcacttttgggggctccttcctccacaaaaatatgtgtaagaattatattttgcaattgtgttggtataaaaactaatatgttaatgtgatataaagtattttctttgacgtaagtgtctgcttttttccttccgattttaaaagaaattaaaacgtttgtgttttaatttcattcctctaaaaatattgtggcccttggctttgtgcctgctgtgcttttatggatgcgccaattctgtctctgactcattcaaaaagttgatagcaaaagagggaacatgttgggtaagttattggaagaagaggaaacactgtgtaaacatatagtcttttgagaattcatattggctagaacaggcttacataatcatattgcactggttacttcctttgctattggctttatccgtgtattgaaaaatcacagtactggctgtatctgtccttaatttactgaatgacaggatgtgtgtgattatgcagggtatgtgcaaggtaagtgtgtgtgcattgtggaaatgagtgaatgctaaacaaatgggagaagcaagggctatttattctgagcttgctgtcgtaagagagtcaagccatcactttcattttggcagagactcaaaggcaggcagagggctttataatggacaaaagggaagactttaggaatgccttgcttgcaggctgtgccatggagaagctggatgcagctaactaggactagggcatcctatgtgattggttaggatgtatatttggctttctctggttggtcctaagttggaagctgagacaaaattagggaagctgtcagttatttaatgacgtcctggccattttaggccagattgttagagttattgtttagcttcctggattgtcagtagagacagtagtctggcttcctgcaagtctgacttttagctggctggctccatgagttgtttattgtagatgggggaatggttttctgggaaggttgctgcattttgtgggactcagttctgttttatatacggtctggccatcatccatttgtatattcagtctttcaacatgtaccaagctctgtgctaaactgtacatctaatcctcttcatgatcctgtgaagaaggtactccaacatttgcagagaggaaaaggatcattagcgaggttacatgatttgttaggaaggggtagagcctggtttcagacacatatatatctgtctgtagcctgtgggctttacgaccctgccctacagggatacagcttccttcgttgcaaaatgaggagataaactaagttaatctctagagttccttctaggtcaaatttgctaattcaaaacttgacacaaggagtcatcctacttagttatgactgtagttggtctaccagagcaactatttactgccaacacaatgatactatgagtttaattttgacatatccataggaccttgaatatgttcatgtttcttcacttagaattttgaaaactcagaagaactgaagtcaagctacctgggtaactgaaccctttttatgaagtaagccccggaggagttgtgcttccacactctccccaccactgcaatccattttcccctggaacgatttaatttcatgcacagagagagattcggcgtgggcaaagagaatgcactatcatgtcattcagtcatgtctgcgatttctcagcttctctccagtgctgtagaaatgattaattccttgggaaggaagccaagaaaatcatgaaaatagcaaaaatatttcgactgcaattgtggagcacataaacttgtcagtggagtgatgagaaaactgctgggttgcctctcattagcagcaaaatattttatttatatatgtagtttttgtgtgtttttattgttgcagggtggagggtatcaggagggtttggggcttaggtaagcggggttttggagagaaaatatttcatgcccttgttggacttctcaaccgagggatgctgagctttctgccaacagtattgattggttaatatgttttgagtgttccgcggtgtggagcatggtagggtagtttacaacgtgtgacttattgacctctggacagtattgttgaagctgtttcaagaggcaggcatgtgtgggagacagaaaaaagagtgtgttctcacaataataatgatagcttacactgcctgacatcttagtatatggcaggcctgctaaatgctgaccatgcactgtttcactgaaccttcactggaacttagaaggacctactattgtgattcctatttcgaataattgaggtgatgtaattcacccatacctacaggtagtaagagataaagctagggctcagtcccagtactctgactcataagcctaagcactagccattaggtcctactgcctctcagaaacaaagacgactggggcataaaaagggctttacagatattttggtctgagacttttaaggtctatttctaggaggttaaagggtcacaaaggagccctggaggaaagagtattgatcaggttctcatccctgcattaacctgagcaggctggcatttgggttatatattcagtatctggactttgtgtaagatctcctttggagagctcattccaataaggaggagggagagaatgaagtttgaaagaaaactttttttttctagtttatgttctttattttagggcagtcggtctgcaaactttttctataaaggatcaaagagtaaaagttttatgcttcaaggtctacagataatctcaattgcatattcttttttgttttgctttttataaacttttaaaaatgtaaaaaccattcttagctcacaagctatacaacaacaatccccaaattggatttgacccacaggctctggctatactttttcctctccgttctagaggacaaatccaatgttcagagaaggaaagtgatttgcctgaggttacacagctgagaccagaactcaaattgtccagaagagctttacaggccctgttgaccacactgggcagttggacgttcactgtgacctgtggcatgccagacacagtgctaactgcttggaagattaacatgtgggaaaagcatccctgtctccccgagcagcttagagtctatggagagacaagtcttaaatgtacaagttaaccagccacgcggagccctcctcaaagcagtacataagtcattgctaaacaagtgactgaaattttaaatgccgagttccaaggaagcagggtaaaatgatttttgacagctcccaaccaagagcaggcacaaatttgatgggtttctgggcaaaaggatctgttgttctccatctctcttgcctattgaaaaacgggtttgaatctgtcctgaggctgataaagaggcaggatttattaacatagggccctttgcttctgggtcagcatccaaacctttttaacccctttatacaagtgttccagggaatttgaaagctgtccctatgggctggatacatctcccctgaggcgctgcctgaagttccctcattggttattctttctgcttaggcattggcctttggtttaacatgcagatgtgtcatctgcgagacctgacagtctgaagtgatagagttgtgggtattattcacatgcaagtgttaatcagagtaatattatcatccagctaagctctaagagaaagtgcagttaagttttacttgaagggaaaaagcagtggaaaacccggaatgaagaaatgagtgggcagaaagagcctccctctaggtttgttgaggaatctatttagaatcagaaaggcctgttgggggaatgttctgaacatctgatggacaattgaatgaaatgatctattagtttttacccagctctagtattttattactaagattgttgggaggggagcagatgataaaggatcctagaaaacaaacttctttctttatagttatgcatggtaaagctggctattcaccaaaataataggtgccttcctgccataatgtggagttgttgctggcaggtggttacacacccagagactacatttcccagcctctcttgcattcagatgtgaccaagtgcatagttctcactcatgtaatataaatggaaataatacataccacttacatgcctggcccataaaattgccttacctgtacttccccatgctctttttctcttcaaacttaactggacagaggacttctagggtaaccttgaacatcatatattgagggtggcagagcccccattagcttggatcctatacctctttgggtatattgtctaatatggtaggcactagatgcatgtggctgtttaattaatattaaactccagttcctcagtcatcctaggcattttgtaagtgctcaatagccacatgcatgcaactaagtggctaccatattagatagcgcagatgtagaacatttccattatttcagaaagttctattggattgctatgctccattgtatatgagttttcatgtgatttaaaatttattgttgtaatagttgatctattaatattactattaatacagagataagtacaagattgacagaggctttgctgaccctcaaaagacaaatatttgctgggagactactttgtgttagtagtcttctagagtttgggaatttgtcagtaaatacaacagaaaattttccatactcaaagagctcattgttataggccatgtgacttagctataggatttctcaaggtgcaaatttaggcaaatccaggatttttgaatccattatagcagcaatattctctataacctgtttttcaaatttcagctacattctgagcagcaggtccaccaaaccagaagcctgcctttaggagtccaaaagatcagaggacctaagagaaaatagttctgtctgtgaggatatccagtgtggctttactggccagcttccttgatgaccatgacctttccagggctcttgtacttggggcttcccgaaagtgtgtctgagtgcagtagtctttttatatctgctggaggcagatgctttagttcccttagttaagacaacgaagacaagagaaagatgaaaatggcttgcaaagcagattaatgacccaattaatgctgaattgtccatttcccttgttaatgtgccctgccttctccctacactgtgtggacttcacacataacattctctacacgttcattgtttatctttcttccttactggactgtacatcctagagaagaagggattatgtctgtcatatctaacgtcgtatttctggggcctggaacatagcagaatataagaaatatttgttcctgtcactatatattgacaatcatgtgatgaaaatatttttgcttttccataatctggtacagcaatttctaatgtgtacctcatgaaagttaataggtattccatagagtctatggaagttaatagatgttacatgaaatggggtgaggagggtaagtaaggctgctttaaataagcatgtttcattgctgcaggcctttctgaaccactcctgtggtaatacagtggttctccagcttcagtgagcatcagactcacctggaaggctgtgaaaacacacattactggactctgtccccagaatttctggttcaatactcttggtgtgggcctgggaatttgcattttaacaagttcccaagtaatgctgctgctattggtgagagccagcatggagatatgttattgacacttggagaaaatatacagtttccatcatttcccaaaagtgcttgactaaaggtcttattaaacctatagtcctgtctgacttgaggatatgatgacctactttaaactcaagtgccaaggaattataaattaatgcatccacattttaaaggggacatctggacagataactactgaagcacaaataatgtgttgctactaatagaatttagacttcattacagaataataaggacaaaagttttgggtggagtattaaaaagaaagatcacctactcctactagttgtaaaatgaatttgaacacaacttatattgcctggaaaagaacagtttatgtatgaaatcattgaaattactattgtttaaagcaattcttatgctttgtatctgcagctgttctagtttaaacacacattgcttggccctgacaacatgcagctttttacttcttggactctcctatgatttgaaatgtgttattcataagtttgctaaattccaaatatttgaaagaacagatgtggacctaaaggaataatcagctcttgctgatattgctccaaaaggcaatatatagagttgcattagaatgaagaactgcatttggctcttatgttttgagatgttggaatggcagagtgtctgtaggataacccagtgttgcatgccattttatgcttataagagtgttaatcattcagctcaatgctgattaacctcctagacactgcagataatatacaaaatataagacatatttcttgccctcacggagcttataagctaatctgggaagcaagacatacacatgaagtgattagagcagaggtttccaaattgcacagtaacttaagagaatatgcaaacagaaattgagattcccaggacccatgttagtcctattaaagcagctatggaaagggcagctatgaaaagcaaagaatatgtatttttaataagttccccaattgaggctgatgacgagacagagctggaacccatgggctatattaacaattattggatagtaaaaggtgctctatcattcagtgttacaataaacttttcttaatccagacaacatcttctgtattcattcaacaaggtaggtagagtctgtactatttcatcttgttctttcattggcaaagccatgaagggccctaattagcctaattacagagggctgcctagtgtagagagctgccatgcagttaagagataatgaatacattgtcaaaaagaagatactgtgacaaagaaagccacaggtggtagcattttacaacattggaccatagttggttaattagatatttattgagaactcactatgtgccaggcactgtgcaaggtactggggatatgataagcaaaccaagtggcctcaacattcatagcccctacagtctagtgaagatacacataggaaataagtagtcatggtcttttccctctttttaaaaaaaattttcataaactatacataaattcatgattttaaccattttcaagtatatagttcaagcgacattaagtacatgcatattattgtccaaccatcatcatcatccatctccaaaactttttcatcatctcaagctgaaactctgttcccattacataataactcccacaaaacctggcaaccagcaatctgctttctggttgtatgggtttgactactctgccgacctcatttgagtgaaatcatgcagtatttgcatttttgtgtctggcttatttcacttaacataatgtcatgaaggtttatccgtgttgtagtatgtatcaaaatttcactcctttcatactgaatagtgttccattgtacgtagacacaacattttgtttatcctttcatctatcaatggacatttagctgtttccaccttttgtctgttgtgcatcatgttgctatgaacattcatgcacaaatatctgttggagtccctgttttccattattttgggtatatccctaaaagtggtattattgacagtgagtatgagaccttggttcttatcttcttagttaaaataatgtaagcaagagacacacagcaaaggacatatggcatagagcaattttttgcaaaagagaatgcacactctgaaggttacgtgcaaaagagaaagtatactctgagagatgattcagcgcagactgctcgaaatgagacagcgttgcctgttactggggaaactccctttataggagttttacataattattcagaagggggtgggaagaggtattaccagtaagcatgttctgggtggccctctaggtgcacatgtgcagtagctctacttgcttgttcatacatgcatgaacttgcaagaatgcttgcatgtcttgttaacatcttaaatctccacccaggggtgtgtttttactattataataatcaaagggtcagtctgaagacaagtaatcaaaatgtgcatgctctctgcaggggaaagtccccactgaagctagttctacttggacgagcttgactgaaatgtgagcactagggctctttgtgttgatgcggtcaccatggttaccgcgttccccaaagacatggttacttccttgactacctatcctgcctcagtattgctggatcatatggtaattctacatttaattttttgaagaactgccgtactgatttccccagcagttataccatttgatagccgcggtcttttggcaagatagcagaagttaggtattattcctatgaggagtttatgtttatcctaattgtttcagaaacattaaggttgactacttcggggccacattgcggccccaggtcccaaatccacatctcctccaacccaccctgccgccttttcctgtctgtccttccatccatcctccccagtgaggaaaagtcacagcagtgcacttcagctttcagagtaaaagatcaagacaagcccaggatcaggtggcctgtaatgtgttccttagaatcacaatttctccattcctggtacagttttctgtaattctgttgccataccccaaaggaaaagctttgcttttagagaactcgcggtctattaaggttgagcaaaggccttgggcataggcactggggagttctaatctcaactctgctccatattgtgtggcagccccaggcaggtaatttaacctccacaattcctcatgttttctgactcgccgagatgattgtaatgacttccctttggagctgctgctaaggaaactgtaatgataggtggaggaatgtttgtgagattttgccggacgttcactaggctgcaaaagacttggacttaacttgctcccgtgtctttgtgtgcacatctagaattggggtccctcatgccagtcatatcattactctcagataaattccccattgccttatgaggattgatctaggccttgatgttcatcaccagcctttgcagttaaacatctggtttatggagggttttttttctttagttctttgagaagatagaaaagaacttgggagagaagggcatgatattccctgacatatttttttttctttttttttgagatggaggctcactatgtcacccatgctggagtgcagtgtgcgatcttggctcactgcaactcccacctcccaggtttaagcaattctcttgcctcagctcctcgaatagctgggattacaggtggtgcaccaacatgcccagctaatgtttgtatttttagtagagacaaggtttcaccatgttggccaggctggtctggaactcctgacctcaaatgatcacctcacctcagcctcccagagtgctagaattacaggtgtgcaccactgtgcctggccttcctcacctctctttcacccagaatactcagaattgagcacgaatattcttaagaatgttgttcccattcccttcatcggcttacctgtattatgtgtatataatgtcatcttcataggcattctctctatttgtcccatactatcttcgatgcagagctcaatacttcttcatatttgtcagggaaatgtcagtctcacaaaatattagagagaaatgcagattctactgaagatgtcataggggagccagagcaaggggttcacctctcacctcctgctgcaaatgtcttgattaacattttaatcgatgtatctttcttcctaagtcagtgtttctcttctgaatcaccgtgagggctccttgcctctgccttttacccctagtacatccagaatattttgtcttatttcttccctcctaccttttaaatctcaaattcctcctcactcctcatgtcatacagagcacctgactgaccagcttctgtctcaaaacactttatatgtataccctttctcaaaatgcaatggtagatcatatatattttttcttttactgatggaaaaaatgggtttgctgtaacaactgagataaattttatatttcaagaattttaaaatatatcctttaaaatattttggtatgaatttggcactttatttctttggaagatgtacatcatggtagacagatatctaagatggcggtcaagatccttgctccctggagtaaataccttatattctttcctttcagtgagggagaaacttgtaaatatgatgtgatgccacttctgtgattatgttattgcctaagggattctgcagatgcaattaaggctactaatcaattgattttgagttaatcaaaagggagatttttctgggagtcaccagcctaatcacataagcccttcaaatctgggtatagaggtcacagactaagaaaatcagagagtggacatgtgaaaagacacacatggcaaagaactgaggtagcttctaggacctaagagtggtccccaggcaccaactaacaagagagaaagagcctccgacctggggcaaaactttgatttcaaccttgtaagaccctcttcagagcacccaattctctgtctgggcttctgaaggacagaaaccaggcgatgacaaataaatgccactaaacatatcatcttctacatagcaatagaaaattattatatgcagtttactcagagcttgtttcccttccattttggatggtagaatattcttgcttttatgaaatgatcatcctagaagaggataggtttttctatcttaaacaaaatcttccttatttagcaaaaaagtttacaaacccatgtcaactctccctgccttatagggtttgtttgggaattttagtaaacagtaaaattgccaagtctagaaatcacagattgaaaatatcccatttccccatctgtcatctaaattttactgctctcccaagctctcttcaaggaaacttcttcaagggttttgaggtgttttctgcccctgagaaattgtcttcctcttatcagcgagttcttaaattctgtgcctgagtagtaactttaatttgttgtcaagatggttttgagtcctgtgcggtttagtttcccactttttgtcttgcctccctggctataggcctgggggcaggaccacagtttcaagctcctgagtcttctgctgagtctggccagatacctgaggcccagtgggtgctcccacatccttttgagttgatggattttacaaggcaggggccaaaactccctactaaataattgatcaacacgcctcttggattttgtatccactcctgtgtgtagatatcacctgctgtatttggccctatctttgcttaaaaaaaaaaaaaaaaggcctctgggcataaatccctctttcagagagagaaataattttagcagcagctggtccgtggcattaaagattgaatgactgtaatgtgttcagaccatggttggcttgttaggaattctgtaaggcaagaaataacctgagagccacagaccttggagactgcacgaaaaagattgttggtggtgatgtccttccttgaagcatcatgttgtaattcctgggccattaacacagctacccttcagtggcttctcattaactgcaggagaagctccagcgtctctgtgtgtcactgccagcttctcatccccttccatcctcattcctgcagccatccttgtgcactctgtgataagttttactcacctacttctgctctcctgtgcccctctcctctcctctcctcttctctttattttggtgcatccaattccctcttttggagtaaattttcctatagccttttctccagtctcgttcacccagtgatttctacatgtgtccttcaatccgttcaagtttcacctccacacagccttccctgaccttccccaggaagtggactttttcaaaagcacttagagtgttttccctgcagtaatcattttatacaagttctctttcagaatgctcaaaacagcccgatgaggtagacattatctctgtttttacagaggatgaagctaaggtttaaggaagttaagttacctgctgtattagggttttctagagggacagaactaataggagattttatatatatatatatatatatatatatatacacacacacacacacacacacatatatatgtgtatatatattagtttattaagtattaacttacataatcacaaggtcccacaataggctgtctgcaagcttgaggagtgaggagagccagtcctagtctcaaaactgaagaacttagagtccgatgttcaaaggcaggaagcatccagcacgagagaaagatgtaggctgggaggctaggccagtcttgctttttcacgtttttctgcctgctttatattcactggaagcttattagatggtgcccaccagattaagggtgggtctgccttccccagcccactgactcaaatgttaatctcgtctggcaacaccctcacagacatacccaggaataatactttgcatccttcaatccaagcaagttcacactcagcattagccatcacacctgcctaaatttttatggatactaagccagcacataagcctggaactgttataatcgcaacccatgcttatgatgtcaaggactgtctcttaacctcagagctgtggtgcttcctgggccctcacagtgctttatgcattgtctctgaagtagcattcttcctttcctgttgctgttgaaatctgtctccctcattggcctgtgagcctaagcgggggaggggatcatcgtctcttcatctgaacacatatccccagaaactcataaaatgttgaacaaacttgagcttaataagtaaagaatttttaaaagacattgccaaaagaaacagaacttgaaggaaaaaaaatgtaagggaaattataatctactcagttaaattttctatggtaaggccattactggtttcatgaggagtgtcttgagcttttgtttaattgaaaggaaaaggagattttcaaggggaaataccacacaaagtgggggaaataaaggaggaaggggagtaagtctatttctctcacaggtatatgattgttattatatcagtggtgtttaattttgcttacttaatgattattgtataaagtctgctatatgccattgtggagtgttcaggggattggttttaagacattccactcccaaagctcatttttacaaacttgccaccttatggtgttgtccttaacatatgtggaggaggaagatttttatcccctaaagtggagggtggtggcatttaatgcttggtttcgggaatattcatgtctacctcaaagatggtattataaagaaggagtagctgtgaaaaagtgatatttacattctcatcttaatattgctgttgaatatgtaatttgagattatgaaatcataccacattctaccaaaagtttattactatcctcttagctcttttgtcttttcatcttgaagtatgagtgtttcttgaagctttaagcattttacaagggataagaggacatccagtaacaacaaaatgaggaagccacattgcactccttggacatgtgcgtacaggatgtgtagtagatacaaccctgaaaagcctggtttaacctaatcgggctcctgtggaggaacccaagttggatttttttttttttttttgagatggagttttgctcttgtcacccaggctggagtgcagtggtgtgatctcggctcactacaacctctgcctcctgggttcaagcgattctcctgcctcagcctccccagtagctgggattacaggcatgtgccaacacacccagctgatttttgtctttttagtagagacgggatttcaccaagttggccaggctggtcttgagctcctgacctcaggtgatccacctacctccacctcccaaagtgctgggattacaggcgtgaaccaccgcccccagcccccatgttgaatttcatgtgcgtatcaccccttgtcttctgccatctttctctttgtcccctttttcctctgtctttagtcatcctctctttctttcccattcccgaggatattttgccttcttttccaaggctaagacctctgtgtctagaaagaagttgaaattgagagctcttcagtcagatttaccagttcctggtgactttaggcaagtccctgggcttcttcaagtctcagttttcacacctatataaaggggggtaatagcccctctttgctcacagctgcaagctctgctgttgtgttttctccctagtgaatggggcttatattctcctggaagtaggaagacaaaaactaaacagtaacataataaaaaatgcttacaaaaatatacttaacgcttcttcattcttcaaaaagaagtgagtttatttgactttgactctgcatcttaagccatacttgcttttttttactttggctacattgcaaaagaaaaataaaatccttattttctttctcagtgccctcaccacccattaattcactccttaacctgctacaaaccccttttttccttcctttccttaatttccaaattcaacaccctttgttcatttttcttctctttgatgtctgtgtagcattttaactgcaatggtcaaacttctctgttttaaaatcactatgaacattctttttgttctgtcctaaaggagggcttcctccctatttttgttaaagataacgcagttcttcagatcgcccacgcatcagaccatatcataaactttgagtaacccatcacttttatttgctccatcccaaccaatccccgggcccggctgggcccttatttgcagcatacccctttcctttccttgtgtttccttcccttctctcgttcttacattctgtagacagattagttgcattgcatctatgcccagcctcagaataattgtgtggcctttgacaaactacttagcttgtctgagctttggtttcctaataggtaatagaaatagtaattataatttttacctctaaaagttaatgtgaagattaaataaaataatggataaatagtcctatctactcctatgctaaacagctgacacatggtagctattaatattatctgcctcacaccatcccagcctcctcattcggttctttttactggaacaaggaccagcagtcatctcattttagtcccattatttttctttcctccagtcttctccatccaataccacagaaaccctgtacaaatactagatcaatattaccactgcatagttgggaagatgtatgaagtaatatgttaccacaagaatacgggctttggcttgaatttttattctgtatcttgatagctgaataatttcaatctggcttctgaacctctctgagtttcagttgcctcatgttgaagattgcaacactattcacaattgctaagacatggaatcaacctaggtgcctatcagtggattggataaagaaaatatggtatatatacaccatggaatactacacagctgtaaaagagaatgaaatcacatccttcacagcagcatggatgcagttggaggtcattatcctaagcaaaacataggaagagaaaaccaaatactgcatgttcttacttataagtgagagctaagcattgggtacacgtagacataaagatgagaacaatagacactgggggctactggggaggggggcaaggactaacacctatttggtactatgctcactacctgggtgatgggatcatttataccccaaacctcagtgtcgtgcaatatacccatgtaacaaacctgcacatgtaccttctgaatctaaaatgaaagttggaattatttttttaaagttacagctaccatgcagagctggtgtaggaattaaaactatcaagcacctagcatagtgcctgctacagagttcccactcagtagatggtaacagttggtattatagcagccccctgctctctttaacccagcgaatgaacctgtgaaacctttgatggacagtcaagctcccccatggtttagcctttatctctgcttccagctgcccttgctgtcttccttgctagtatcccttacatgagctattagacccatgaaaggggcctcatttttctgtctctgtcctgctgtttttcccactcctcttttctggaatcctaatcctcccttcttcttctccctggacaagatcaactctcacttcatgaaatgaaaaaaaaacatacaaaggatttaagattgttactggtctagaccttattatactagtctgtaattgggagtctttcacatttattgtataaatgcacgactttagcaaattatgctacagtctttggtattattttaaaatcatattgcttttatatgatttgcccccttgatgttttatttctttgatgccatgtgttgagcagttacacagtaaaaactcagtaaactcttattggtgatttttgaggttgattttcatggaattcatagctcgtgaaccatctgatccttaggtcgcaccatttatttcttggcctctgcacagaacctttttcttcaagatgttccatctgctttgcagaaattagctcatgagtcatttcctttccccaccctccttgtaaactgtagcagcagaagggcagcccctttggaataagtggaagtacaggggtcgcatggagcagtagggagttcgaagcaggctcaaatctgtcaagtcctagttcagggttattatcccccaaagcactgagaaattaggcagagacagctctgttcagtggaaagaaagtgctttggagccagacgtgactgggctcagatcctggctctgcctgttgtatgctttgcgatctttggcaacacagttaacatctctgggtccttgtttcctgttccataaagtgggaatagtaatatctgcctgccagggctattgtacaataagataaacagtatgaaaagacactagcatggtacctggcacagagtattaatttcatagtattattcttctgacccagagaggtttcagtgtcccccaaagagaacactgcagaaattattgacacatacaccaaaaactttgtaaataacttctcagccacattcgggcctgttgtaaaatcatgtttaaaagttaattattttgtccttcttgcttaacagggtggaaacttgataaaatacacctgtgagttagggtttttgttatttcctacctgacagccagaaagaaaagtctgaaaattacttttttctctttactttgaattttcaagagctgatcaatttttatgttccctaaagaggagaattcaataaggcagtctggaatccaactaataatttttagtcgtgcattctagggtggaccttgatagaatgtttgttccatctttgtgttttatgttcactcttttaaactgggtaactgaatgttgaaatgttagcctgggtaagggtcagagtagcacctgcttggccacatcctacctgggtgagacacagcattgctgtagccttgagtttcctcatcattcccattcaggctggttagcgtgagcctcagttgaccaaactttcaagaatttcaaagtgtaaaattagaccaggtatataaaagttctttaaaaagctgcagttgtatttgaatacaatcaaatggcttttttctacctatgtttataaattggaaaataacatagtaatagaaatagcaatggagggtagctattttttgagaatattctttgtgccccaggaccaaactaatttgaatctcaaaaaataaaatcctactggattaggttttgggtttgttttgccttttactcatgaggaaaaaggggcacaggaaaatcaagttacttttgtccatagtcttacttgtaacaaacataggtgccagtactcaaatgtggagaggctgtctccagagtcaaagaacttagagatcaaataaagaaattgcttactctaatattcattccttaatgtggcaaatatttattaatcacttattatgttccaggtggtacaaagcacaagagatggcagattgaatcaggcagggttggttctttttttttttttttttttgagacggagtctcgctctgtcgcccaggccggactgcggactgcagtggcgcaatctcggctcactgcaagctctgcttcccgggttcacgccattctcctgcctcagcctcctgagtagctgggactacaggcgcccgccaccgcgcccagctaattttttttgtatttttagtagagacggggtttcaccttgttagccaggatggtctcgatctcctgacctcatgatccacctgcctcggcctcccaaagtgctgggattacaggcgtgagccaccgcgcccggccgcagggttggttcttgttctcatcgaggacacagccttatagagtaaaataataaacaggaatgatgaaataaaataattgcacactggcaaatgctataactaaaaccagcaggtactgagatggagagcaaagggtcggggaaggccctatttggatcaaatgttcaaagaaggcatcctgggaggagtgacacttatgctgagatgcacgagatgagaagaagatagcctaccacataggtgacatgtcaacttagctgttacatagggatacagagctcagagaagaccacgcctaacatactactttagactatgaaggcatttcaccctccaaacctagaaggccaaatgcaggatgaatggtcatgtcttgcagttgaaaccttgaactttgagataggatcgcactctgtcgcccaggctggagtgcagtggcaagatcacagctcactgcagcctcaatgtcctgagcacaagcagttctcctgcctcagccacctgagtatctgggactacagacacatgccaccacacctggctactttttaatttttatttttgggtagagacagagtctcagaaaccttgaactttttatagtagttgttcaattatgagttacctctttcttgagccttcccagcatgtaaaacaaactttgtctttgctagcgcagacatttgaaatggatttctaataggttagcttccttggactgaagctagaaaattgggaaaaggattttttttttttatttttggagtagcaagtgtcttcacaaagagcttaggacttggagatggaggacacagtactgaggttttggagatgaaagtcatacgagttgctttccttgaaatggtggtacagaagagataaaactaactcatttgaattcagggaatgcacagtttctgagcttgcagaaaggctgaattttgaactgtgctctgcaccccattttctcgattagactataacatggtgtcttgcccatccctttctctacttccaggatttctgggaagaaaattaaaatacttaaagtagcactcaatatttaactattccaaagcactcaaggtaaaacccagtctaaagtggttccacaaacattttattgcattttctaaagcacggttcttatacatctctaccaggctcaatctttaaatgccttttgatttcctgtttcttgaaacttataatctcagcctataaaaataattttaaatgtccatcaattggatatcggttaaattacaaaatttttataaaacttaatgatgcatatcttttaaaaagaatgaggtagatctagataaaattatcataaaagaatattgttgatataacattgacaggaaataaaggttatggaggaagaattggcacacgttttctgtaaagggccagatagtaaatattttcagctttgcagaccatatggtatctgttgcaattactcatctctgctgttttggtgtgaaagcagccacagacactgtgtaaataaatgagtgtggctgtattccaataaagcttttcacaggcttttacaaaaacaggcggtgggctcacaggctgtactttgcagatcccattataaactatgcagagtgggaaataatctgttattaaacaacaattaaatatttggaaggatatgtaccagactgtttcatgatccttctattctagagatagaataacaaagtgatttttctagcatttggtatgttacaatgagcaatgattgcttttatactgagcaaaaacaatgaaggcactactattgtgatgaaaaatcagattttgcactgttctaggtagcttagtcctaataagtaatatttaactatatttttattatgcccgcagagcaattgccagtattttattctttggaggcagaaaccagaagtacagaattaaacattaaatttacacaagaacagagtatagttaccatcagtggtggccaaggtttcagtcttgaatggaataatatctagatatacagtaaaggtctgtctttagttatactctatctcgtattctagaagaagatgaatcttaatacaaactcttaaggaatgaaaaacttaagatataatgaaaccagaccagccacagttttaaggtatttctccgcaacccagattttgcattatcagagcactgccctgctcttgcatgatattatcctagattagaatgtactcttcatttttttcccatcatatggcattaataaacacaaatgaaaggagaggttatctaaaagtctattttgtatgattatttattttgcctgatggcaatgttgaagatgagatttgagcacgtggtctcaggtgggtgtgacagctctataggtccctactgaccctgaggctctctgatttcatgattcagctgttgatcagattcagtgctttgcaaggttcacatccttgactggtcttgacacgaaatgagtggccataattccgcattttagattcaatatccaggtgtaattgaccaaacaagaaaactaaagtgtagcccagattagagctcattttagtgaaaaaggaagcaggaagtaaactcttaggtattcaatggcctgtcctctgcttgattccagaatgccaagccaaatatttctcccacctgttaacatttccatataagtgaatcctgcttttggtggatttcaaataggggttaaatagggcaaaacttatggtttctaatttacttctaattaggggaaagtcgctttaaaacttttagctaaaataggcttagtatttacaaatacagaaacatggatttgaaaatatatatgtagtgaacatatatttagtggttcatcaaattgctgaaacattaattcaaccacttttctcttagagcaattacagttattccactgtctttccacagttacagtgaattctctaataatcatcactgcacatataaatttgtcctccttttaactatgctggacaaatgtctgggaggaaatgcccatcaatcaagtggataaaggaaatgtagtatatatgttctatggaatactactcagttgtaaaaaggaataaaataatggcattcacagcaacctgggtggaattggagactattattctaagtgaagtaactcaagaatggaaaaccaaacattgtatgttctcactcatatgtgggacctaaactgtgaggacacaaaggcataagaatgatacattggactttgagaacttgggggaaagggtggaggtggcaagggataaaagactacacgttgggtacagtgtacactgctcaggtgatgggtgcaccaaaatctcagatagcaccactaaagaacttattcatgtagccaaatgccacctgttccccaaaacactactgaaataaaaaaaaattttaaatgaaaaaaatggggggggaaaaaagtgctttggcaccttaatttgtttattcatttgtaaacatttaataaggatcccactgtatgacaagtcctgtgttatatgttggggatgagtcactaacttgctgtgtcaccttggacaaactccttcatctctctggtctcctttgttctactgatgtccttaagaaatcattcaaagaatatttacagcctcaagaggatcctaaggatccatattgtcaagttgcttccaaaagttttaggcaaatttgcaatgctatctgcactaatttcatcacaaccttgccagcaaggactttgtgtcccatttaaaattgtagtcatttaaatgagtggaaaatggcatgtgattggctttttttcttcttcttagattattaatgaggttgaagaatgtacaactttggctctaagtcaaatgcagtttcaattccatatcatattcttagattttctttgccaagaaacttcttttgtagtggcaggaagtagaagaaaggacaggagagaacaatgctttttttaaaaaaatctcattttagagaaaaaaatgtatttgagaaaactatttccacaacacattgcacattgataatgtgatgatgcttcaaatgttttgattgaattttttcatctcattccccaaggaaaatcctcaatttctatttttacccttgttccaaatgccacatgtatacttccatccctatttccctcttggagataatatctcaagcaataaggctgttgcatacctctctagtcattaataaatgatcgtgaacccttcaaaatgcaaaatactatatcggtgttttgggatgatgatgacaagaatacctcacaggtaaatggataaagcaaatgaattaaagtttgcaaacaatttttagagaaagacttgagtgtcgtcttagtctgcttgggctgccataacaaaattccaagactaggtggcttaaacaacagaaattattttctcatacttctgcagtctggaaagtcccaaatcaaggtctggcagcatttgatttctgatgagggctgtcttcctggcttgcatcctcacatggtggagagacggagcactggtgtcttttttcttacaggggcaccaattctgtcagatcagggctctaccattatgacctcacttaaccttaatcaacttctcagaagccctatacttagtacagtcacatagaggattagtgcttcaacatatgaagttgggggaggacccaattcagttcacagcaggtatctacacaggaactgaactgctcatctagagctcagttgccaagatcataatacattgtctggccctcaccccttgtcacagttctttcataagcatcagaaatgtttctagttttctcccctctggaaggaatggactggataaaaatattcaagatggtttgggtgactttcttatccattgtcttgtcaaccataaaaggtatctacaaagatcgtagaagatcgtagacatgtagatctcagaaaccacccagattttcagatggagaagctgaagcccagaaggatggaaagacttgctgtaggtacttctgataagcagttatccagatgatcctggaggtcttcggactcccaatacagtgcccaaactggtcatggatgtgattgtgctttcaaatggaagagtttatgagttccaacttcataaaattaagtcttgatgtgagttaggatatatttggttgcagataacataaattgactctgatcctaagcagaaaggatattgagagctgactgcattggtgaggaagggaggacttggttttgtgactggacatggtcccaggtggctccagcagccacagagcaggaagtattaccagcattatgtacaggacaccacctctgctgctagagagcacagcctccaccaccatcacctaaagtgaattgaaatcatcactttgtctttgagagacctcatacgatgtcagagtgccaggtagaaagttcccaaatgtgcttttctggatcttgcatttatggcttggactggaaagagaaaaagatctgacccttacatcttccacaaggagatggaggagtcctatttttacaaagaaatagagcatatcccaaaatagaaagtggttaggtgcaggacattcagaaaacaaaataaagcaaaaccaagtatctgctgcagtctccagtgtgagagcttccatagtagaagatggtttgtgccaaagtaagtccatttcaagcaaaagtttcatcttttagctttccctagagctctcttctattgctagaccagtgtacatttggcattaccttttctttttccattcagaatgaaatccagcgttgaattttattcttttatatttgttgattttagcattctgctcccattatggctctagacatatatagtaacttgtatgtttcagaatgcaagtaagctgtcttaacctactttgttagtttattgcacacaactaagagaagtatctcaaggcaggcttggggatgtttttttcaaccacccacagaatgcaggtatatttgttcattgataatttggctatgaagaaattatatatgcatcttgagtatttgaccacatgggttcactttttcacatgcggaattaactaaaacacaagtaacaatatcaatcacctgccccttaaacagcaagagatgtatttatcttagcaaaagaatgggagtgtttcaacagcaatattatctcagattatgtgtcttctgggacttcctacctttttctgtacagcctatggtcatcttctgtctcccacagcatagccaagaaaggaagctaaggaactggtgttctgttggtgagataatgtatggatctttatttagtccctgacatcagcacctccatcaccttcttttttagaatcagatttatagtttcttctgaacagggatacagcactgccactcagaatgacacctagctgctcttcatggatcagcctaagaatctgataaagttgttcccctagttgctggcgagtaataaaagcaatatggtggtgggttagcagctgattggagaagcaaatggatgtagagattggtggctaccatttgcaatatttattagtttcataagtgggcaagagaaaatagactgccttaatccgtgtttttgatcttttactgaactattttttcaaacatctttctgcactaggacctaggcctattcccatggttacatggcagaataggcattccatctgcataagtgatagttgccaaggtgagtgtgtgtctgtgtgagtgtgtacaaagctttgagaataagcttgtaaaatcacacaatgagctgcttttctgtatctttgagcagggtaactgtataccagtggatggaagagcctaggaagactcttgtgacatggctctgcccctgtccttcacctcagcctctccttccagggacttgataacagtccattggtcttggggtatcttactttagttttctcaacctctggccatagtaacattgcaaaaatatttactcacactttgccatcaactttaccatttatttccctcttcataacacctgagtcttccctctgtaaatattatctatatccaactgcagtaagtttagaacactgatggagctctctttctggtttgaatggagtcagattaaaaatgtccagagaactcctaataagtgcttttacatctgaaaatgtttagtatagcataaatgcaagagcagctctttcaaaggtgaagttcttaacatataatgtgaagcatgagggaagtacaaaaaaaaattacttcttagggcatttttactaagcccatgccattaggagcttcgggaatattggaagaattctgtagaatataccaaataatttattacttattttgtgtggatttcacaggactgttaattttttttgcctgatatttctgtataatttgcataaaaatccatctgaactgaagccaaattttaatttcaattgctgctttacaaagaaatgtattttacttctttttagcatgctggggtgaccgtgctcaggtttttgctgagataagatatcaatgagatatttccaccatggctttttgaagagattctttactgtgtaattgctaagacaattagctgcaagctacagctactattccttagaaatgaaagatgctttccactgtaagaattatgttactcctcagtggtgttgacaagatgaagaaccattttggatgttatgattctgaaatggctatctgttggtgatccatgcttcaacgtggttatgagtcagttctagtcaactgacatttatagcttttagtttatagactggggctttcaattcagctcaatcaggtgtctgcaaataaacatctgttatatttaagttttccagtgtctttctttcaactcttatttcccttaaatcaaatgcttatttagcagagcctgaaaataaaaataaataaataaatacataaataattaagaaatgaaaacaactccaaatggtctcaatggaatacttcacagaaaactgttatgaaaaggcacaaagaaagtatatgaaagggtttaaaatggagatagcctaatttctttcatgtccattaaactgttattaataaagagggtaataacccaggccagattacacagtgcattcaaggattttctcttagatcgttaaaataattgtcataatcaggttatgatacattcgagtgacactttgacagcgtggatttgcatcctgaatctgcaaactctgtgactttggataaattgccgatctcatattagtattggtttcttcgaagaaaatctgtaaactggatgcaaacaggcaatgactttgaccaccatgggtcagcacaactgtccctgtgaccaacaaaactcagccacacatgatcttatggtctataatatcatcctcatacttggtacaatcatctcttaagtgaagatgtggtataaagggcattatttcagagggggagaatgggtgaccccgtgagcagataggtcatatctcaatagccatagaatttaaattgctaaaagagcccttaagtaaatgagcgcttttagcagcacttgaagctctctgttggggtccatttggaaatcacagatgctactgaaaaagcagggggaattccttcacttactctttattgcctttggaaagatttctgattatgctctggtttagggataagtcctaatacccaatctgtgagcctttaccgggcatggcattcagcataaatgtgaaatgacagtgtgtgccctccggaaattacagagataaatacagcctcgtattatgctgggcccgcaagtccatggagtgcttttggaaacatacaccttccacccaccagctcagagtgttttatcagcactttactaatgtgatttccaatgaaggtcagaaagttaaacttatcacccagtagccagggttgatagttcatatcttgatcttatcattgggcctctttttcccattccaattgctttttgagggcttagcactgttcacttgggggaactgtttgctgtgagcaggagcttaataaaaataaaaatcttgttgtataaggcaaaaccaaaatgtccaaaacaatatccctgtttgctccccaaatgtggaatctgacccatcaatttccatcagaatgatgtgacccaataacaaagtcactgttttgtttttgtttttgttttttttcttctgtgtttgactcttctttctcacacgtcaaagaaaagcctgtagtgagcaggtaactgtcaaaggattcctcttttgctttttccacttcccattcaaatataattgattgcagcagcatcacaacagctttttaaagggagctacacttgaaatgcagaaggattcactgaaaatggctatgccacaagatcctcgatatccataagcaagataacctactatgttctagaatctccacattcatgaatgtcatggtatataatttttcagtttccttatatataaagcagggtttctcaacaacagcacttttgacattttgggctaggtaactctgttgtggtacatatcccatgcacagtaggtgcttatcaacatctgtaacctctgtcctgctagttgccagtagcaaaccccctaccccattgtgataaccaaaattgtcttcagacattgctctatgtcccttgttgggcagttgttcccttgtcccagttgagaaccactgatgtaaagtgaggttaatatttccttctgtaggttgctaggatcacgaaaggaaatttatcctttattaaattaaaagaaatagtgcacagggtgagaccaagaaatcggcaagttgtgaatgccagaggcctgcagtcttcactcacaaatgatttgatttactcagacacaaaactcatgctgcaaaattagtcttacaaaggcatataagctccatttcacgagggtcattagaaacaactgaaaaaggaaatattaattaattaataattaatatttaattaattatttaaatattatatttaatataattaattatataatataatattatattttattataatataatataatatattgtattatattatattttataatattatattttattataatataacattatattatattttattataatataatatattttattataatataatatattttattataatataatatattataattttattataatatattatattttattataatataatatattatattttattataatataatatattatattttaataaaatataatatatttattttattataatatattaattaaataataattaattaatattaaattggcaaagggtacaggtctactggagttccctgtaccttcgatgtgaaggttcacttaatatctagcatcatttcttgttttgaatgttacaatttgcatcttgagaacactgcctgacacttaacatatgcccaaagaatgttaaacggaaggagggagggcagcctctcaagaatagacccaagatccaatgatcacacaggcccaggctaaacttcagcatcctgaaatcttctaatcaattcctgggttcttctccatgctttgtgtatgtcttgactctaaagtctactatgtgaccttagtaagtagctttactgttctgtgccctagctttgtcatctataggatattaacagtgcgtacctccaagaattgtaccaaggagtaagtacctggtacattagtcagtgatggccaatacaactattatcgtcatcatcatggtcatattatagttttagggtgaagttgatttttttggatcccagggacagaaagatgagttgatcctactcctctgttcgtggcacatcactattattgatctgtacagggctctaatcttattttaaaagtaaaatactttctttcatttccatatcacatttccacttccccttcccaaaatcatattgttggtaccatagaaaatcattctaatgtagccattgagtaccttttgtttttatatgttcatgcatattgtcttgtatgcatgtatctaattttcataaataaaatggtgtgtatctgatttcttcttactctttttactctgcctgttactgcatgctcgtatactcctttgtagttgcctgatgcctaacaatacacaccaacacattttacccctgtattttccagtgaaaaccacacaagtggcctccaattctccacaaataacaatcatgaatgtcctcgttcataaacccttcagatatgtgtgaggatgtatttgggatatgcgttgtgcacacatctctgttaaaaacctgatacaggaaaccattccaaatttttggtcttgccacatcaatatcactgttacctgcagtttcattcagagtaatagcatcaatatatcaagatgatggcagagataaatacatttatttattgcatgcgtttttatttgctaggtagtatgctaggtattttatgtcctcaagacttcacattcagtaattcaagaggaggactcagggcactcagcatatggctgtactcatggccatgactttcttccagcaaaaggacgctaagcacaatcagcagaggaaaaaggtgcatggggcaccttttcgagaagaaatcagatgaaattattcagagtcctctgccagtggagtcacactgaatgcacttaattccctcaacaactaagtgtgacaatatgtgtgaaatgttgccaaccagaggaactttttttattgaggctggccacgtaggcagcctgtgcctgggatataccaaaatcccagattcccagaaggaaaacacatgttcagcataaaccctattgtcgaggaatagcttgccatttttatcctttctgagaatgctgagaaactttccaaaatccaacttcccaaactccagcgaaagccaaccttataagcaaccctttcaaaggacagcagtcaggcccaatacgttaactcttttcttgcccattttgttttcattatctgtcagtgcactgaaagctggtaattatgttttcatttttaaatgagaaaaccaagaatttaagtaacttaccccaggtcacagttcagaagaggagtcaggatgtacccctaagcttcctggaaaccagcctcctttttaaactgccttcaagaattgatgttctctctgctataatttcagctcattattagcaattaaacacacaaaatttaataatttctttctttgctgaacatagcttaatctgtcattttcttcttttagaagcagcttcttggaaaactttaagttaatacattgacataagcagagggtttggttattgctacagtcctgagaaagggacatttttttctctacttggatgacgggttttttttatttaatttccatagttttgggggtacatgttgttttttgttacatggataagttctttagtaatgatttctgagattttggtgcacccatcacccgagcagtgtacactgtacccagtatgtagccttttatccctcacccacgaactcacgcttccccccgagtccctaaagtcctttatatcattcttagccttcgtattctcatagcttagctcctacctactagtgagaacataggatatttgcttttctattattgaattacttcagttagaataatggcctccagctccatccaagttactgcaaagaccattatttcattctgttttatggctgagtagtattccacagtacatatataccaaatattctttatccactcattggctgatgggtatttacgttggtttcatatttttgcaattgtgaattacgctgctagaaacatgcatgtgcatgggtctctttcatgtaatgacttattttcctttgggtggataccgagtagtaggattgctaggtcaaatgatagttttactttcagttctttaaggaatcttcatactgttttcaatagtggttatactagtttacaattctactagcaacgtaaaggagttccctttgcaccacatccatgcaaatatctattatttttcgactttttaattatggtcttaccaccttactcctctaagctggaggagtaaggtagtaagtcattgtggttttgatttgcatttccctgataattagtgatgttgagcattttttatgttcattggccatttgtatatcttgagaattgtctattcatgttctttaattattttttgatgggattatttgtttttattcttgctcatttgagttccttatagattctgaatattaatcccttgtcggatgcattgtttgcagatattttctcccacactctaggttgtctctttgctgattatttcttttgctgtgcagaagctttttagtttaattaggtctcatttatttattttggtttttgttgtatttctttggtgttcttagtcatgatttttctgcctaagccagtgtctagaagaattttcctgatgttatcttgaagaacatttatggtttcagctcttagatttaagtatttgatccatcttgagttgatttttgtgtaaagtgagagatgaagatccagttcattcttctacttgtggcttgttagttgaataaggtgtcctttccccactttatgtttttgtttgctttgttgaaaatcagttgactgtaagtattttgctttatttctgagttctctactcagttcccttggtctgtgttcatatttttataccagtaccatgctgttttggtaactatagccttgtagtataatttgcatttgagtaatgtggtgcctccagatttgttctttttgcttagtattgctttggctatgtgggctcctctgtgtttccatataaattttaggattcttttttctggttctgtgaagaatggtgatgatattttgatggaaattccattgaatcagtagattcctttgggcagtaaggtcattttctcagtattgattctacccatccattagcatagaatgtgtttccatttgtttgtgtcacatatgatttctttaagcaatgttttgtaatcttccttacatagatctgtcacctcattggttaagtatattcctaagtattatattttttgaagctgttgtaaaagggatcatgttcttgatttgattctcagctttgtcgttgttggtgtataacagtgctattgatgcatatgttgatttagtatgctgagattttgctgaattcatctatcagatctaggagctttttgagtgagtctttagggttttttagatgtacaatcatattggtgaacagcgacagttttacttcctgttttccaattcggaggccctttctttccttctcttgtctgattgctctggctaggactttcagtaccatgaagaatggaagtggggaatgtgggcatccttgtgttgttccatttttcagggggaatcctttcatcttttcgccatgcagtctgatgttggctgtgggtttgtcatagatggcttttattactttgaggtatgtcccttctatgccaattttgttgagaggttttatcataaagggatgctggattttattaaatgctttttctgcatctgttgagatgatcatatgatttttgtttttaattctctttatgtgatgtatcacatttattgacttgcatatgctaaaccatccctgtatccctggtatgaaacccacttgatcatggtgaattatctttttgatatgttgttggattcagttagctagtattttgttaaggattttagtgtctgtgttcatcagggatatcagccacagttttctttttggttatgtcctttcctggttttaattttaaggtgatgctggcttcatagaatgatttagggagggtcccctctttctctatcttgtggaatactgtcaataggattggtaccaattccttttttaatgtctggtagaattctgctgtgaattcatctggtcctggactttttttgttggtaggtaatttttaaattactatttcaatcttgctgcttgttattggtctgttaagggtatctaattcttcctgatttaagctaggaggtttgtatctttctaggaatttatccatctcctctagtgtttctagtttatgtgcataaaggtgttcatagtagccttgaatgatcttttgtgtttctgtgatattgggtgtaatatctcccatttcatttctaattgagcttatttggatcttctcttttctttttttagttaatctctttaatgctctgtcaattttatgtatcttttcaaagaaccagcttttaatttcattgatattttgtaatttttttgtttcatttttatttagttctgctctgatccttgttattacttttcttctgctggtttgtagtttggtttgctcttgtttctctagttccttgaagtgtaaccttagattgtctgtttgtgatctttcagacttttgatgtactcatttaatgctgtaaactttccacttagcactgcttttgctgtaacccagaagtttggataagttgtgtcactattattcatttcaaataattttaaatttccatcttgatttcattgttgacccaaacatcattcaagagcagattatttaatttccatatatttgtatagttttttgtgggttctatttgtgggtgatttctagttttattccactgtgatcagagaagatacttgatgtgattttgattttcttaaatttattgagtctttttttgtgacttagcatatggtctatcttagagaatattccacatgctgatgagaataatgtatattctgcatctgctcaatccatttcttctaggatatagtttaagtccattgtttctttgttgagtttctgtcttgatgattgatctagtgttttattgaagtcccccagtgttattatgttgctgtctatctcatttcttaggtctagtagtaattgttttataaatctgggagcttaagtgttcggtgcatatatatttaggactgtgataccttcctgttggacaaattttttaatcattatataatgtccctcattgtctttttttttttttttttactgttcttgctttaaagtctgttttgtctgatctaaaaatagctactccagctcacttttggtttccgtttgcctagaatatctttttctacccctttaccttatatttatgtgagtccttatgtcttaagtgagtatcttgaagacagcagatatttggttggtgaatttttatccattctgccattctgtgtcttttaagtagaacatttaggccatttacatttgacattagtattaagatgtgaggtccctttatattcataatgttagttgttgcctaaatagtttggtttttttttttttaattgtgttttgttttagagaccatgtgagatgtatgctttaaggaagttctattttggtgtatattgaggttttgattcaagatttagaactccttttagcatttcttgtagtgctgatctggtagtggcaaattctctcagcatttgtttgtctgaaaaagaatttatttctccttcatttataaagcctagtttcactggatacacaattcttggcttacaattgttttgtttaaggagaccaaagataggacccaaagtccttctggcttgtaaggtttcttgtgagaaatctgcttttaatctgataggttttcctttgtaggttacctgatgcttttttctcacagctcctaagtgagaaatactcaatactttttcttgactttagatagcccagtgactatgtgccttggtgatgatcttttgtgatgaatttcccaagagtctttgagctttttgtatttggatgtctagatctctagcaagggaagttttcttcaattacttcctcaaagtttttcaaatttttagatttctcttcctcaggaacaccaattattcttaggtttggccattttacataattccatatttcatggatactttgttcagtttttaaaactcttttttctttatctgattggtttagttcaaaagtcttatcttctagctctgaaattctttattctccttgttctagcctactgttgaaactttccactttattttttatttccctaagtgtgtctttaatttctagaagttttgattttttttctactatttttctggaaagttttttattcatatcctggatttttttaagttggtttatccctttctctggtatctccttgagtagcctaataacctttggaattctttattggaaattcagagatttcttcttggtctggatccattgctggggagcttgtgtgatctttttggggtaccatagatccctgttttgtcatattgttagatttacttttctggtttcttttcatttgattagaccatttcctcaaattgttcttgaatttatttttgtttggactatgtttttttttatttcatttttcctctcaacgattggactttaatgattattttagcttaatttgatttgtggtgcctttaggagtgaaaactttgtatgtgtttcttagttgaagggattatttgtgtgctggctttcccagatgtggttgtagtcgttatgttcttggggtgtgggagagttcactgtcttctttggggatgaaatggcagagatcttttgaagcttatctcattctctcatggtatacacttaattttttcccagtattttattgaccaaacgatgattcaggcttcaggccaatgggagaggtatccctgggtagggactggttgtagataaggcaggtgggtagatataatactcaatggtgggccaagatcccagtcttgatgagggtagctgggggagctctcaattagatgtgctgaggtttcatcagggtgaagagggagagctatcccagctcccctgccaggccagcaggaaagctatccacctcacagcctcattcctattttagtgttttggctattcagatcagacaggcacctcttttcatctgtagaaatgttgatgttccaagtagggaggggttgtgactctgcttctcatgcaggtctgactcagatgtcttttttctttttcttaagatctgattatctcgattatctcctcctgtggggttgccctcatcctggattgttccaggaaggctgtctgtaggtgcatccatgctgcattcctgtaggagaagccccagctttgtctgcagtggtgtgccagaggggaacaaggaccccttctccaagtcccttcctaatcagagaggctgcctgcctattagggtagaggtgcagactttccctactgcccccagcactgcagttatgtctctgctgtaagaaacctcccactggcagaaagatctgggactcaaggtctgctgttaagattattttgtcccacggggtaatcccttgatgtggtactgtcccccttcccttaggaatggggcttcctgagagccagactgcaatgattgttttgttttttgttttgttttgttttttggacagagttttgctcttgtcacccaggctggagtgcagtggcgtgatctcgactcagtgcaacctctgcctccccagttcaggtgattctcctgcctcaacctcctgagtagctgggattacaggcatgcaccaccatgcccagctaatttttgtatttttagtagagaaggggtttcaccatgttggccagtctggtctcaaacttctgaactcaggtgatctgctgacctcagcctctcaaagtgctggaattacaggcgtgagccaccgcacccagccagactgcaatgattgttctgcttttctgggtctagccacccgtgggactacgaggctctgggccggtactggggaatatctacaaagggtccaatgatgtgactgtcttcaggtctcccagcagtggataccagcatctgctctgatggaggtagcaggggagtgacatagactctgtgagattcctccattgtagataggctaatgtgctggctttctagtatgctagttatgctagtagtgaagttgtcacaaggacagactcaggacctctggttagccagcatgttacaggtggtggaattggctgttattttctctttcttgcgagcagtatttctttgtcatgggttgctgtaaaggcctgagttggttggcctccagccaggaggtggcgtttgcaagacagcaccaggtacagtagtagcagtgggatttgagcttatccaaagttggccaggggaagtattctggtttctcaggcattgggcggggccataaagctccccaagagtttatgtcctttgtgttaagctaccagggcaggtagagaaataccatcaggtggggtcagggttaggcgggtctgagcacagactctctctccttgggcagggtgtgctgtggccactgtgggggataggggtggttttcagactgctggggtaatgttccacaggggagaataactgccactgttgtacagaagagttcacaaggggagtagtgagtagcaggctgtgataggtcccacctagctcccatgcagttggtgaagctggtctaactcccacagtgccctattaacagcaacgggtttagatccaggcagcctgcacacagaacttagacctgccccaggccagaagcttccttgcagagataacaagcagggctttcagaccacgctccttcctatatgcctgtaatgccaggcacctagctcctgcatgtgtatctgcagcacttcctgctcactcacagattctgttcaggagagttcatcccactcaaaattatatcacagaattcagttgggggtgtctttcaatgatgggtattttgaaccacagatcaaagttaaaatttttgtgacttacaacaaatataaagttaggttaatttttacattgcaatcagtttggaaaacagtgtctcttttctggtcgagaaagaaccactcactctgctctaatcattctctctctgttctcgctgtcatcattacagaccctaatgcttccagatgttgaatttctgaaatggcatctctctagtaagttggggagtggggatttggaccaggcagataccaaaaccatagcctattcacatgctctactgccttccccaaacaccattctaacggtgatccagagtaaactgggttgggaaacaagtcccatgaactaagcagaagaacaaaggcccacgttggtggctgaccaccttgaaacctcagtttagcacttggttggtgagcattagcaagcccctgtctctttgtgcctccgccttcttgtttccaaaatgaggctaaggattcctgccctactacctgtacagtattagtgtggcaatcatgtaggatggcaaatctaaaatcattttgaacagctaaaaggggcttacatcagttattactcttttagttgtatgtgatattaggcaaaaaagtcttttatcagggcagaaagctgacagcaccaagcaatggcctgtcaccatatgcagcttgataatagggtaaacattgtcaacacaagttggtttctccctgtgcatgtttcaggccccatttttctttatgtaagcccctttcccaaagtgtctccccttgtggttacaagatggctatagtaattgttgaccttgaccttgttgtctcaatgtccaatacctcaggaaaggcagagacagctgcttacatagctaaaactgagattcccagaatcaagtctcattgctcatgattggcctccaatgggtaacatgactggctataaaccaatcccagttaccaggagatgccaaatgctcattggctaggcccaggccacgtgccactcctgcagctgaggataccatcagagccacctggaaaggcagtatggaaggtgtgcatctctagctggctaataccagaagaaggatgattatgttggtaaagaagtttcagtgacatcttctgaatgctgtgtgtgtgtaaagtagtcttattaaaacatcatgatctaagaaagcagtatgttccataaactgattggagtaaggcaaaactaagatacacttttctgaacagagtttagatgggagggatggctccccgcacaagcataccatttattaaacacacagaggggaaatgtaattcaatgatggtgaggctccctccctctccagtcccatttaagcctttatttttcagcccttgtcatattggcccacttagggaagggtaactacagaaggtaattactaagatagtatttaattagttttggtttcaaataaaggtatttgctgcaaacccggccagcgatgctgatagacattaatgaatgaagccgtatgattaaaacatctggcactgtcaggcagggtagattcagggtggggattggcctgtcactgggaatgtgatgatggccacagaaaaccaaattagccaaacttaatgtttccctaatcattaggcgattgagttgacagtgattggtcacaaacatgcaccggtgagcagtaatgaagttgctaccagatcagttcagcataggtttttcaggctaattagctagacaaaaatgttaatttaatcaaagaaacatgtattcattaaaggtgtataagagagctggaggagaaaattggctcagtcattgaggaggcaaaattatagctgccaagcaagtcatcttgcttcataaaatcattcctcaatttatactatctcttagaaaagtctagttacacttaagcgtgtcatgtggacttttttcttaagatctgattattgtaaaggaaagatcatctgcagagcaatgtagaataaaagcaaatacttaactcattttatccccagaggattaattaattcctgtagaaatgttcttttattttgattcatagactgtaggaatagaaacagttcttagggattatctaattcatgccattctatttacaagaagaaaatgaggcacagaaaggcggtattacttgctcagggctacacagcttaacgcattttaatttgtgccctagacacaaagattccctgtgtagttagtggcgtgcaacttgtgaattaaacattggaaatgggatttccccctttgcagtatattcccctgaggatatactaaggacatcctcagatatttttacagagagacattcatctcaaaagatgacaatctgtctgtacttgtaattgtgaagaaaatgaaaaatctgtatgatggacaaatacaatttgactgtttatttcttggtgtggaatcatatatgtggaagtgctagaagtaataagtgctatttagatatcagctgttgctacatcaggggctaaaattattttctgtatccgctcttgaatatctcttttgcaggtgatagggagatgtagactttcctttgcaagttctgtatcctgttattaatactatgatagacctcctgagtccatgtatgctaatatgcatgggctactaactgtttaaaaaattaatgtattgatttgtccatctgtttattaattccattaatacttctgaagagaggttgtggtgatacattgttcaactcaggcctttgtaaaattctctctggattgggacagggagaaacccttaactcccaatgtttacgcaggctaccttctgtccaagatgctgtttgccgttatcttgagctggtaaaattctattcatctttcagcactcagtttgaatattctttcctccaagtagctctcccaagttcccagaccaagtgtggaccccacctgtgtgcccctagcacccaaagcctacacttatcagggtagctatcactccatttgtctgtagcctgtttgttcacctgtcactcaccgggccacagtttctcaatgtggaccaggtaccacccacagcaaaactgcctggattctttgtcaaaaatttgaattgattttatgtgatccacatttaatcggaggggaagaggtgtaaaatggattttggtcaatttcttaggttatcacacactataagattttaaaatgctatgttgttctctcagctagctgaaacatggataggcccacagaaagtgctcaagatgtatttgttgaatgaataaatgaatgaatgattgcacaaacaaatgggttcttatcatattgaaatcagttgtcaagtcatatagtcagaactttcccaaggaatttgactcacggctttgctagtgtaggattctgttccttatctctgatgctgtagaaccttaggagttataatattgtggaagctaaaagggcccttgaagatcatccaatccactcctgtgatggagatgaccagatgtaaagaggcttgcctaagattacaaagcacgttaatgacagagactaaatcagaatccacatttccgtgtgagtccattgcctttcctattatatcatgctcctgctgcagtggctaaatttaccctgtgaagaagcaaaggtattcttgctctggtaccttgaaggaaatgtccaaactctctggttttataaagatttagaaacaaatcaaatttttgatagttgacatgtaaccacccctcccagagacccctcctttatagctaaccaactcagccaagtctgatacatggaaaggtgctcatgaaagtgtcagggtgctgattatttcaagttgtaaaaatcaattaggaattgcagccacatagaattggagcatcttatggacagaaaagtcctggctgtcatttcattcaaatcctctgtgtcccatatttttttttattcccattcatttctcacagttgttgctacgttcaaataccaaacattatcctttaaaataacttttaaagaaagattgagttcatcctgattagtagtattcatggaatcttgtgtttgatgtgctagttttctttctaatacttattttaaagtattattttaattgccatccttgtaccatgtaagtcatcttacatgtaatcaatggtacatatgttgtggtttgggatgcaacttcctcattattttagttggattctgtcatcttcccattatacttcaaaggggagtattcataccttttcagaagaaatgttttatggtctaatttaaatgaaaataaagatgttatcctagagtcatcttagttcctctgaagtattgtctatggcaaaggagagctgacagtcttattttgaaatcacgccctgagctatttggttattattaaagaatgacagatggcacaaaggatgctaaggtagaaattaaggtttctttgtaggtttggcaaatgttatagcatacaagggctgtttcagtgctgtgattgaacaatgcaaacagtattgcattagcatctaaattttacatcattttcaagaaaacagagtcccggtaacagatggacaagactgatatttatctagcaacaaaggggagtcacaatttgactgctggatacttaaatctcagccaacaggggagatggcaattcagggaaattgaagaggagatagctagtgtcactcttttggagagggaagaaaatatatatgtgttttttaacttttggaaatgatagccaagttcaagttttggaattacctctgtgatttattacaagtggatatttgaatgagcatttcagatcatttccagatacacattttctaggtttgatgcagagaagctgtgagaatccttgaagctgaaggaacattacatttagagggattgaaggcttatgcctaagcatgctacctggaggatacattggggaggctggatttgcaactttaaaatggcaccacactcaattggaaatttaagtatctccgttagggttttgaattaggagagagcatatttgtcagatgtgaggacagtaggaaatcaagcatttttggaaaaccataaatgagttaatgtagtgttcaggacaagctgtgaactggcctctaaaaggaggtttgtagtaataacctgctgtaaaaattaccactgcttttctggcggttttgaccatatgctcctgctctgagagctgacattttctggcagtcactgtagcttaaggacctattattctgtgtggtggactttggctccgttttctgtgtgctttcaggtgggcaatttgcagcaagggagggaagccaatgggaagttaagtcaagatggaaggatctttttcaaaaggttgtttttttcatgcacagcagcaaagacaacagagccaaagagaggtgtttatgtttctacatggtagaaaagaaactccacttcaactcccacctttcccaggacactttcttttagctcctccagctcatgctgttctctcctgtttataaaattgcaaagtacctgtaatctctattacagtgtttagcgattaatcatattctaccaactcttttcttttctcctccattcttcacagggaaacttaaccaaatggtgtcccattttcaacatttttgaaagtcttttgtaccttctatggcacctagtttaattatgacagccaagtaggctaacagtaataataatagctgcagtagtaattgtgataacagtcataacaactcaacatgaactaaatgcatttaaggtggtaaaggctgtttaagctttcaaagaattaagtcttttaatcaaacaaacctgagagagttactgttatttcctacatttgacaaattgtaggggcattgaaggcaagaaatgttaagaaattgctcaaaatcagagcaagtacttaagctcaggcaaatattctgtcttcagagaccccactccaaaccactgggctctttccctaggtcatgaaaaataagtaatagcagctaaccttgatagagacgtgagactgctccaggcactattccaaggaccttcaaggtataatcccatttaatacagcaacccagtgaaggaggtgccctttgcaacccctttttccatttgaggaaactgagtttcagggagattattagttgctctgtgtaatgcagccagtaagtgaaagagctgaggagtgtcttatcttaatcattgtgtgacattgtgcttcaggacgtccttgaatttacctggatggcaaacaaatattatttacttgacgactccttcttggggaaacttagtacttaagagaaatggattgttcctggttttctttctttatctagggtagagtttctcactacatttttaaattattgcccccctcaggagcctgtttaaatctttttgcataattgccccctactccccaccatggtggggttaacattccatggtgaaatgttaataccatgaatatactgcatagctatttaggtactacatgaatatctgcgctttatacatgagaagagtaagaaattttaaccatcagaaaacagttcttatcctttggggacaatgttacaccaataagaatgcatggaagctgctttagcatgaactcttgaaaagcaatgcataggaacattttgattaaagtgagagctcactgtgcaggatgctccacttaattagccaggaatcctttatgtttataccattaatgaatatcttgttgtatcagattgttgtggaaaaaaaatcatggaaatcagcaagatttcccatttgtgcctttcactctatcttttgatgcccagaaagcattggaaacccatcctacagaaagtcagtgcagtttttttaattgaggtgaaattcacacaacataaaaataaccactttaaagtgaacgattcagtggcatttggtatattcaaaatgttgtctagctgccatctccatctaattctaaagcactttcatcatcccgaaagaaaaccccatgcccacttaatcattccccaatctccccttccctgtagtcattggcaacctaccaatctacatctgtctctatgaatttacctatttcagatatcaatatgtcatatagatgaaatcatacaacatttggcttttggtgtctggtttctttaacatagcctaatgtttcatccatcagtactttattcttttttattgctgactaatatttctttttgtggattatgccacattttgtttatccatttatcagttgatgggcatttgggttgtttctgctttttagctattataaataatgctgcgatgaacaacatttgtgtacacatttctgtatggcatatgtttttaattcccttaagcatagagtggaattgctgggttatatggcaactccaggtttaacttattgaggaactgctgtactattttctgttatggctgtactatttggcatctccaccagcaatataaaagggttctagttttttcacatcctggccaacacttattattcatcttttttattattgccatcctagtgggtgtgaagtggtacttcattgtgttttgatttgcatttccctattgatgaatgataattgagcataatttcctgcacttattggccatgtgatatacctccttcagagaaacatctattcaaatccttttctccttttttaaaatcagtttgcctttttattaagttgtaagaattctttatatattctagatactagacccttatcagatatgaattaccaatattatcttccattctgtgagtcatctttatactttcttggtgatatttttgaagcacagtagttgtaaattttggccaagtaaaattcattgatttttatttggttattgtttgtgcttttggtgtcatatctaagatgtactggcatttcaatgggactcttacagctattagatccttaacctacaggattgaaactttaatattgtgattttaagccccctggtaggtggcgtcaggagcagtgttggtgggagtggctttggagcagcatctttctagttgatacattatcaccgtcctactctgagcatggtaaagcctccatgaggacatggaagattcacctctaacaagcgtaatacattggtcatagacacagcgttggaggcaaatagacctgagtttcaatccagcatttacttgctagctgcatgtccttgagcaaattaacatatgtctcataatttttgtattctttaaagggaggataataatactctccttcatggggacgttttgtaaatagctaaatatcacatgtgatacgtagtgcatgcttgataaatgttatcattgtcatctatattgttaataattattactgtattctttactaatcattacatatggtacagaactaaaaatgatcatttccacattcagtggttctgcattgtctatgcaacatttcttctctattagtgtgactaattgaaagatgattgcacagataaacctcctttattttcaatcaaaatttgctattgccatgtagcttagttatatctttctccatgggttttataatgagacgtctattggtcacctgtataagtatagagaaagttagcctagaaatgtgtgtggaatctagccaaggccatttccttactttagctctctgcaatttattattaggacatcatgaaaccttgggggttaatttcatttacttcctgagtgctgcaaatgaataagttgctcagagtcacctgaggtggaaatggctgatttgcgtggaagaaatgactgtgactgtgcactcactgtcatcagggcacttttctaactgtgaagttaactccttatccaaggaaggaggtagcaggcagctgtttgggaggaggtggttctaaatctggcagtccactttggcctcaaataatggtgtacttgcttagatggcagtaacaatttaacagggtctagaaagaggaaataatagatttagctcagaattcagccgcagggttgttttttcagggcagagcagtgatcgagtgtaatcactttaagaaattgtgcgttgtttttctttattctctgagctgatgaaatgtatgcaaatcagctgagtaagttctgcaggtgtggctgggttaacaagtaaggatgctaaagacactccctaccccagaagtctggctaacagagtagaaagggctatgagacgaaattggtttacattggtttaaaccgctctaccatttcccatctctggaccttttgtaagtccccacgtctctggaagtcaatttcttcaactgtagagttaaaaaattctgttggtggttgttaaattatttcatttttaaaaagacaatgcatatatactgcagcatgaaattcaaacgtacaagtgtatatttcagtccacagtaggcaggcacttttgtagcctgctcatttctctttccattgtattttgagcaaatatttccataggtttccaagtcatttttgtaactatcatttatattcttcactaataggtctgtttgtcctagctgttcatcaagataaaagccctttgtcttctattataaatgctttgaattttatttaagttaataaacatactttgtatatttaccttgtatcaggtaccatggaatgtattcaggattatgatagaaaataacacagaaaatgtccttgcccttacagggcttatgttctagtggaggatgtagatagtacactagaaaacacaatgattttagacggtggttggtattttggaaggaaaccgtagctgtgatggagcaaaagagggagtggacctactttatagaggatgtatatattaatgcatgtagccttttctaccttcttttttttgagacggagtctctgtcacccaggctggagtgcagtgggtcaatctcagctcactgcaacctctgcctcctaggtttaggtgattctcctgtctcagcctcccgagtagctgggattagaggcacgcaccatcatgcccagctaatttttgtattttcagtagagacagggtttcaccgtgttggccaggctgatctcaaactcctgacctcagatgatctgcctgccttggcctcccaaagtgctgggattacaggtgtgagtcactgcacccagccttctaccttcttattgactgtttccttttaacgtatttgagactaacatttcaaaagatagtaacaatttcacaaactcttgatagcagacacaggttttggaaatagttttgccaacatgaatagcaacagcatcatgtgattctgcagcgtttccaccccaggaatcctcagagtgtgtctctctcactattgtctgggactgtgggtgttagaagttggactgagctgattaaaagctgaactcatgatcatctattgaagtttggtttgcaggtctatgttttattccagcctgggtcactgctaattgggtgtaattaacaccctcatgacatgtaaagactccaggattaggagcaacgggagcactagggatctcttctcatatccgacactaacttgctttgtgtctttgagagagtcatgaacttctctgggattcaattcctctgctgtaaaaatgagggggtaatttgtcatgaaatagcttctagatttcatcccatgtgccagtgttccactggatccatgagaaagagcacacagcagtgggctgtgggcaagggacaggggaagatgtaacacacttgacttgcatttgctaaccccaaattaggtaatttttctagtatcttatctaactataaaaatctgctacctttataaatcagaatctcaattctttgaaattttctgcatcctaatgacccacctaaacaaaacagatacttgctgattttggacatcccagcacgctttggagactctttctctccttctctctctctctctctctctctctctctctctctctctctctctctctctccccttccctctctctctctctccttccctttctctctctccttccctctctctctctccttccctctctctctccttccctctctccctccttccttttatctctctctctctctctctgtgtttctgtttgctttttcctctagctgtcaactcatcatcattagaagaatgactgtaactgtcaggctttgtgtaactccgcaggagcctcaaaaccctacacaaaaaataatatttctatcctttgggatagacacggtgcctctgctaaaatgcttagcttagaagcttggttaggcttccagatgtgttctgactcaggaggcagtttgcactttcaaaactgggtctccaacaatgctggttgaaggtacacagctggctcaatgtgcttagaggcttgctttcttccgaaagatgatttacctgaaaaggttgacattcctgagcataagaatctctctgtgcctccccgacttccaccccccacctccagacctccctgccacccaacaaaatgcttctattggaggaagaaaaaggttctgtcctgaaactaccataaatagcttttcctttctttagacattatggttaatttcattacagtatataatgaatgaaggacattcagcatgaaaatgtatctatctatccactgtaattacatcaacatttttaagcttaaaaaaatgttagagaaagaactctttcacatctataaccaagaatgctccatgtgtttttacaagaggataataaagacactaaatgggatagatggggctaagtagttttacagatggtggttgcatattaaagattaaattgctgtctataaataaaaccacttttacattaactaggttactgctttatcttaatttaggtataattgagagcattagcgttcttcataatagcccagtgaatgttcccgcagactgtaaacaggactccatggaatgctagctgatgaatttcctttgccactgagaagccctaacttaaaaggttgccctagaaactgctggtttccagctcttctgtttgactactctgacctaaaagtggtacatatcttttcattgccttatgtcgatgagtgtgtgtatacattgtacactgatatgttttgatccccaatgttggcttttcttctgtattttgatcaatatgactataggtagccagaattattgatcttcaaatcttgacctcctatctgcctggtaaaatgagaaccataaggtcaaaatggttacaaaataggaatgtattttgaagtgtatttatttaatttgaggatgaggaaaaaatgggaaatacaaaatatcagctttagaaagggaagggagaagtagagctataacttctcactttgattgtgctgtcactgccctcagtccggtgttcatgattgagaatgagatgttagcaacgtgattataagtgtggtctaaggagctggactagcgggttttagttctccccccgtactatttgtgacctctgtgaccttaggaaagtcacttaacctctctgtgctttggtttccttctctacaaaatgacatcataacagtatctgtcacacaggattcctgtacagattaaatggatttatccatgtaaaactgtggaagcaattgtgatgcatagtgataaccccaaaatatcacacacacacacacgcacatgcacacacacatacgcacccatgcacacacaaacactgtgtttttaaccgtcgtgtgctcttgaaacaattttattcattcattccttcaccaaatgtcaggggaatatgtactatgtaacctgtactgtgctagttgccagggagagaaaaatgtaaaaatagagtctataatctctaggaattcttgtaagaatatatattccgaaaaagcaggggtcttgtcattctaatccagtagcctcagtgcctggcatgtggttggtgcgaaagccacttgctgaatagacaaaatggatcatctgagatcctgaactccacccacagagccccaggaaatgcaggcagagaggtttcccttgaagcaaaattaatttacttttgtcaaaagaaggcattataggtgctgggcagcaaagataagtgtcccctatagacacagaaaagtgaagtctatttgtgtgagtttagaaaaccaaatggaaaagatgccataagacaaagtgagtcataaagacagttgcactggggtaggaggtaagagaagctcagtgtaggcgtgaaaattctgatggaccttagggtgtggagagggttttgatggctgaagagaactggactaggatattattgtagtgagaagcaggggtctagaaactcagccagcttcagggttctagagaaagacaaatcttaatcaaaagccctttttatttactggttttacaatgtgttttgtgatttctcccaacagggtttacttccctaattaaatttatcttaggcaaccattcaaaaacagcgtctttagcataaagggacagatggccaaagttctacctcccttccctggccgaaggagctgagtccaagaaaaggtgggctgggtaggaataattgttatgcaaattaccctttggtaaaattcctggaatgaaatgatttcatgaggatgagataataaggcaaagaatgtgaatcccagactcctcacactagagctcagctataaaatcgtagaattttagaattggaagatatctataagccctcctctccaactcctttattttatagttgagaaaactgaggctcggatacattatgcaaatttcccaaggtcatccatcaaatagtggcaaacctagagctttagcccaggtttctgcaagcatcagcagagaccattatgccctgtgcctgaaagaaagttgagaacacagaaaggatgttaaacagatctagacaggattctaaggatgggataacacaggtcgttaaaggtctgcagggaatttcacggcgttttattgggaattctgtagaattacagaacagattcttcagtgagattaatttacactccttctacttaccatcaaatcattccttaaatctgagctgggaaggtgtgatttggagcacaccgtttctgtacagatagaaccatataaaatttctaatcagtgactattttggatgcccagaaatggaagtttctgtagcattcaatctaatacaatataacacacaaatgagtgcttatttgctattctgagaacacagcagtgtggccaggaataattcatacttcctgaatcccctaaccaaattttccagtcctgctgtggccatgttgccttaatcaaaattcatctttctcctataatcttggtgtgcctcatagaatataaataccctattgggaaacctaggtgtttaaaaatctgataatggaaacatattttaaaagtcacagtgttctcacaagtaggagccgaacaacaagaacacatggacacagggaggggaaaaacacacactggggactgttgggaagttgatggagggtgggagagcatcgagaaaaatagctaatgcacgcagggcttaataactaggtgatgggttgacaggtgcagcaaaccaccatgatacatgttcacctatgtaacaaacctgcgcatcctgcacatgtatcccagaacttaaaataaaagtcatagcaatcattacctgttactgagtacttaccataaatcaggtgctgtgctaagtgctttatgattgtattttattctcattattaccctatgaggtataaaacacctttgttaatctctgttttacaggaggggaaaatgaggatcagtgagattaagcagttttgtacaaagtcaaactagtgttcaaacctgggagacagaattcaaactcaggtctgtctgaattctagatctgtacttttgactttcactgtattctgcctttgaaaaataccattgtactacatcctcctctcaagtcaccttttctgtatttgttgaaatcctcaatgcaaatgacttgcatttcctaaggcactactatcattagatggtcctgacttttcaaaagtttgtcctaatctcttacccaaaatgcctcccattccctttccactcattgctttgactcagccctgtggtatacttattacaaaaagacatcaatttcagtttaaccacctgcctaagtctgcacaaggtaaaatgagatcacattaattagaatactctactggggatgaagtatattggcctctcaagcagaccgtgaggataagaagtagtcctttaatttctttttagtgtgatctctggtataacactaggcagcagcagcctctccatggaacagctttggcaatcccatcttttcagggttcagaagcataagctggaaggactggtttaaatagcctcacattgcctggaaattaattttcagggcatttctgcatatacatataaacttacttaccctcttggcagttgcctgttccagggacaggcaactcatggtgatgtgtttgggcagaaataacattatccatgggttgcttaaagggtgggagaagtttctttttctttttcttttttttttttttttttttttttttttgagacagagtcttgctttgttgcccaggctggaggctagagtgcagtggcacagtgttggctcactgcaacctctgcctccctgattcaagtgattctcaagcctcagcctcccaagtagctgggattgcaggcatgccccaaccccaccacacccagctaatttttgtatttttagtaaagactgtttttaccatgttggccaggctggtctggaactcctgacctcaagtgatccacccacctcagcttcccaaagtgctgggattacacgaatgagccactacacccagtcaaatgtggaagaggtttcaagtctttattttgcttttctataagggctttatcaaagcatccaaagcatctgtgctatgtcttctttttgactgaagtcttcagctcctaactgtgtgttctttaagagatcagttctatacgattgagcaggttttaccatgaacaagcatctgcgatcaggtaagtttattaaatacaatgaagcagatttcttcctctcaattcaaaatttatctttatttgtcaaattatttggatcacgtttgttgcacactagaccataagttttgtaagggcggaactaagtctgaattttctcaccactgaatctctagtaactagttcactgcctgagaaattcagtatgtttgtgaactgaacaaataagtgagtaaaagaatgaactgaagggacttagacaaggaaggatagggaaaaggcctgagaatttactaggaggaggaaaagaacaagattaagagaataaaaaagaaggccaggcttggtagctcacgcctgtaatcccagtactttgggtggcggaaacgggtggatcacctgaggtcaggaattcaagaccagcctggccaacatgttgaaactccgtctctactaaaaatacaaaaaaaaaaaaaaaaaaaaaaaaatcagccgggcatagcaacaggcacctgtaatcctagctgctctggaggctgaggcaggagaattgcttgaacctgggagttggaggttgcagtgagccaagaatgcgccactgcactccagcctgggtgataagagtgaaactccatctcaaaaaaaaaaaaaaaaaaaagaaactttttcgacttcagaatttctccaaagctggtcttgctatcaactctgtgtgtgcatatttgggttatttggcttcattaagatggatggttatagtcatttgtagtgtctgaaagccaaaagctgcgtattctcaagatgggaggaaggatgtgagcatctgggtacaaacttactgtgagcaccctccttttgtaacccttcaaaccctggcagctggtcagaggagtctggttaacagttgctgctgcatttcaatattattctgtcttactcctctcagaaagcttcggtaggctacagtctgcattgtccatttttcctggagattggatttgccacctttgctggcagcttggctgttatcattgcccaaaacagccaatttttcatgtccacatcatcaatgggaacctaggtgcagagctaggaaacaaaaatgtggacacatgtttaaagcctgccccagctcacataggtcctatgcacactggatagggggcttaaggagacagtaaagctgccaaaggcaggaatttggttcagaaagagagttcttaaagctgcatttaaaagtcatctaaagtcactctacatttttctagcaaatgtaaataaaccagaacaagaattgcatacagtaagctgagacattcattaaaaaaaaaaaaagaaaagaaaaaaaagttagattaactatgtatctaatttggaaggattttttgtgttccagattaagagattcaataaacagtattctaattgttttctattgttatggtgggagttgtggaatcctattgccaacaaaacactggcattcattttcaaatcataataaatattgtgtagaatttcaattgctttttaaatgaaaactaattaagaggaggtagctggaacttaacatagaaacaaattaaatcagcgtgtgtgtttgtatgtatgtgcatgtatgcgtatatatcatttgaaaagtactttctttttatattaaggtaatatagacattatagaaaatttcaaaaaaaagagcaaaaaaataaatgaataaaatgtatgcagactccaataattcctgaaagaagggttttattttctgtttatccagggatgggcagacagattggacagtccatgtactttcttttttcctttcttccatctctcccctcccttcccttcccctccccttgcctctcctcccctcccctcccttcccttccctctttcaccatactattttccagcagcctttttcaactaaaaattgatgggtttgattagtagatcagtttaatgccatagatgtgtgggtctgggttcagtgaggcatttaacaatgtctcttattacatacttgtggacaagatggagaaatatagtctggttggcagcataattaggtgagttcatggctggctgaacagtcatacccaaaggaccttgattaatgcatagatttcaacaagcaggaaggtccctgtggtgttgataagagtatgtttaatagatattatgttcagacagtccccaggatgtgtcctgttaaggaatttttaaagaagtgttgatctgtctactccagataccaaaatcttgacaaaacttcccatcggagtccattaggcaatgatggagcagtcttggaagaatggaatcataaaagtagagatgatagccttgaaattgctatgggcacagagaaatctgccctccagcactgatttgctaccaagcctggagaagttttgataactaaaggttttaccaagaagacaaaagttatgaaatatttgctaaatccttactcagtgaactgctgagtttgctaaatagttaacctgatgtgcagtagaagaatatcaaactacaatatggtacaggcaattacttacacttcattctgtctgcactgagaagttattgacatacttagctaatgaataatgaaaatatttctacctggttccatgttagataacaaagccattggcctttgttgagctgtcgttctgtgccagatactgctcaagactctatataacttagctcattgattcttccagcaaccgtatgatacaggtattagtattattgctatttacaggagagaaaactgaggcagagagaagctacttcccttgcccatggtcacacagttgacttagggcatggcaggcaatccattccaggcagtcttactcttgagcctgtgctggtcaccccatgtagttgtagtagcttcccttgacctcctgagtcaaccatacccaccgtgcttcagctgcatttccactgcccaattttcatgctcatctcacttccaatcactgcttattcttaccacgatttttcatcctcattgcagagagctcatggaccttgtagtttttcaaaaattatgctctaggtatagtctctcactaagtttttctgaagagtttatttcttttcccacatttttctttggataatgcaagctgcagctctctgcatttctctctgaccacattctccttttgctttcttcccttttctaagattatacaaccacacttaataggcttttcagatcccaaagtttttgcaaagaagaaacaaagtaccctccttaggttacacatacaaagaaatccaaattgtgcagaaacaaaatatttcttcttaggtaaccctcataacagctttcccttttatagccaccaagttttttagaatacacctaatagatgcatgccaaatgaatgaaagccaacagggtccttggattttctttcctaacatttattttaaaacataggagttagaaattacttttaataaatttctgaatgccataaagctaagattccacggtgaatgatacagtaaagattcaaattaaccctgacatgctggaatgatggctcatgtcaataaaatgaaaggtaatgtagataaatgtgagatattatatttgtgctatctcccaaatagttgcacaagaatggaataaagaaaagaccctaattaataggaatttccataaaaatgattggagatagagtgacttgagcataaatttactatgacccagccgaatcttaagctacattaggtagaatagttttactcaatgattataaacattcatcttttgtctactattagataatatttgattcagttttgaatattgtattctaaaaatgtcattgccagatgacatgtgtcctagagaagacaaatagaatagcatgaacttagaaactgtgatgtatgaaggaaggctgaagaaactaaggatttttattctgaaagggaaaaatattagaggagaaataagataatatgacatttgaagcactgtcacatggaagaggaaacaggattgacttgtcccgctagtgtagagcaaatggacaatttcttctttatgtagaaaacataaagggaactatattataaggttcagttacagaactagctgttttacaaggtagtgagcacccccaccatcacaagtattcaattaggggctggaaaattatataccatggatgctgtgaaagcaagtgttacatgtaaacatgaatgttcatagtagctgcattcacaatagccccaaactggaaacaacctaaatgtaccccagtaggtgggtggataaaccagtgatgctcaaccaggggtggttttgctctctgaggggacattttacaatatctggagatatttttatttgtcaaaattgggaagggcggtactctcaaagtagttagagaccaaggatgctgctaaatatacaatacacaggacaacagagaattgtctggctcaaatggcaatagtgccaaggttgaaaatccctggaataaaaaacaaacaaacaaacaaaaactctggtacatccatacaatggaattggtcagcaaactgctgatacatgcaagaccatggattaatctccacaccattacacttcatgaaagaagccagacatagaagagtataactttatttgtacaaaattctagaacatgaaaactaatctacgataagagaaaacagaccagcagttgcttggggccaatggtgatgggagagaatgtattgcaaagggtcatgaagaatctgttggagttagaagtgttctgtatcttagttgtggtggggctttcacaggtctgtacaactgtcaaaactcattgcattgcatacttttttaaaaaagtgtgcttgattatgtataagtcagacctcaaattaatctttaaaggaaggatatctgcattggaaaggactgcactcaaaatgttctgttttgtttctcaactccaagatattttatttaggtccattgtgttaccaatccagtggacagagaaaaaagtctgtataaaaccttgttatatcagtgagggtccaatcatgagatagaaaccacacaataagttaaagaaggaaagtttagtaaaaatagctattaaattctgatgaaagagtaacaagaagacataaggaaactttccatagtaccccggggctgtgagagattacccaaggaaggctaaactagaagggaaacttctccccaagatttggatttatactttgttggagacaatgtggtgaattcagctcattgaatagcaaagaagtttgcttgtttgtacagataggagatgctcttcagtcattggccaagcagcaagaaatcctctggagtacatacaggatataggcaattatcaactggtggtgggagtatacaaaaggaagagttcatggggtgcaggtgagccaggcatggttctacagagagagcattggcatggtggcaagagtggtgatgatcctggctgcaggagagttgagtgtggacttgaagatggaatgaaggctctgatttgaggtcaggagtgctggagcttgtgatgtgcctgtcaagaaaactgcttctaggttattgtcaggcaaagcaaaggttgtaatgttgctgaggaactgtgtgctctggacatgtggctgggtcagaactccactggaagtcctcatacctgcaatgctgatacactgtgcatcaggaaaagacgacaagaagaacctcccttctgcaatgtgccttcaggagagagttcaacatcatcttccttgtaaagaaaggacgcttaaagaaactgaccattatttaaaagcacagcacatattgaatggtgactctggagttgataagcaataaatagatacttggcatactttttttattgttagggttgaattatgtcctgcataaagatataccaaagtccttaggcaattacaacagctttacatgataggactcatggaggaaagctgccctgcccacaccatggttggggcatagccagtgtatggcagtctctgaaggcagttgcagtcaaggacgcagggtccctggctacttgtgttcctactcatgtctgcattcctagcacagatgccttcattcagagacctctttagcagggccctcctgggataatatcttccccaggtacctttgctgagggcttcttaatgggaaaaggggagaaatttcaaagactttttttttttttcactgtggcttagtactcagtacttttccactcctattcctaccctctctccttcccttggcccctgtgtccataacatgacaggggcatttttggagcctccttcggtaggaaaggtgattctcaagcctctgctgaccacctgacccttgcctggagccttgcatagaggaagaatgaaacactggggaaccagcactttctcctgtccagcttcttgataggctattacagtgattgaaggcttgatttttattttaaaaaatgtatcaaagtcctaactccaggtggctgaaatgtgaccttttttggaaatagaatctttgcagatataatcaagttaagatgagatgggccctaatccaatatgactggtgtcattataagaaaaatgccacgtgaagacagaaacaaatggggagaatgctgcatgacaacagaggcagagattagactgatgcagctataggccgggaatgccaaggattgaggaccatggccagaagcgagggagaagtctcagagggagcatggtcctgctgacaccttgatttcagacctccagtccccaaaactgtgaaagaatccatttctgttgtttcgagctacccagtttgtattactctgctatgaccatcttagaaaactagtgcagtttggtaccaggaaataggggactgctgtaacaaatatctaaaaatggggaggtagctttggaatgggataacggatggaggctaggagagtttgtggcacttgataggaaaagcctccttgaatgttggtagatgtgtacatgtttaaggcgattctggtgagggctcagaaagagaggagagctgaagagacagcatctttcctcttagagaatatgtgtatcatcatgaacagatgttactagagatgtgaataataaaggtgcttctggcaaggtcttaaaccaaaacaaggagcgtgctattggacacgagttaagaccatccttgttgtaaagtgtcagagaatttagctgaattatgttctgctgttgggaggaaagtaaaacttgtaagctatgaaggtgaagagatttctaagaaagagtttagaagtctcagcctggtgtctccttgctgcctatagcaaagtgcaaaagaacagagataaattgaggaatgaattgttaagcaaaaaaaatctctgggattaccagaagctggaagagctgaggaaagtttctctcctccaggctttagagggattgtggttttgttgacgccttaatttctgacttctagtctccacaaccataagattataaatttccattgttttaaggccacaagttgtaggtattttgttacaggagccttaagaatctaatacacttggcaggtttcattcattcattcaagttttgaattaaaacacatttagtaattataaatggtttgtgggttagaatatagacaaaattttatttttctgtattgtagtaaaaaaatcacattaaaccaaaagtaacttggtctcagtgaacatggcttgattggagcatttgcctaaggaaatatttttagtttctgaagttgtagcattcttcagttatttacattttactagaacagaaaccaaaaccacatttttatgctaactttcttatttgctttcccatgtgtgaaaatctttgtttattgtactccattcagaagctgtatttcttcaaaatagtaagggtttcagcagagacaccttattttctttaaaaatacaaatatttctaaaatagcattttttaaaaacttgctttcattcttcaagttggtcactcttgctatgcctttgatcctctaaaataatttctgacatatataaaagggcaacttgacattcgctgattgaatatgtagtagttgttcacaggaatttaaatttcttttataacctttacaacttccaaaagttaaatgcttaaaccagagtcatttccataaaaagcacaaaacagtaagtatttgacacatccattcaaaaatgtatcaaatattccatccctgaatggtggctttagatatttggggatatttagtgaagcaccaaatttatactattgttttggctcacattcaggaaaacatagaagcaaataaaattctctccactgttatttctgcctttgcttcaagacccctgcccagtaatatctgaccctggggcaaacacagtaatctgagaagatatgaaagctgaatcctttccctatgccgctcatagtaaggacagaaaaatgtaaatgtctctcatgccctacttcacagttggttgggagacatgtgttctagtccctgtttgagagcttgggaattctgagactatttaactcctctaacttgttttcttatttgggatatgtgtatgcaagtgatggtgtccaagagacctggagtccagtccaggcctttctataacctagctgagtgactttgggcggtttaggacctttcccagctatgctatgtcttccagagccactgatgtgggccaacccctccccagtcccagcctacaaaccacactgtgccaacgcccaagtctttctgtggcaaacacaaggaaaggaagagcctgtcagaaggtgcagtggccatggaaagaggagcccagcagctctgatccccacaggttcccagacctgtgctgaaggagaatcctcattccccagcaggcaggcaggcaggcacacaggccagacacactttctccctctccgtccccataaggacaactctatgtacatgccccaaataccaagacaggcatttcagttaaatattagtcactaagaaaatggggttttggaaattcactttgtaacatgtttattcttttgcgtgactgtaggttttgggggattacttttctgatatgtttgcttttaccaaaaaggaaaacttactgttgatgtgatcgatgtagtagacaccaatctgagggtcaaaccctgattcccatccccatggcagctcatccccaacacagtcagcaaatgacaagggcttcgttaacctacaacaaaccagaatagacacaccagtgattctttccctcaaaccgcatatgtcaaaattcagcaccttgattaacatctctaaacctcagatttttatttgtaaaaatgaaaaaaatacaatattcatgcagatattgtaagaattaaatgagatagtctatgttaaggataaacacaagttaccttgttaagagctcactcatgatcatcatcaccaacatcacgatcatccacctgaaatacagggactatgatgcttgaatttcaagagcatgatgagaatcacatgggagagcctttgttaagtgtttaaacaagtgactagaacatggtgagtcttcagtggattttaatttcttcttttccctcaaaacttgaaactctttgaaagatgccaattttaacagggatttttttagaggctaaagataggtttcttttttaaaggaatttaacctgaatcatgaataaaataaagccctttcaaagaatattgtaattatcttatttttcattcaacagaaaccatctaagagtgcaggatctcttgattagatgccaaagtgaagggaaaaaaaatcacctgagtccaagcaccctgaataaagtacttttttgccctttctctttccctcctgtctttgtcttctccctttgttcccaacctccactttataagtacataattgtgtgtatactatgtggcttacactattctgagtgctgagacagatggacattagataaacaggttcactgcactcaatgttcaatgttctagaagaaagcttgtagtctaagtggagagttaatagtctctcttactatcccagtcattaaatccttaaaacaggacttttcaaacttctgtgtgcatgagaatcacttgaatgatttgttaaaaacagtctcttaatttaagaaaatgagagtcaacggtttggcaactatttcccattttgcctgtgtcttggaggaattgttttgtttttctgggactcagaaatagctcagtggccacatcttacacaggaagaaatgaagagccctttctttgcttcccatgtcttctctcatgttttaaagaattgtagtaaatatttattagcgctttgataagtgcttgatgatttaaagaagagtatctaatccatttaacataccatcattgcattgaaaattagaaaaggccaattagcatcttgacttaactgttttcagtgaggcgattttcaaggtttaactaaactgatgtgtaaagtcataggttcagctggacagcatgcatttacctcctgtttccttctacagattagctaggatttcttttttatgttccctgggggtttgaacaaggaagaggtaagtattggctgaaagatttcatgctcatttacagggaaatcttctttagataacccctcctcctttccacccagactattcaaatatgtgtctttattgcatatggcaccgctataatgaaagcaaaggcatcactaatggattgataccatcaataaagcttctgtttggctgaggtctttcctttcaaacctgagctgaaggtcaattagaacaatgatggaaggcagttaatttcctgtttataaatagagactagaaaatgtagtattgattgctgcatttcaaggagggggacaactaccctcaactgtgggcagtctaggatgatgtaatttataaagccagagaggacagtgttgctgcttatatcaactgaacaatgatttatttgaccaaaaccacattaagtctttgagtctgaaataaataaaatatagccctgccttttaaaggtttaaaattttagacatgaaatcaagatctggaaatcattatcataattgtgcatatgctaatgcttttggagttcaaagatgggaaagatccactggataataggcactgcaatagaattcataaaggaaatgggatttgaccagaactttgaagaatgggaaaggtcccagttaggcatgccacagacagagagaccagacagtgatggatccagcatgagcagtcttaaatattgtgtctggttatcaatgttgttgtatgaatgagttagtgactgactgactgactgaatgaatgaatgataatctggggcctgttaccctcagctcatttatttcatagcctgagatagttaaggggtgactcactctagtataccacaaccccagagtcttaaattaagagatacagtataacagcatctacaggatgttaaaagatggttcacaaaaaggagttccctaaccaaataagttttcaaaacactgaggtgaagttaaacagatcacattttactgcaggcttcttggaaccttgaacaggtggctatgccttgtcattcttcaagaagttaatagaatacacaacatttcccaaaatgatttggccacagaaataatgaaattaattaaatatgtgtgtaaatatagacagatatagtagagatttttatttccagaatagctcatagagaaagtggttccagggcatactttagaagctgctcacacaaaaccgttttcttttgctaggcttttcttaaaccaggagtacctttcaatgtgagtctgtgcctatgtccagacttttcatttcttacagcaactcttcccctttgtaatgtcaattctaaaaagcatgtaaaaatgtcagaatatgtggtataagatgtgtattgcattcttattataaaagcatattgttttttaatagtttataaaagatatataattaggctatttgatgtacttggtctttcctgttgagttaacaaatgtcaaaaaacccatcatatactcaaaggagtttctgtaacaggataacattaccagaaattctggaagaaagaaaatgaggagaactttattactatgaaatgagagtaaatttaatgtgacaaacaagcggataaaatgaaacaattttaattttgtattaaagatagctataatgaaatataattttcttagggggaaaaacctttcaggctataaattagttttcatatataaaatattgttaataaattcatttttgccatggattttcactctttttttctcgggtcctttccctttttacttatcaggaaagataaggactctactctggagttaatgttgataattttacttcacataattaaatcccaagtcactcatatttactcaaggagcaataagcctttaggttctacttaggagggagatatgaagtagaaatctcacacttactcatttgactttcttcctctgaaaatatcctttgtgactgaccaggtttctttccttccttcctggaaaataaattctgcattgcctctagtgctgtatattaaatcaaaaaagtttggaccctaattgtaccttgagaccttgagcttcctacctgcatagttcttacaaatattagagatttaggccagaggaagaagtatgagtgaaggaagaaatatgtgaaaagctgtttatacaacagtaacactaaattttatgtactgaagttcaattatataatgactcagaggacaaaagaaatggatgggaggtgggagtgaaaagaggaaaataaatatctgtgcttttcctcttgttcaaatgaggccttggccttttagttccatggcccaggaatccacagccagatgacaataacaataaaagctaactgtgaaatgttatgtttctaacaacccagcttctggcttgaaggaacaatgatttaaaattccaaagttaaccaagactatgtgcatgtatattttttttctaccttatgacttctgacacctattcctacttaagatgctactctactgaaattcacattatataaccttagaactgaaggaaaccaaagagatatttcttagtttaataactcttacttaactattggagaaatcaagacacaaagaaaggaaaggacttaatttactaaattttgggtgggtagatacaattttgatctctttaattctaacaaagtatccatttcactgtgcttataaatcagataacctaacttattagaattatgtatagaagaggattaagtggattttgactggctagcaatagaaataatagtgaggaaagtattcttttatgaataaaacacaagtgtttagaatatacagatttttctttattctcatagtgaaattctcaacagaaaggctataatggtcttctttaattttatggatttacattaggttggtacaaaagtaattgcagttttggccattactttcaatggctaaaactgcaattatttttgcaccaccctaatagaattgtatgagtttagcctttatagaaggctataattttatgggctatgaacttatgcagacttatgaataatagacaattataattaatatgaattctgatgaattatattgtgattcatcaagagcttcttattcttgagaaaagttcagcatgaaataaacccaactctctcttctttcaaactcttccctcaatttggaaagattgtaatgacactttgaaagagtggcccactctggaaaacatcagagacagtgtgtattaacagcagtttgtttttttggtttgtttgtttgtttgtttgtttgagacggagtctcacactgtcgcccaggccaccacgtctggctaattttttgtattttttttaggagagatggggtttcactgtgttagccaggatggtctcgatctcctgaccttgtgatctgccttccttggcctccccaagtgctgggattacagacatgagccaccgtgcccagccttaatggcagtttttaaaaaggtgttgacttttcccaaagaaatcccttttagagagcagacgtatagtcttggctttcaagcactgataaatttgtaataaagttctatgggatttaggctttgaggcacaatttttttttacctgaactatactttttttggataaattaatctcaagagggaatgttttttgttgaaattagtgtggtgttttctgaggtatggatggctaaaaggaacagaaagggagaactgagtagatctttgttctcctaatatcaagagcataagattgtgcctttgtcactgaagttctgtctccttcacttacttcactccagatgggtgtgataaaaactgcccagctaaggccaggtgcggtggtgcgtgctagtaatcccaacactttgggaggcccagacgggaggattgctttagctcaggagttctagaccagcctgggcaacatggcaagacctcatatctcaaaaaatcaaaaaaatgagccaggcatggacaggaggattgctttagcccaggaggttgaggctatagtgagccatgatcctgccactgcactctagcctgagtaacagagcaagaccctgtcttaaaacaaaacagaacaaaacaaagctgctcagctaatgatgatgatgaaaaacaaattttagctaaatttactatgtgccaagtaccgtgctcaatgatttgtatgcactgtcttgtttaaaactcacaacaatcctatgaaatagtcactattatgatatccattttacagatgtggaaactgaaactagaaaagattatgtagcttgcccccaaatcacaccactagtaagtggaagaatctaggtttgaatctacatattttttttttttttttttttttgagaaagagtctcaccctgtcacccaggctggagtgcaatggtgtgatctcagcttactgcaacctgtgcctcccaggttcaattgattctcctgcctcaccctacagagtagctgggattacaggcatgtaccaccatacctgactaattttttgtatatttaatagagacagggtttcaccatgttggccaggctggtcttgaactctggacctcgtgatccacctgctttggcctcccaaagtgctgggattgcaggtgtgagccaccatgcccggccttgaatctacgttcttaggcaccattttatatgagaacatcttcagaacagacatatacagaaatatagggaactgtttcttcatagtgttcttagagacccttgttgaaatcaaagcaatggtaagaaagggtgcttgattcaccgaatcccacttttaggagaaaactgggaatagtactttaacttcctcttcatgctttctcttccccttgaacgaacatggcttgcacaatacaccacagttcatgaatgttccgtgttatgtttgtcaaataacgtaatgacatttaggagtgggtggagtgtagcagaggtattgtagcccccaaataattgaaaggcttttatattgctattgatttttttaaagtcaaaactccaaccattctatggctttaacattacggcatttttctatagttgaaccaaaatgctacttaggataaggacattctgcacacttcagattcgttgagctctcttagaagcaaattttccattgtctcagctgcagcttgaaaataaattggatgttactggacactcatccacagtgctgtacccaggggcgtgtatgattaccagagggattcagggaggggcgtgtgtgattaccagagggaatcagtgttacatcctctaggattccctccaggaaacctcctacctacctgttacaggtaaggaccttaggtgtattcttagatggtggttctcaaaccttcatgtgtgtatgaattactggggagccagtgaaaatacagattaaaattctgtaggtctggagtggagccatgtggtgctgatgctgctgatcctcctagctataaggaagaaaacttttgtatcctagtgaaatgaattgatataccttgttaactttgggaaaataaaatctttaggcaacgttctacagttacttctggtaaggttcatgagaacattgtaaacttggcaaaatttctttttagacatctccgtaagtacaaacgcacagcacagtttgtttcctttggtaactctcactccccagaccattaggtattcatgatcttctaccctggaggccgcctccaagagcatctctctttcatcccacttggctctgtatctccaagactgttgccgctcttgtctctttctgacccacatcaaaagttaactttctcttgtcccacacttccagaggcttaccttcaggctcgttccaattgaatcaattcaaagcctttatctaaaaacaaaccagtcagggaagttggatagagatttggcaccggaggaaattcctgggacccttgaggtgatgtcacacagatattggttattgtttgcagcaacaggactcagcactttctactaggctagcagtctcttgtactcattacttgagactatcagacttctttgctaatggacattttgtttttgtttcagaagttcgtagttggtatgtgttggaaaagaaaaagcaatatacttattccttcccctttgggacaatatctttcaaatctctcatttctgtgcagcctcccaagctttctctgcagccagcaatgtcatatacaagttgtagataacaccggaaggcagcttaaattatttttcaatatattgtgagagtgaaaacgccaagtcatatattttagtgaatagatgcaactataaaaattcagtgtttccttaactggcgaactataggggaggattaggtgacaagggaagtcatttcatctcttctcttggtaaaggcttctacaaagactctagagagtaaaatgtttcaagaaataaatttttttaactcttgtacacaactatttattttcaaaacatgttacaaacactgattaaactacctactagcttaaagaataatgacgactatcgggcgttcaattggtcctcatgtcttaatgaaaaagtttttcttctgtttctggtaggttttgattcatttacccaactctcccctcagtcacttcagcacagtgcaagtcagagagaatgtgtgggaaagtgattaagagtacacactctttccagagtcaggcaagagctggatttgggttcttactagatgtgtgggcttgcacggataacttagatgctttaaaatttgatttccacatctcaataatgggtgactgctgggacagagaaacattatgatgtagaaggattgacttctccattaagaagagtaggtgcagtatccacaatacttttagatcccccacaaaagtattttatttgaaaattataccaaaaaaagaactttctagtcaaagaaaatgttttaacatacatttgatttataccaatgtagtcataaaatgcaattttttattttttttaatgaagaaagaggccacaaagacaaaagtgcctaggacccacaaaagccacaaagggcctgtagtgtatgccgatcactcaacacagtgactggcacatgggagacatgttgaaggttgataaacatagagggccagacggtattttaggctttgcaggccagatggtctctgttgcagctactcaactctgttaatgtagtgtgaaagcatccatagacaaagtgtgaacaaatggggaaggctgtgttccaataaaactttatttacaaaaccaagtagcaggctggatttgattcataggccttattttctggctcctaacttaacactaagaatttcgtttttggtagtattgaaaagaattttagttttattcatttaattatctataaaatatcctcaagggaaaaggatatacctgatatattttggagtattccagacagtcaaataaaagagaattttgttaaaatctcagttattcaggattcatctggttagaacaaaccatcacattttttctcactgcactaaagaaagaaagcaagcataagataataaaattctatggttctacctcaatgttcccagaaacacctgtatggaaaaataaagcactaataaatgcaaacaatctctcttgagttgtgatatgtgtatttatataaatccataaacagagatggagcatgatgacatatgtagctatgttctgcaactatcattgtattaatactttcaatctctagaaagctgcttcctgtgatttctttggcagatcaagcacttgcttaaagagaaaagacacatataattaaattggaagggcaggcaaatcttcccacagactaagccttcagtacaaagaactatgaggccctaaagaagtgggcatgagcccatatattaaagatatgtatttatagactataggttgctgttcatattctctggaagccagaagtttagttcacatcaactttggactaaggaacaaatgtctagctttgttggaagtgtatgtgaactgtggtggctattagaagtaggaggaaagggaaggatcatagcctgtagaagtaaattcagagtttgctgcttgctcactctgcagtgttaggaagctgatttaagtctgagtttttataactataaaatggggttaagaatatttataaattggccaggtgttgtggctcatgcctgtaatcccagcacttcaggcagccaagatgggaggatttcttgaggccaagagtttgagagaagcctgggcaacataatgagaccccatctttgcaaaaattaaaatatgcatggtggtgcatgactatagtctcagctacttgggaggctaaggtgggaggatcacatgagcccaggagtttgagaccacagtgagctatgattgttttactgcactttagcttgggtgacaagagtgagaccttgtctcaaaaaaaaaaaaaaaaaaaaagattataaattgtttatggccactaagaggattgcatgagattttacatgtaaagtccttatatcattgattgacataaaagaggtactcagtaaatcattatattttaatatttactaaaagtagaaataattattgctgggttaaatgacaacagagaagggacaacctaaaaagaacaagtgctaaaactgtgggctctagaatttgaatcatccccgttgaattgttaggtgttttatactgcacaggttttctttgtctgatcttgaatttcctcatttgaaaaatgcatacaaatagaacataccacataagactgttggggatattaaatacaataatgtggctgtgtgtggtggctcatgcctgtaatcccagcactttgggaggccaagatgggtggatcacttgaggtcaggagctccagactagcctggccaatgtggtgaaaccccgcctctactaataataaaaaaactagccaggcgtgatggcacatgcccgtaatcccaactactcaggagactgaggcaggagaattgcttgaacctgggaggcagaggttgcagtaagccgagatgacgccactgcactccagcctggatgacagagtgaaattgtgtctcaaaaaataataataataaggtggataaactttggcctagtgtctggcatggtgcaaagttcctgacatattgtaaatattatttacgtctttctccttgtctttgcttattgcaaggcatgggttcttggaattcccctagagacacatgaagagcatataaatcctctagaaactctgtgtctacccaagcttgtgttttttgttgttgttttgagagtttttttagtccatatttgcatttttctggagttgaagtccatagcttccatccacttctcaaagatccatgacacaaaaggattaacaaatcgtgttattaaacagtccaaaagcgtacattttgagggcatctgccatagcctgtattatgattgcttattatgataatccaagctattaagaaatcattccctaaaattagtataccatatttaaagagctacccaagtatgcatagtaatatattttagcaagatttccagatactgaagaacagatttttatatttatttaaaggagtgaatattagtattttggaaaatcaattgaagtgaaacaactcattccttaatgattctggtaataattgcaccatggggcagaaatacaatagctaatacgcatttatcttttccagtaccttccttacaagtgacttatatatgtattatgtcatttagtcctcactacaaccccagggtaacacactgtcattgctagtttcttacttgagattagctctttcatatgttggtgtaagatgacagctcgccatcgatttgattgggaatgaaagtactattgttctctgctattggtaatgaatacttggtttgactcagctatgagaagaaatgctatgagggacagatctgtcaaataacacattcagagatgcgtaaacatgggccaagttaagctgaggcctctcatgctgctagttctcaagtctccaaagttcacactggtttaataaacttagaaaatatgctgattatagaaaggggcacagtttctgcagtaatcagcttctactgagaaatatgtatacattatattcaatgtttccatgccaggctaggttgctaagggccttgggaaaataagttcacttgtatggtaaaacagcctttttctggatgtaaacaagctttcttcaaattcatttatttcttgagaacatgagaggaaagatacatttatatataaaaatacttgtatattcaccgttagcttctcagcttacttctgggatattacgtgagaagatattaaaatagaagaattattccatatgctatttgtctaaatatgaatgattgttacataattcatgaagttgctgatgttttgagttttttttttatactttaagttttagggtagatgtgcacaatgtgcagtttagttacatatgtatacatgtgccatgccggtgtgctgcacccactaactcgtcatttagcattagttatatctcctaatgctatccctcccccctacccccaccccaccacagtccccagagtgtgatgttccccttcctgtgtccatgtgttctcattgttcaattcccacctatgagtgagaacatgtggtgtttggttttttgtccttgcgatagtttactgagaatttttttctatcatttcttttgctccaaatttttctcaaaaagactttttttgctaatacaagtttgtactgtaacaaaacatttgaacatgagcaaatacagaggatctcaaaagcaatcataataaggactaattttactcaaattgtgttcatctctaataatgataaatgttgcattactgatttttggttgtaagcaacagtttccttaaataaatatttggaaacgtactgcgtaacttactaaactgaaggaaaaccttaatgactaaagtatacagaagtataaaagctaggtcacctctagggagctcaatcaaaatccctaagccttctttttttttgatgttgaatctgaaggattcatctgttcaaatttaaattttgaataaagggatttaactaggcagcattagctgggtgacttctcacccattgctaggctataggtagtattattacaatagacaaatacagcaggatttacatggaatggagaagagactattctctaggagagaactattaaaagacataattaaataaagaggtataccatagtcattgagcagaaaattccatatttttaagatacttctcatcacattcatctatagtgttaatgccgtcatgatcagtgccaaacaggcttaagaaaatgacacactatttctgaaatttatgtaaaaatgcagaggactaagatagccaaaataattttttaaaaagaaaaatgttgaagaacttacactaccagatttagtacaaatctaaagaattaagataggtatgatgttggcaaaagaactaataaattgaataataggacaaaatataaagtccagaaattgactcatacatatacagtcaacacacataccgtcaattgatttttctatgagagtgctaaggtcattcgatttgaggaaataaggcatttttacaaatgtgtaggaaaaagaaatttattttaaaagaacttcaacctctaccttacactatacaaaaaattaatctgaaatagttcatatactaaaatataaaagctaaaactattaaactgctagaagaaaacataaagagattatctttataagtttgagagtcaaatatttcttaggacataaaaaagcactaaacataaaaaaattagttagactttctcaaaataaaaacttctcatcaaaagacaccattaagaaaatgaaagggcacaaaagacttagagaaaaaatatacatacacaacgaatttatatcaataatgtataaatgatttgtataatcaagaataaaagacagtgatttttaaaagggcaaaagacttaaacactgcacaaaagaagatttatgaatggccaattaagcacatgaaaatgtcctcaacatcattactcattagggttattcaaattaaaacaccaactaggtaattttccatacactagaacagctaaaatggaaagattgactaaaccaagtgttgaggatatgaagtaactgaaactctcataccttgttgctgagactgtaaaaaagcgtaactacgttggagaattgtttggaattttcttaaaaagccaaatgtataccgatcttatgacccagcagctaaaagaaatgaaaacatatatccaaaaagggctttcaaaagagcatttacagcagctttttcataatagctgaaaaaatagaaataaatattcatcaacagaagaatggatacattttggtatattcctactcaccaataaaaaataaagaactaatatatacaatgacacagataatttttttttcttttcgaggccgagtctcactctgtaacccagtctggagtgcagtggcatgatctcagcttactgcaacctctgcctcctacgttcaagcgattcttgtgccttggactcccaagtagctgagattacaggcatgagccaccacacccggctaatttttgtatttttagcagaaatggggtttcaccatgttgaccaggctggtctcgaactcctgacctcaggtgatctgcctgcttctgcctcccaaagtgcttggatgggattacaggagtaagccaccatgcccagccatgatacaaataaattttttaaaatgctatgctgagtgaaagaaacaagacaccaaagaatacatactgtgtgattcaatttatatgaatttcaagtacagataaaactaatctatgtgataaaagagaaatgtttgtctatgggattaagaattgactaaaagagataggaggagactttggaaagtgacaatattagttgaaatggtggtttcatgagtgtgtatgtttatcaaaatgttataatctatgtatttcactgtatataaatttgcctacagtaaaaaaaatagctggtagaattcaaatgttatctaacataatgtacttaatttatccaatgcctacattgaataattacaactaggaattttcatctccagtctcacgaaagaattgagtgactatttcagccgtttgcctcttattttaccaactgtgcaatacttaccacctgtacttaatgatatacaatgttcccatctcatccacaggagataagttccaaggccaccagtagatgcctgaaaccacagatagtactgaaccctatacagatgctcctcaagtttccatggagatacctcccaacaaaactatcatacgttgcaaatattataaattaaaaatgcattcaatacacctaacttaccaaacagcattgcctgcggatacactgacaaagggatgattcatgcaggatagagagggacattgtgaaatttcatcatgcttctcagaatggcacacaatttacaacatatgaattgtttacttctgttattttctatgtaatctttttggactgcaattgactgtgggtaactgaaaccacagaaagaagaaccatagacgaggggactactgtgtgttttttataaattgttttctttgaaagagattgtaaactccttgggagtgtcatctgtatcagtggctctcaaactttaatatacaaaagaattacccaaggactttattaaaatgcagaatttcaggcttcaccctggggatatggtgattcattcgatttggcattgatccacggaatctgttttaaggagcaatcgaagtgataatccactgaccaccttttgagaaaaaatgatctatattgtatttgaatcatatccacaaggcttgagtgctgtatgtgtcaagaagtaacctatccgataaataaattagatgaattttaatacctttgataccagttttcaactgtagctgtttttttgtgtgtgggtttttttttttttctggacactgttagatagcatttcaggaaaggatcctaaattaaaagataattttccccagccccttcattttctccagtgggggagggagagcactttgtctcccacaagacacttggcctgtctatagatgtttttgtttatcccaacatgggtaggggttggcatggctggcatttttgggtagaggccagagatgctgctaaacacccacaggacagtccccatgaaaaagaactatcaagcccaaaatatcaatagtgaaagatggaaaaactgtaggatagtctttttggaatttaatgaacccagatactcctcagagtgattcagccttgtgcaagcaccgtgtgtcaggatctcacccaggcactctaggctgtgctatgcacttatgcgtacccttcctggcctgggacctgaggcctggctgctgacgctcctttcctgtaggtagcttgtactgactccttagcgcttctatagcagcttgtctcatttctttgacaaagcatctgccagcagcagggcagggagccctgaacatgggccactccaagcttgccgacagctctctttagtgagattggagatgctccagctggtcacagaaagaggcagccagctgggtttgaaaggaaaacagatttaattttggtccccattgaagcagaaaccaatctagagatgtgcctgctctaatttggaattcttaaaaggataattggggaaacaggtagaaaaagaaccacataacccaggatataaggaaggatggatgcccagtgagtgccagagttagtttggcctattttgccatgatattaggatgggattaacttgatatacgtgcattggatctcagtggttcagcacttcctagttcttggaccttggaaattaaataaactgctataagccttggtcttcagactacagaatggcaataataatgatgctaattccatagggttgttgtaaagactaaatgagctaatgcatgtagagaaagattttaatgtagtgactggcatataataagcattaagtaaataatagctattagccattattcttctgcaccattaacctgcaaaatatgccaggctccaccagcctctgactattcaataagtccccttctacccttttataccaacagtatgttggcacaaactatccctgctttaataactgtaagttagccattctccaagatacccattcattattttttatccattacagggtctctcccatgtgcccacaaatcagtctttcagctgcagccaccattatccctgactaatctttcttacctgagctggcttcccctccccacaaacccatttgcaactgtccctgctctgtcatagtgacagttcagactatgggtccttccaagctgctggtgttggggaggtcagagtccagctgagattcatgcagaagagaaaaagtatctgcaattctgtccctttttgtaaatagaccacagcacagtgcatctcttatttagaaatctttgctgactggttctatcattttgttcctttagcccctgtctccaagagaacctcagtctagccaaaagataggaaggaggagacaagatactttgtaattcctattttctccccgaagccaacacttccagccaatacttctagcaagcctgccgctaaccaagtaaacacccccagacaaaccaacagctgcaaacaattcctggagagttcttccgaagtgtatatttctttgatggtttcaggccccccaactcagcacattacaaggaattctattagaatactagaggatcaggacagggtcccaaaagaggagctatgaagcacttggaggggaaggagaccaaacctagggaaggcagaaagaaaaggagaaaaataaagatgtggaggacaggcagcacattccttgcagcagggtgcattggagcttgaaggttaagcttcccagggctgcagagtgagaaatcagggagggaggcaattgtctgctttgttttgacttgccgtggctgagggtaacagtcagctgtgacctcttcctcatgactaatgctgagcaggcttggctagcctaggttcccatgtaacttatcattaagccaagccaagaactggacaacatctaagtagtcccctacatggctgtttctgggggtataggagaatagcatggagatttgtggggatcctgcaggcctgtcagcaacctccagtgcagttctgggggtctactttttaaccaagtaaaacagtgagttttcagttaatctctgaaaaaattagtaaaatccacaaagtagtgagaaaagaggacattccagaaaggagctgactgtgcataagtgagagcggccgaagtggaagcagaattaatttgacagaggagctgagagggagtgaattaaaagaaataaaagattccataatctttattttttacctgtaacagctagaaagaccaaattctagtacagtcattctttttaaacatggccataacagacttaaaatttaagacttttaaagcgaagcatttgaaataaattgtgaaatcagggcatagaagaattatatctgaaactggagaaaagaaaaaatgccttcaagaaaatagggcatagtataatgcttccgtagctaaatgttgcacacaagggaattggaacacagtgaatggtaaatcccaaacctcttcagcaagatcattgtagaggaaaattgtcacctgagggaggaacccatccaggctgcttcagttataacaatgactctgggaatcctaatcaggtgtctgataggtaaactaaatccttgcacttgaaaaatacacctccagtctggctgatattacccatctaagtcacaggtttgtcttgaaatagatcttagcgctgtgatctcagcagggatttcttctttagagaaagatattttatgagcctagaagcagctttgttggaactcacaatatccttgaactgcaagcaacagcaattttagacagagcgttaattcagtgaatttcaagagaaaaagaaaaaaaaaaaaaaaggaaaacccatacagttgtcagtgctaaatgaactgaaaagcagtttgaaagagcatttcagagtcagtgctttctatgttctgttgttatgtttaaggaatcctttagtattgtcgagccccattgagtagaatggtaccaacaaaatatggtatttgtttagatatgtatgtttttatataatactttgggagatccggtacattgagcaagtgagactcacaagatgcaaccagacagtgaggttattcttccaagtacaatataacccatagaacccactccttatactcagcatttttctcatctttggataaacataggacaggccccatgacttttctggccactcttagataatgaggagtcatctgaccaatttgagtcacaaacaatctcatttcaattattctagacagaagatataaaaggaaagggaagtattccttggctaagtacacttgtagctggtagcagtgttctctgcacttggcctctattaaggagactttctgtctcatgagggactttgcaggcatctctcatgagctgttgccttgatggcaacaatagaatcatcctggttttttatagacaacacagcttaaaagtatttgagcaaaaaaaaaaaaaaaaaaagtgatgtcaaggtcataggcacttcttctgaattttgttttaatgatttgaactaatagtaatggaggtaaaaggtaaaatgggcagctaaaattttcctttcaatctattattttctatgtcattaggtgcaaaatgcagcatctctacaagaatattctctggaatgtgggttccatgaatggttaacagtagagaaaaaataatatttttatgaaatgctcatggaatctctggatcaaactgtcgtcaccatttaggcagtgcaggaaatcataaagaatggaaggagtggggaggggaatgggaaatcctgggagaacaatcagagggggagcattggtcagtgggagctgggtgctggagtcaagggtagggtgttgtatagcatttctcgcccttacctcatctgttaagtagaaataatggttcctacttcaatggttatggctgcttcatgtcaagtcaaatttctttattttcattacttatctttctgtaatttctgagtgtactgtcactaagattgataagggacctatatcagaaattcgagtgggctcctttcacccagccaggagttgagctcagcctcagacctcaagggcagtcactgatggcgttaatgccccaccaatgaggttcttttgagatcaggcacctgtgcaggtggctctgctccccctgggctactctgagccacacgcatctttgtgagacctcttgcgattactgagttgagctttcagtcctgaaaggaatccatggagctatcctactcagcaattctgtcgcttggtgtctgtgtttaagcagtttgggggaaacaacaggccctccattcaccttctacatctggctgaatcattctccagttgacttttttttgtttttgagacagagtctcgctgtgtctcccaggctggagtgcaatggtgcaatctcagctcactgcaacctccgcctcatggtttcaagcaattctcctgcctcagcctcctgagtggctgggattacaggtgtgagccgctacgcctagctaatttttgtatttttagtagagacggggttttgccatgttggccaggttggtctcgaactcccaacctcagatgatccactcaccttggcctcccaaagtgctgggattatagggctgagccactgtgcccagctcagttgccatttttagaagccaaaccctactacctcttagtcctttctggtaattcagccagctcctctgattgtctttcacctgagagccaaatcggcccactctcatgttttatttgatcttgtcagtgttgggaggggatatatgtatacatacaaaaatttaacattaagacacttttagattaaaaaatataattcaagattctttatttatttttatttttttcctgagacagtctggctatgtcacctaggctggagtgcagtgacatgatctcggctcactgcaacctccacctcccaggttcaagcgattctcctgcctcagcctcctgagtagctgcgactacaggcacgcaccaccatgtctggctaattttttttgtacttttagtagagacggggtttcaacatgttggccaggctggtcttgaactcctgacctcaagtgatccagccgcctcggcctcccaaagtgctgggattacaggtgtgagccaccacacctggccagatttcaagattcttatcaaagatatttaactggagctgagaaactctgccctgtcagggtctgttctctctgagtttccatgtgggtgcccacttcagtcattaagctcatgggcccaacctctgtaggcatttgagtttgggacccctgtcttagactttaaagcactaagacctagggagtattcacccattttgctcctacccctgtggcatcttacctatgctcacaactccaagaatccctgcatttgtccttttgttccagtacaatgaagagtagaagaaagaagatacaaatgcacttaggaaacaggcctggctttcctaaaagtcttggagtgatttctttcctcttctttctttctttaattttgttcttagagaggaggtagaaggcattgttgacacaaatcacccattcacaggttactgactgatacagcgagtttcagaatctgctctcttggttcttccaacactttccataaagaagttacccgctttgacctgaatatatgcagttgctacaatttcaaaccaaagcagacaccaacagctgctgtcttgccctgggaggagcccctgtgggtggaagatcagccctccagctgtcttggcttacatttcttcaccatctgactgggatggctgatgcaacagcaaggcaagttgctgtcacaaacactctgagtagtcagtagggaaatgtgccagtgagcatgttcccttggtcttgagggttgtctgactgtcatttctctgaacttacctgtatgagtatgttcaactctacctaacagctctgccttgattagacagactgtaatggactggtaagtaatggaagagttcagaggaagtgatgctttgattggagttttgattccattcatctgaagttccctcagttgtattgctctgtttcgttggattcttctcaaatgctttcactcatgatagcaaaatggcagcagctgctccaggcattacattggcataccacatatctacagtatgatagagcttgtctttccccagtctcttcttgaataaaaaccctgggcttcactctaattaaaccaacttatttcacatgcccaacctgaaccagccactgtgcaaaggaaatcagatgaccttgatggcttttagctgggatctttccttgacactggtggtagagtcatactgcatggctgctaccccagatggcacatgggccgttatagtaagtgttctaataacttctttagctaactagatttgtgggggaatgaattaatgtttttctgaaaccctgctctcttctggagataatgctgggtgctttacctactttgcaattgccactactgaaaatcaattgttcttttttaatttctctagaaaactctaaaagctaaatcttaggtgattaaggaacgtgctcaatgggtcttaagatgtccattaggcattaacactcttattgccttcaaaggccacaactacagaatactatgtaaaaggtcacaatatatctgagaatttggtgggaggagtgctataaagtaatggaaagatgattccaggagcgagttccaacccatccactaatcgttttacattatcacagttttgaacatatttctgaatttctcagggcattggtttttgtcatctgacaaatcaagagcacagtaatagtatgactccataatgttggggtaaagattggtataattaatacggtataaaagcacaaagaaggtccataacaaaagtaagtattatctcacctagaatattggtatgcattaagctagggccacaaactcaaaaacctacaaggactggctagtgacaagtagataaaaaggccctggggaaagttgggggatggtagaggtctatgttattggggaaggctgggagatggtaggggtctgtgtcattgatattttggacttgatgtccctgaccctgtggaaaggtgagtggctgctcagccagttgtaataatgtgtgaatttgggccttcttgctaaatcttatgacttttcaagagaaactcataatctaagtgtcttagtttttgctttcctttattttttattgaatacactttgtggatccaaaaaaactacatctgccagcccaaaatagcccgtgggtgcctaatttgaaacatctgttattatatgtctcttgatctacatgaccctggggttttcttatctgcatctatcagaagagggagataataatagtacctgcccccacaggattttagggaagaagaagaaatgtttctactgtgagtttcagatcccttactagggtgagttatgaaaggagactaacagaagcctgtttcatggaaacatctgaggtcaaggagcacacctggacacagaacccaggatcagggtcggaacccagggccaaggatttgctttctctactccctgtggcctctgtgagcaagtctttgaagaggtgccagcttccttttgcatcattaatcctgactgatcagacaccacctgcttatgccacgttcagggacaactgtagacagtgactcaggaatcagcgggacccacagaccaggcagtctggtcccagtcccctcaaacagaaacttgctcctttcccacatctgtgcctgggtgtcacagtccgaatgtcaggtatttaatgagatgttgaggaaagcaaagcagttgctgagactgaaatatcagcatttgagccaaggcggaacccaagggattaggtgttggattctagtgctatggggtaaagcaagttttgcaaggtcattgcagcctgaaagatcactatgatttcagttcgtgctggaagttttcaaaaattgaaatcctgaaaaaaaaaaactgctaacatatagaagatgcttaaatctccactgtccgatatggtagccaccagccacacacaggaacactcagctcattatctattatataggaagggtaatattgtttcactttgttgttagtgttttacacatattagcattccataataatcattgaatcaatgaatgaaataactataacttcgtttttttctccttgaagaaagggtcatatgtttcttctgccatttttttaaatctcaaaaatagggacagtaatggttgctaactaggctttgatagataagaagctctatgttctctttagaaaaatgatcctctttaaagtcaaagtatcataattccattgtaaatgagtaagatgataaatgccttttaagcctacttgtatgatctgaagaagtatcaagagctaaaaagaaaaataacatttataaaacacttttcaagacacttatgtgaacattatcaatttctatcctccctacaagataatgagttagagcaggtagtattatccttttggtcagtttttttttttttttttttttttttaagtaagctgagactagccatatttgaattgtttagggtggggtttctcaaccatgggacttttgacattttggactggagaattctttgttgcacaggacagtcctgtgtatcatagtatattcagcagcaacctcagcctctagccaccagatgctgtttgttcccccactcccccttgtgacaactaaaaatgtttccagacattcttgcctcatctaggcctcatgaatggtatttgagcaaagacctgagttaagtgaaggagccagctgtgcagagagcctggagaagagccttctgggcagagggagtagcagatacaaaggttctgaggctggatccatttagtgtgttcagaggaccagtaagaaggtcaatgtggctgaggtggagttgtattcttctcactttgcctcctagcccccatgatcaagcacttgccttagatgaaatctttcctttgcttaggtgcatgttcaatatttaacaggtgtcagactgagacatttttagaaggcaaagaatctcagatgtctgactgtgagggagaagggagtcaccccaaggttgaggggagagaattgatacaaattgcagctgacacagtacacaggggcatacttgcagtcaatgcttactgacttctgctacacacccacgttcatgttacctcatttttgcatttgtgcatcgataaccaaacagaaggcgaggcctgggcatttggcaacttcatttgtatgtggagtcaaccatggggtgcattcggattatttcttttcttctgcatttcttaatctctctcttgagagcagtcaccttggtaactaccctggtgccttgcacatggactatggtgagtaaaatgtgtttttatgaccctcaaaataagagccaaatactactttatccattaaaaatgagattcacttctctatgtggcattgtggccaggtttttaaaaaatacctggtttgggggcattcccgctaacattcttaccaactttgagacagtgctcagagcaagtgcactgagctaaatcgagatgaaagaggcaataatctgctgcctagtagaatggcttttgcagcctgatgttaaaggtttcaggatttgaaggttaatctgcagcagcagaaggaaactgttagtacttccgctagtctgaaattgacatcccagaaaccggccctttctaataaacagagaaacaaactccagtgaatcccacatgtcaagcctagacctaagggaaattactctgtgggcttctgtctgaatccactaaaaaactcatactccagtcaacgacattgtcattaaagaaaagggaaacgtgaaataatcctagcctcagaaatctctaccattaacagaaggccttctttttcctgaaaagatagagtatgtgaaggccacatctctatttttaaaataaagcaagagaagtaacatttatggagcacacacaacatgccatgtactacactaggtgacttgaatatgttgttaaatactttatagaggaggaaactgcagataaaagtatcaagtgacttgcccaaggtcatgtaagtaataaagagcacaaccggcatttacgaatgggtcttctcagtgctaaagctgctactgcaatactctgtaaaagacatttataaattcgaagttaaggaagaaagtattgaattattccctaagctagtatcttaattatataattgcttgttaaactgtacattttttcaagctgttcatattcccctcttatccggatactcggaaatggcttttttgtattcctgtacctggtctcattctcacatatatattagtcatggttacaatatacagtttttaagactttctcattagaagatatggtgtgatgaaaaaggtggctgaaatgatgaaagatgattgaagagtttttctcgggtccccttggaatgaataacacatggccatttatgtcacagtgtttccttctacctgagcctggtaatttccaggggtcatcttggttaaattagtttttaattccaaaatattgttgctggaaatgttcccactggccaattcatatctcctgaataataggatttgagccaaaattgaaaagtgccagtaaagtaaatgaggaatatctgccatataacctttggaaacaaacttttttttttttcataacgatttttacaagtgtaagaagttgttactgcaatgcatgtgtctgacattcctaagaaacagaggtactcttcaggacattctccagctaacttgaggtctccctcaccaaaccttttagacatggactgagggctgttttattctatgcactcattttgtgtatctctttcttccacattttgagtataagggaggcttcctgcttgttaatttttctgacatactcaagttgtacagaatgtaggaaaaaactatttcttccttatactcaaagtatatagagagagccattaataaaggtggaaaaaggaaatgctagaggggccttcaaaatggctgtgtgggccatgcgtggtggctcacacctgtaatcctagcacttttggaggccaaggcaggtggatcacctgagatcaggagttcaagcccagcctggccaacatggtgaaacctgtctctactaaaaatacaaaaatttagctgggtgtggtggtacacgcctgtagtcccagctactgggaaggccgaagctggagagtagcttgaactcaggaggtggaggctgcagtgatcacgccattgcactctagcctggatggcagagcaagactccatctcaaaaataaaaaaaaaatcgctgtgtgtggagatgcccagcatttgcctcctccacaaaaaatacaggacaaagcaacaggtagataatcccacactgaaggagcgtctttgtgagaacactgaaactcagcagggaagtgatattggagctctgaggcagggaaggagagagaagtgaagcagctagtccagctgagatcagttcagagccaggaaaaactccccagtgcagagaaaaggtgagagatccccagcagttcatgttcccaccagggactcctgcaatcctagttacagaagagctcctcaggttttgcaggtcctgaaactagtatagagagataccatgcaacagcagtgttccagagagggagtccacactaggtcccacatctctccaaagacccaagcaactgtagcatgatgccattttgagatcccagctctcagcagactatatcctgccctgaggcccaagaatccctgcatctccacattcctggagccccactgccatcccttcatgtccacccagaaacctgtgtgtcacagttttctgggtggacatgaggagctagtggtgcatctagatcttcagaactctatcacacatgatgtccctactccttgggaaacaggcaatgcagggtacgccagaaaggctgcccctgagacaaaggagactgaagtgggcacttccaaaaacatcagaactgactgcctgaagccagtgccactgataacaaccctgcctcctgcagtagcagagctgttgtgcacctgtacatgccttcaaggggtcttgggactggccctgctggatgtccttttgaaacctgaggatctcctctgcctatcaccacccctgctagtgcccatctgtactatccatgagctagaaggtcacccagccccacccactgatgtcaatgcctgcatacactattgcaggcctgaggacagcatcatctcacctgccactgcctgcacttgttatacagggggctgggaatagacctgtcccacctgccaccattggcacctgcacttgccttccaggggcatgagaatagaccccttttgcctgctgccaccacgtgcatgtgcctcctgaaggatctggggactggcctgcccagcctgcaactaccacagacacccacccacatgtgccacttgggggcctgggaactggtccactcagccagcctccaccaccaccagtgcctatgtgtgcccctcagggttccaagaattggttcactgcccctgttaccaccactgataccacacatgccacccagatgcttgaggaccctctgtcatccaagcctacctctgccactgtcagctatcagtacccaagcacaccacctggaggcctaaggagaagctcactcatactcactaccaccagaggtggtatatgctgccaggaacccgaagatgcatacccagcctgctgccatgattataagtgtttgaagactagtgcaactgggatccctgtctcaagcaaagcctcaccacagctttcactaacaacttcagcctaagccactgacagcataacttgcagacaccattcattctaattaaaactgaagaaatcatatagagatcacactactgcacctacccagaatcaaagccaaagcatcctactcaatcaacactatagatgcatgtagaggaaaaaatctttccctatggtagccaagacataaaataagaaaaatccactgttacaccagatgtgcagataacaatgtaagttcaagaaatgttaaaaagcaagaaaacctgacacctccaaaggaacacaataattcaccatacaagagcttaacaaggtcaggcgtggtggctcacgcctgtaatcccagcactttggaaggctgaggcgggtggatcacgaggtcagaagttcaagaccagcctgaccaacgtggtgaaaccccatctctactaaaaatacaaaaattagccaggcgtggtggtgtgtgcctataatcccagctattcaggaggctgaggcaggagaattgcttgaacccaggaggtggaagttgcagtgagccgagattgcaccactgcactccagcctgggcaacagagtgagactctgtcaccaaaaaaaaaaaaaaaaaaaaaaaaaaaagaaagaaagaaaaagcttaacaaaaaagaaatctatgaaatgcccaaaaaagaattcaaaataaagtcagtgagacatgaaagaaaaaaaaatacaaagaattcagaaaaaattcataatctcaataagaaatgtaacatatattatatatatatatatatatatcaaaatgaatcaacagaaatcctggagctgaagaatttaatgaataaaataaaaatggaaagctttaacagtagacaaaatcaagcagaagaaagaacttctgaacttgaagacaggttttttttttttttttttttttttttaaataacccagttagacaaaaaataaaaagaaaacagtgaaaaaagtctgcctaacatatgggacaccatgaatattagaatttagggagttcccaaaggagctggacaatggcatagaaatcctatttaatcatgtaatagctaaaagcttttcaatttttacaaaaggtgtaagcatcaaatagaagctcaaaaccccccaaatggattcaacccaacaaggtcttctctaaggcttattatagtcaaattgtcaaaagacagagtgagaattctaaaaagaaagagaaaagtcacatatgagggaattcctcatcaaactaacagagatttctccatataaatcttacaggccaggagagaatgggatgatacattcaaagttaagaaagaaaaataaaaaactgcagccaagaatactctacctagaaaatctattattccaaagtaaaagagaaatatttctcagaaaagcaaaaactgaggaaattcattatcacaagaccaatcctccaagaaatgcttaaaggagtcttacatctggaagccagaacatgatatctaccatcatgaaaacacataaaagtataaaactcactgctagagcagatacacaaatcaaaaagagaaagaagtccaacattaccactacagaaaaccaccaaactgcaaaaataataagaggggaataatggaacaaagtgtatccaaagccagaaagcaactaataaaatgacaggaatgatttctatcaataaaaaccttgaatgcaaatggattgaactttccactgaaaacatatagactggttgaatggattaaaattaataataactatatgctacctacgagaaactcacttcacctggatagacacatttagattgcaagtgaaggaatggaaaaagggatttcatgcaaatggaaaccaaaagaagcaggggtagcttttcttatatcagataaaacacactttaaatcaaaaactgtaaaaagagacaaagatgatcattatataattacaaaaggatcaattcagcaagaggatataataattctaaatatacaagcacccaaaaccagagtatctaggtaatatatatataaagcaaatattattggatctaaagagaaagatagactcctatacagtaatagttggggacttcaacactgctctcagcgttggaaagatcatttgcacagaaaacaaaggcatcagatttagatagtatttcagacataatggacccaacagatgtttacagaacatttcattcaacaactgggtaatgcacatttttctcaactatacatagaacattatccaggatagaccatttgttaggtcacaaaacaagtatcaacaattgttttttaaaaatcaaacatatcttgcatctcctcagactgcaatgaaaaaaatagaagttaacaacaacaggaactttggaaactgtgcaaatacatggaaattaaacaacatgcttctggatgatcattaggtcaataaagaaattaagaaaatcaaaaacatttttgaaacaatggaaaatggaaacacagcatacctaaacctatgcgatacaggaaaagcagcactaagaggaaagtttatagcaataagcacctacaccaaagaaagtggaaggatttctaataaacaacctaatgatacacaacctcaagaaaagcaggaataaaccaatcccaaaattagtagaaggaaaacaaataataaagatcacaatagaactaaataaaatagaaactaagaaaaaatacaaaggattaataaagtaaaaaatctgatttttggtgagataaaatggataaagcactacctagaccaaccaagaagaaaagagagaggactcaaataattaaaattagaaacaaaggagacattacaactgatccgacacaaatgcaaggataaagactattataaacaaccaaactctaacaaattggaaaatctagcggaaatggataaattactggacacataaaatgaacaaagattgaaccaggaagatacagaaaacacgaacggaacaaaaatgagtaatgacattgaatcagtaattaaaaatcttctaacaaagatgagcccaggacgagatgcctttactgcagaattcaaccaaacgtacaaagaactaacactaattcttcttaaactgctcccaaaaataaagagaaaggaatcctttctaactcattttatgagggcagcattaccctgatttcaaaaccagacaaggacacaagaaaaatagcaaatgacaggccaatatttctaatgaacatagactcgaaaatcctcaacaaaatactagtaaaccgaatgtaacatatcaaaaaaaaaaaaatacacataatcaagtggaatttatcccagggattacaaggatggttcaatatatgcaaatcaataaatgcagtacagtacatcaacagaatgaaggacagaaactatataatcctctcaagaaatgcaggaaaagtgttttataaaattcaacgtcccttaatgataagaactcccaataaattaggcatagaagggacgtaccttgacatactaaaggtcatatatgacaaacccacagctatcctcatgctgaatagggaaaagctgaaagcctttcctgtaaggactgaaaaaagacaaggatgcccactttcactgctcttattcaacatagtactagaagttctagcaagcgcattcagtcaggaggaaaaaattaaaagttatccaaactggaaaagaggaactcaaattgtcccttttcacatagaatgatcttatatgtagaaaaacctaaatactccaccagaaaactcttagaaatgacaaacgaattcagtaaaatttttgtacaaaaattagaagtatttctaaacaccaatagaaaactagctgaaaaagaaatgaagcagtctcatttataattgctaccaataaaaaatgaaataaaatacccaggaacaaatttaaccaaggaggtaaaagagctctgcaagaaaaactataaaacactgatgaaagaaattgaagagaacataagcaaatggaaaaacatcccctgatcatagataggaagaattaatattgttaaaatgaccatattacccaaactaatctatagatttaatataatccctatcaaaataccaatgacactcttcacaaagtacaaaaaacagtctcaacatttgtgtgtaaccacaaaagactctgaatagccaaacactgagcaaaaagaacaaagcttgaggcatcacactacttgatctcaaaatgtactacaaagctgtaataacccaaatagcatgacattcttataaaaatggacacatagaccagtgtagtagaatagagaatcccaaaatggatcagcgtatttgcagccaacagattttcaaaatattatgtgcactccataaataagtacaatcatgtatcaatgaaaattttttaaaaacataaacataaataaagataaaggtaaatcttttaagactcttctagaagcatgtagactacaaacctaactagaagcaccctactttaatttctaattggctgcagtaattgtaaattcttaccaaactatgcccaacatgttttcatttcattaagcagttatcttattagtacctgtggtagtcccattcctagcaagatcaagattaccctgagctctttgtagttgtgacataactcatttttatatagccacgttttcatcttgagcctggcatctcattctgggagggatcctaaaaaattttttaacttgttgcttgacaactcctgatactgttctataattgggtttccctgtcatcagaagtagaggtgactgtcagtctgtgacaatgatggctattgttaccacaaagcctaaaaaaagtcttatgtcctctaaaaaagagagagaatgattgcatgtctttcaggagtgtgtgatggatatagagattgtgtaacatgtatgaatcctttttgaaagttacttttaattcattgtcattctcacttgcattttgataaacatctctttctagaaactacatctgggaataaacttctctagtattttattagttggagttctccagagttacatcattcatagaatacatatgtgtatgtgtgtgtatggatttttatcataaggaattggctcatgtggttagggaggctgacaaaatcccacatctgcaatctgcaacctggagactcaggagaactgatggcatagttccagtctaagtccaaatgcctaagacccgcaaaaatcaatatttcgattccagtctcaaggcaggaaaaaatcctcccctactcaaagacagtcagctttatttacctattttaaatgataaaattaaatagtatagatatttactatgtacaacatgatttttttaaaaattattatactttaagttctgggatacatgtgcagaacatgcaggtttgttacataggtatacacgtgccatgatggtttgctgcacccatcaacccgtcatctacattaggtatttctcctaacgctatatctatcctagcccccaccacccgataggccctggtatgtgatgttcccctccctgtgtccatgtgttctcattgttcaactcccacttattagtgagaacatgtggtgtttagttttctgttcttgtgttagtttgctgagaaggatggtttccagcttcatccgtgtccctggaaaggacatgaactcatcattttctatggctgcatagtattccatggtgtatatgtgccacattttctttatccagtctatcattgatgggcatttgggttgattgcaagtctttgctattgtgaacagtgccgcaataaatatacatgtgcacgtgtctttatagtagaatgatttataatcctttgggtatatacccagtaatgggattgctgggtcaaatggtatttctggttctagatccttgaggaatcaccacactgtcttccacaatggttgaaacgacatgatgttttgatatatttatacattggagaatggctgaatcaagctaattaacatatctattacttcagacacttagttttaagggtgagaacacttgaaatctattagcaatgttgaccatacaataacttgttgttaaatatagtcatcatgtacaatgcatctcttgaatttactttacctgtctaacccagaataatgtttaaccaaatctcttggcacccctttgcctaatcaacttgacatgtaaaatgagccatcacagccactatcccaaataaggtttaataaatcattatgattgggttccctatggatttttaatcttcactgttaccaggctatctgcccttcttgttgagggaattaccccaactctggatatctgaaacttctcagattattaatgattccctttttaaaggatggattggctggtaggaaagctgtgggtaatacctggcatggtagttaaaagggcaaagggagggaattaagtccttttaaccaattttggtctctcagtatttaatgatttgttgatttccagttaaaattattaaacgactatcttacccagggaagaaagcagcctcaattttggcaaattaaaacaatcacttctgctttcattttcttcagtaggttgtaatattgagtgagtcctaattttattcaccttctgctaggaaatgtctaagacaaatttctggcacactccctttcacatctttgtacctgcctctcacggccttcatcccacatcctcttgacactggaagctctgctatgggtcctcttttcttttcctcttagacaagcctctcagagcatatcaaatcaagtaagtgctaaattggcatggcggggtgtcactgccataggaaatcagagaaggtagtttgaagataaagcaagatgggaataaatgtgggagctggggcctggaggatggatggggccagcagtcactatagggctgctgttgaacatatacagtgttccaggcaccacatgaagcaaatcaaatgtgcatgcatacacatagccttccaagagagatactgttagtaccttttcacacatgaagaaagacccagaaaagattctttgactagtaagtgatgggacctggactcaaaaaactcttttttttaatcccctcctattttttttttttttttgaggactctaacactcacacctatggtttgaacttttggattccaaaacctatggtctaaacaatagtgtctatggattttgctaggcaaaggaaggagggaataaattccaaaaaaaaattatttaagtttaacaaaatcacaggatctattataagacagttctttactagaaagttatttttggaatttattctgaggcatgaattcatcagagtttgtttccaaactttcacagaagtcttagaatataaaatgtaaatcagctcccgtcattgccctgcttaacgtattccattggtgtctagtcacacaaataataaaaaatccaaattcctcgtggtatcttcttcaagatgctctattgatccttcttccttcccacttttctgaattcatctcctattcctccctaccttgtgtagagggggtgtgattcaactctgatcacattggctgatgccattcttggtgatcctcaaatgtaccatactcattctccctgtactcagaccttcccaggcctggcttcctcacttcatctgggattcttagagacaacttattggacctccagtcttaagtatatcctaccctctctcttcctactctgcctcattcttctttagggcgctttatagctctgcctgtgtgatgctctgggaaaagtggggaggagagaaagtcatgtcttttttcactgagcaatcaggagtctccacaggtgcagtgatttccgcatgcggtatccactgttctgttctgagaacacatggatgaaatatgggaaggatattagagcttacaagtgcaagcaagagaacagcaatagatgtctcctctggaccactactgcttctctttagttaaggctaaacataattgcataaattggtgacacacctgaaagactgggagtatgtctgatgccatcttttggaaggccaatttggacattataacttgaggagagggccaaattaataggtaagacagcgctagtgccaggtgtacgcatactagctttcatatttctgaacttatccctggaaacctttctcacaagtatcaaaacggcactgggccctttgaagctgtaacttgaaatctcataaaagacactgtcatgtacaactgacaacttttccaaatgaaaatagaagacaggagaggtggctcccttggggtacataccccatgaaggaatctattctgggagggattttcacagtgtgtatttttaatatcactcaggccagcatcttaatcggactttactggtgggaagcactcacccagcagcagggattgtgatggtaggaatttaatctgaacacttggcataggcctaatcatatttcacttattttcttttatgtggcttcttaagataaatgagtctcctcctttatcaacaatagctcaggatttataagctcacatttttcatctaggacagggaatgtagcaacttgcactttattatccatctctcattttcttcccgtcagacaatcgataaattccccaccaatgtctctttttaaaggttgcttacaagtttctgtttcagaacaatgtgctggcattggtttttatccctaagtcctttctgaatctgagtgctcattgggagtgatttgcaagagtttttccaagaatttctttagcaaaactacaattcacccaagagggcctaaatgtagcctgtatgagttgtgggcatcacttcctgacaaaaacctacatgagttgttgtccaggtagcatctcattcctgtgcatcatagaatagaattcttttacaagtacaaatgaccttaatgtttcttctgtccaactacctattatgggtgagatgaaacagattcaaataggacaggtttgtctgtgtttgacctgacagccagaggaactgttgagaacagaagtgctatattcttcctgtaattccatggaatgtgcttataatttctcagaaacatcccttaaggatgatctttaatgtgtagaagtatacagcaattcccatgctgacctaactgttttcttggatggccagcaagcagagtactgggctgcgtaagtagtatctagggtttgttaacttttaagccagactcgactgtatgtgggaggtgtaattgtgattctttttggctaatagagacttttcatctgtaagtcaaaatgtactatctgtcttctctgagtcggggattatgacatgagattaggataaaacagatagctgtaatacttgcccctccctgctggaagattgctgtgtagacaaagaaaaataataggagaatatagccaaatatgcagtggttcttaaagcatcagctctgagttgaccctgaattgcttgcttttcactagccaaaccaatcatatgtagggaaatatagtcctacacatgcccaaagaaataaagagcagcaaagtgcttaaaatggtgactgctttgtcatctgtatccctgagtgactaccctcttaaccctccatgggcatgtagcttgggtgaaaaataaatgtttgttcttcaaagccactgagatttgtgttgtctgttactgtagtatatcccaacttcttttgactgagcagcatggattgtctgatttaatcctcaatttagaagttagaattgtcttgactacgtaaatgttcatatgaagagcatgagccttagaaagcgtaccaggaagtggttgaagcagcactctaacacttgcagtctggttccaaagcttatattcttagccaggatattaaaatgctctccctcgttttctttctcactctcctgcactctctctctctctctctctctctctctctctctctgcgtgtgttcttctgttattgaggaaagatggtttctaaagagaatcaaggaagactcccaaagaaattgatagctaagctctaaaggaaaagtagaaactaggcaattcagtagtaaagaaaattatacttattccctctctgtgttgaggcatgggtaatccccattgtttgatttactcacgcccagagaaagtgtagagcaaagaattcctgtttatacattactgttggaaaccatgaaatatggaaagcattcaaatacaatggccttgaatctgtaaatcattaaaagcaaccttatgagattttataaaacagatgagaaattacagttttgatccactgaggcagcaaagcaatttgacagttacatatgtataatgctctctagctctctcacttgtgcgcgtgctttctctctctctctctctctctcacacacacacacacacacagaaaatgatctaaccaatatatgagctttagcattatggtaactagagagtaaaaaggaaaagaaaggaaactatatattaacatcattggccaaagaaagaaaatatgaacgaagttgagattacatggcaaatgacaaaaaggatcagcagctgtgacccagacactgatggggtcatctggtcctttcccttgctgttgggttaatcatgcaggactgatgatgtcaccgtttataatgctccctagaaaagaaagccagtagctgcctcagtagcctgtcacatagtctaattgccttgatcacaaaacattctctgtgtcttattcagctctggcttgcttcactctagacacccttcatcaagttggactttaatggaaacagaacgttgcccagcatgttcctttagtaaacccacacaaagtgtgcacaaataacagtcatgttttaccctctttaacatactacctctttccccaagcacttatctctaaatcagttctctttatggattcagggaattccaaagcacgtcatagcatgtctcttgaattggattgcttttttttctgtgaacgtcatatttctcttacaaaaaaaaaaaaaaaacacctcgttagggttatatttgtatgctgtaagattgactcattttaagtatacaactgagtgatttttagtaaatttgcttttatgcagctaccaccacaatctgattttagagtatttctgtcacctcagtaaaatccctcgaatccatttatagtcttctccgccctagacaaccactaatctactttctgtctctatagattttcatttctggacaatacatgaatgagatcatgcaatatgtggtcttttatgtctgtctgctttcagttatcataatttttgaggtttgtccatgttatagcatgtacctgtatttcatttcttttgattgctaaatagtattccattgcatggatatagaatattttacttatccattcatcagttaataggcatttaggtggtttccacattttggctctgatgaattatgttgctgtgaacatttatgtataagtgtttgtgtgaacatacgtttttatttatattgggcagagagcccagagtggaattgctggatcatatggtaactccgtgtttaaattcttaacaggcaggcccttttccaaagtgactgcaacattttatgttccccttagtggtatatgaaagtacatgatatttccaggttcttgccatcatgtgtgctacgtgtgtgtgtgtgtgtgtgtgtgtgtgtatgtgtatgtgtttatgtgttttggaaactcccaaaaggaaggaatgcaatctgcaactcttcttgccttttcgtcttagtgtttagcacagggctgggcacacagtagaagcttaatagtgtagcatggcatgtgatggttaaggaattttgttttggagttagactgccaggttctgtaagcattggttttctctactgttaaatggggctaatagtgcctaccctttttagttacaatgagggttaatgaatacagtgcagaccatgtgctttgtctaacgcgtatggaaatggtagcttttgttactcatgttttaaaattcacatggatgagcactttctgaacaatctctagccgatttctttttttctcttgcaattagatatttaggtataggcaatgtactgagcccccaagatgaaataataagtagcaccttatttctcatctcaagaaatttgaagtttagtgactgaggacatagatataaatggacaattacaatgtatgtgatataagatatgagcagaaatatgagatgaaagatatgatatgaaaaatcccatgtgacccagaaaagacatctaatcataaccaaaggactgcagagaggagcagaagcattgggaagagtattgctggccaagggaagggcataaaacatttacaaagattcaaaaaggggaggggtttggaaaaattgcgagcatgttctgtgacagagtgaagggagaccggtaagagactaggatggagaagtgagcaggtgcagtcatgaagtgtgctaaagattatattaagaagtttgttcttttcttttgttgctatcattctgttaagtgttaatgtctgaggagctacgaagaagatggttcagtattctaaaggtagaagtgaccatttataaagagaagaaagctagagcagtctcaaactttataatagtcgaatacattatttctcaactttaaaaaaaaattaaccctcccttgccccagagaatgtttagacatttttccctatttgtcaccccatgaaatgtcgatattaaagatatgctgcatatgtactttatatgtaaacatatttaggctttctaaattaaaagagtaaaaattttgtatgcgtccaaccccccaataattaatttttgtccactgggggctgtatccccctggttgggaatacatactctaataaattggaatctcatgtaggaacaggtatagatgttaacatttttgtcattccccacactacctttcaaaatacaaccatttggaatgaataaattctgtcactctacagatattttctgagcgcataataattgccaagccattttttaggaactgagactacagcagtgaataaaacagtcaaaaatcccacccctcatgaagattacattctactgcaatctgtatataattgttttggatccaaaccaagtaatgcctgccattaaaactgctccagcaagagattatcttgagacttgtttgttaaaacaggtcttggcattactttcaagcctgaaaatgtgctgacagaattaaaaacccgtccaatgctgatgcagggggaaaatcaaaggagcaagaaaatcgcactttttttctgttaatagattttattagtgggaaaaactgttttacacacctatcaaaatatcaaaaattgcacaataggtctgcaacctactcatctaacaacgaccaacgtttgcctttttctgaataaacatatgcactctgggtgtttttcatcagtctttagtatccctaggagtcctgggcatggggcggatcctggaacagatcagaaatgccttttcagcagtgtccagtggaatgtgaaaaatagcactttcttaaaatcaacataatagcaatttccatccccatcccacaagaaccaacaggaagtccacgtcactcagaattttgcagacatcctggtatcttaccctgcaccagtgggaaggcctctgggagcactgatcactgccctgcactggccatgctgagagaatggccacctacatgatccctggaggtccaaatgttctgcctctcctggagaagggaaactttggcgaggctggagtgctacagccatttcctttggaagccttaacccctcctcgggacactggcaggaaaatggtctctagaattcacgggaggcacagatcttttgtctactgccccccacccatcccagtgggagaatatctcctccacttcttgcctcctttcccagcacatctagcacagttcattcaatgagattcaatgagattataaaagacaggaaaccccactgcagttaggctactgctgcttcattctcaaaatctctaagccaagtaatgacaaagcccaagaacctgtctgaaatggtgacaaagggagtcaggggaaggagacaagaggaagaaaacaagttatgtggaaagaaccaatatttcagtctattgcgctgctactctgattctctttattctgtactcatcttctatagaaaactattaaaacaactaaccaatctgggccagataaagaatgaaaagcaaatgccatagtctttgcaccagcccagagggtaattccccagattccacctacctgtgcccccttcccctgcccctagcctctgccttttctgaaagttctaactgagggcttaggggagactctaaattagactgagaaagtaataggatttgctcttgtgtttttgaaaactcctattctgagttgagtaccgcaccctgtatgggaatagtcactggtgatcctgcgatgagcagggctttcagaattcttgtcttcgctgggattacaatgggagcctggcctcctccttctgtcttagatgtactttacagacttcaggatcatcactggacagcgctcattcagtcaagacctgctatccccctattgggctactataattttcatgcttgccttaagaaaattagtttcaccatttaaagaggaaaataagatattgtctgtttttctaattactgtttctaattgttctaggaatgatattctctctttttttttttttttgtttggtttttgggacggagtcttgctctgttgcccaggctggagtgcagtggcacaatattggctcactgcaaactctgcctcctgtgttcacgccattctcctgcctcagcctcctgaatagctggggctacaggcacccaccaccacccctggctaattttttgtatttttagtagagacagggtttcaccatgttagccaggatggtctcgatctcctgacctcgtgatccgcccgcctcggcctcccaaagtgctgggattacaggcgtgagccaccatgcccagccctccctctttaatttttttagagagaggattttgctctttcccaggctggagagcattgatgtaatcatagctcacaatcctgggctcaagtgatcttcctgccacagcctcctgagtagctgggactacaggtatatgttaccataccaactaatttttatttttattttttaggatggtatcttgctatgctgcccagtttgctcttaaactccttgcctcaagaaatcttcctgcctcagcctctcaaagtgctgtaattacaagcatgaaccatcagtcctggtccaattctcaatcttctaaatacctcttttacatcttattgggagagaagttgtagttcctaattgacctcaaactccaatcttaataatacccaaaacttcttatgtagtaaaagatgaaatgttttttaataaagctcatatcaaggtactttgatgggtttccaatccagcctcattgttccaaagctagaaaggagactataaatgtgggaacatattatttagttggtgactctaatcagttttgtgttatattttggaaatagaggccagtaacaaaaattcacactatttgatagacctttcccaccaaataccattaggcagaccgagagacagggaagtaggctagaaaagtgaaactgatcataagcaagaataggaaatcctgtaagtggaaaaatgatggggatttggcatgtttgaggtgagttagctgccataagatgtatatgaggaaagattaaattacttattgcaaaagagttacttggcttggattagatttatatttcttgaactgtggtcgtttctgtacctccttcactgtttttatttggctgggtacctcctatgttataaactgtcttacaggatgggatttagaggggccttctctttttgtaactcgtcatggcacacagcacatgattatacacacagtgggctctccaaaaatagcagaagattccttctgattatgtctgggggtgggtgaatgttgtgttgtagttaggatcccttcgactctgagaaggtgtaataaaagtatctatcataaaaatgaatggtgttaggcttaggattaaggatggttctatctattaatatcactgactgcagttacccagtaagctaaaatcaaagtgacattaataagaaacccagcaggaaccataagggcattacttttgtgtatattgaggattgggttacccttagctattatcctaatgactacgaatgtaaagtctgaattggaaacagttgagttcaaattcctagttctgtcattagctagctatataattttgagcaagtaacttactaacaaatttgctcacttgtaaaagaaggaaaataataattatctcataagaacattgaagagatgacatgagataatttatgtatagcacttagtacatgaggtatagtgtacattctaggtaagtgttgatttttaaaataaatcaccaaggaaaactttattttttgttacttaagagtttttttttaattactattggtgtttctagaagattttagaaaattagaatgtacagcccagtcatggtggctcatgcctgtaattccagcactttgggaggctgaggcaggtggatcacctgaggtcatgagtttgagaccagcctggccaacatggtgaaaccccatcactactaagaatgcaaaaattagccaggcatagtggtgggcacctgtaatctcagctactcaggaggctgaggtaggagaatcacttgaacctggaaggcggaggttgcagtgagctgagatcacactgttgcactccagcctgggtgacaagagcaaaaaagctctgtctcaaaaaaaaaaaaaaattataaagtacagataagcaaaaagaggaaagtagaaagcactcataactcagacatacaaagtattaaatattaacatttgagtataattccccctagaatttttctccaataaaatttccttgagaatttttgttatatgtacatgagtatatgtgggtgtgtgtgtgtatatatatatatatatatatatatatatatatgtcaatgtgtatatatattaaacagttatttttcagtgggctcattacatatttcctcaactgattgtttcagtcaataatgcatcatgaatatttgcctgcactcttacatattcctctgcaagaactacatcatattccctatagtgtgttcaattattgtaacatgcaactttacatagtttttattttttctcttattaactgacatggtgacgaacaactctaaagctaaatactttcacatttacacagttatttccttacgatgaaatccaagaagtaacataataattttcagcaacaatgaaggaactgaggtaaatcgtgaaaagcacagagtatagtaagtcagtcatcaataaatgttaaggaaaggggatatatgtaagtagtgtaagaaaagaaggagttgtttggaatagacttgctataataccccaaatataatcttttatttaagaatgtttaggagttcttgtttgtttagtaatcgtatcatgcatgtaatcatatgcgtgtaaacatatcaatgtcttctgacctcaatgggaagaaatgtcaacatagcatgcagacagatgaagcagcgcagtcagtttatcgaagtcaggttgaatatgtgtttctgtgaaaaggtttgcctctccagctatcagaaatgatcactaataatgcaaaacaagagctaatccatctgtctattttgggagggttcgaggtgcctttggacatccgcattgccgtgtttccctttgttgcaggttccacctgctgcaggtgagacacgtgccatgtcccccagcctgttgcctctcacactgggtttgattgcccagttgggttctcttggcagagctgtctccatgagtgccagaatagaaatatacagatggcatagaggaacaattttgacctgcaggatctgttctgatccacaggctgaagtgcatttatgaagacaggatggggaaaagtacccattttccacttggtcattcaaccccctgtgtggcatccatactgaacgtgttgaggtatacagcacaatagcaatggcagacagaagaagctgcaggaggctgaaataacatagataacatagtgaggtaggttgggtggagactgtgcaaactagagactgtatggtgtgtccaggcaggggcggctgctgctcacctcagtggatgctggcaacgtaacagcaggcccagcatggccattcctgtttcactggagaaactagaaacctggatttttcattcatatattttgctttttaaatgttattagaaaacagaggaatacataagaaataacaaagcatgttcatagtgtgtgtgtatatacaccaaacacacacacacacacacacacacccctacccctgggaggagaaaaaacacggtggagcaatgaaaatagaaatttgacttctttgaatatttgttattttgtagatttgactttggtgccacatacatagtttacataaaagaaaattggactttaaaaaaacagtcatgaaaaaatgagaagaaaaattgaaacaattcagcctccctgggtatcatgttaacagcataaccccacagaaaggaattatttcaagtgactttgaaattccacagtttgactgtattttcctagtaggatatactttaaagatttttaaaaactaacaaattttacattgatttttattaaccataatgttagtacaatagtgacattggtgttctgaaactattctgtgtgtgttgtgagttaaatgaataatcatgttggtattattcagaaaagggatttttggtatgaaagaaaggtagtaacattataaaatccaggagataaaatggaaatcttcaagtcctgaatttgagttaaagtttcatgttaaatcatgttatttttactaaacacacactcacacacacacacagacacacacacacacaccccttattttccagttccgtccgcagaaacaaaggctcatccagtaacaatcagtattcaaagctcccagttgtggtttctaaataccatttcccactgaaatgaaccagggcttcttactaaaaatggctgattgcagtcctggggaaggactgtaggatcaccctgtaacatctcatagagaagcaaaagggccatcaaagactacgtggctatattaaaagggtgcagcagtcaactggaaaaaaacccttgactgaagtagggaaattagaaaattatagggataataattgggctagaatgaaacaaatgaaaatgtttatagtcatagttaaaaagtaaaaacctcattggtttggaagatactaggtggaagatgttagatagccaattcagtattttaaagatcaacaataaaggagggaaaatccaactctgtcaattcctctacaaactaaaattcagagttagcaaatagttgatgagatgaactttctctggctagtattcccagctagtaaattaagaataatagaattaggatataaccagtttgaaacctctagtgaaatcatgggtcctctaggcaaagactacattggctgataacctcatggcaaaaattgttatgtgcctactgatagaagaacctcccatgaagtaagtaaaaaattgcgcctcactccacctcaaagatgttcatgtataatctcagaacccatgaatgtattatattacatggaaaagggcaattgagattgcagatagaattacaattactgatcaggtgatcttaaaatggagaggttatcctgggttatccagatgtgcccagtgaaatctcaagggtccttgagaatggaagaaggatacagaagattcagagtcaagagtggttttacatgagaaaaactcaatcagccactgctgactttgaagatggaagtgaggccatgagcccaggagccagaaagagaaaggaaattgattctccctttagagcctccagaaaaggacatagcccttctgacaccttgattttagcccattgtgtcctggtcagaattctaacacacagaactgtaagataataaggttgtggtgttttaaaccactaagttttgttatttgttactgtgacaatagaaaactaatataccccatttcctaggatatagtctttctagaaaattgcatctgaatctgatcaagcctcttgatgtaactaccaatttacaggaaacataacgaatagaggaacacattatatgaaattatgggaatgttcagcaaaatctaaactctgggaaattccatttttaaaatgacatttatcaaataaagtatatgtgtatatatttgtatatgtgtggatgtatgagagagaaaatgactgactggaaattttaggaactggcctagtattttatgtagcaaacaattgctgtaaggaacttaattcaaataagcaaattatagagagaaaaaaacatattagtgaaatttgaacatggacaataggtgtttgatattaaggaatgattgttacttctggattgtgtgtgtggtaatgggattattgttatatttaaacaaagaaggggagtgtaggtggcagtaatagataataatagccataaattgataatcgctgaagatgagtgataggtacatatgtgtttgctatctgttctttctacttttgcatatattatttccgtaacaaaatatttttaaaaaatattagcaactaacttgactctttacatgttttgtgactcaaacacacacgtccaaagtctggatttaaccaacagactgccagcttgaaatctctgtagagttctggaaataggatctttcacttttcctggagaattatccttttctctcctcctacttaccttctccctccattctttctgtgctgcctagcaaaattgccccccaccccaatctgtgtgtgtggatgactagggggcattacaaattgcttggaatagaattttctcagaaagagtgaaaaagataatatgcataactgcattaaacaatacctcctaatattttacatgttttttgaatacccgtcctcattccacaccttcaaaaattaaaaaaaaaaaaggctataactacgttttttacagcctgaggtgttttgaaattttggctaatcatatcttccttgttatctctgtgttctatttcaggatggaatgggaaacctgaggatcacagaaaaaggtctaaagctagaaggagactctgaattcttacaacctctctacgccaaagaaatccagtcccgaccagtaagtttctgctgagagaaggaggcattattgttgctctagaatctaaatctggaggaattgatcttgctatcagctgagtacagagaattggggtggggagtaatactggtattaagatgaatttgctttctcttctgaatctttgagtatcatcacagcagtggtactgtaagcaagtgagatgacctctctgagcctctttccattcctgctcaacccctgctacccagctttatagattgtgccacaaataaggcaaaacagcaaatgtggaacagccataaataatatatgaatgcagataatattgctgtttattttattcatcaagtacttcaaagccatttttagaaacacagaactgaagaactagaattttgtttttcattaagactttacactgtgtagccagtgttggttaggatcaattcaatatcaagctgagtacagtggctcacacctgtaattccagcactttgggaggccaaggtgggcagatcacctgaagtaggagtttgagaccagcctggacaacatagtgaaaccctgtctctactaaaaatgcaaaaatttgccaagtgtagtggtgagcacctgtaatcttagctactagggaggctgatgcaggagaattgcttgaacccaggaggtggaggctgcagtgagccaagatcacgccactggactccagcctgggcaacagagcaaggctccatctcaaaaaaaaaattaattcaatatcaacagctacattctgaaatggtatttaaataatcactacagagtgtgtaccctgttctaggcacattgctgttctgcatgcagtatcattatctaatttagttcacagatttgtccactgaggtggggactattgttgcctctattttatagattaaagaattgaggcttggagaagtttcatgtaaaaagcttcatacttgtagcaggacaaagatttcaagccttctctgttaaccattatttcctacctaagcttttcctttcattccttctttattgctgtagcagtgattcctacatacataccttgcctttgttaaccactgttattccaagttgtgtgggtttcttttagtggttttatttttcgattggttggtttcatttatttagtctttatttttgttttttagtggagtggtagaatttgctggttgaaaaggattattaatgcatttgctctgccttggattgatcccccttcacctgtgagcaaggcataatgtgaaagttcccccaaagcactacttgcattgtgtgcattgattagcataattattgaaattcagcaacttggtgcagtggctgattttatctgaatgttatacaaaatcttgaattgtattaaactggtaccactactaaatttcaaataagtttactttcttgtgtgcttagtaaaagagagggaacaaggatgttaaaactatcaaaaatagcaaatgaatttagccatacaatgattatttataaaatgtaactggaacctatagcatattgtcttgggtacttaaagtacacagagtattgtgaacatatttactgtcattgagaaacctataccctagaaggagtaatgaggtgaccctgtaacgtggagagtcagatgataattctgccttggacagaatagagacagtttaaagcatttaaaaaatatctgttatatgcattgctcttaatttatatcttgttttcccaacctggcaatttggttagttgtcattgacctatttctagttgaactttagactaatagtcttacctgtattaaacttgtttaactcactagtttagtttagtcatttccttctatggatgttggcataccttttctgtaaagggccagaaagtaaatattttagttttattttaaactttttttttcttttttacagctctcaaaacttgaatagcattcttagtttgggagtcatacaaaaataggccacaggctgtcattcaccaacccttctaatctatattaggaataattccataaatatataaatgctcttatgagactggaagtggtaaaaggtagattttaagaacataagaagaacagttgatatgtgttgagtaaaacatcctgaaataagtttccttggtatagaattagtcatgtcaggatattaggaaatgtgttttagaagacttgaaaacagggtactgggtgcatctgttgggtctgtatgcaggaattggatgtctagcaaatgtgttagcaagcctctctggaaattgacagacagctgatcctaactgagagatatacctgcttgtaagcttaaaaagtaacaatacttacgtttatatttaattacttaccttaatactgaaatacatgagctatatgcagtgctttcaaatcactgtttaaagaaaataaaaagccctcaaattcactattttccattggttttaataactttttttcaaaaatagtaaagttttatagccttacatgtttctaacaacaaaagaagtatcttctaactgaaggagaaaatacacagatatgcatacataataaaatccgtaagtcatgtgagctctacctgaaacctgtgcccaaattcattcactcttctgcatcacacaccacaccttaggtcaagccactgtctgttctcacctgcaccattgcaacagtctcttcgctgtctgctgccttacccttttagcttcattatacaaattgtagccaaagtagtcttcaaaatgtcaaatcgctccacctcttcacaaaggatttcccattggtttcctgttgcatctggaatacaatctaaagtcctcactaagtcctgtaaaatgcattattaggtgttttcattgagggctccttctgttcatctttgtatcagctcagatgtcacctgtttagaaagacctccttcacccaatcagtccatttagcataatagtcgtatataaacagcacattggtttttattccttataactgtcattctttcacattcttatcatgtttatatgtttggaagagcagcagattgtctggattttccccactgtattcctcagacctcttgctgtacctagcacatagtacatgatcagtagatgtttgagaaactgaaccagcgaatcactgaaaatgaaagtgtctcttaagtctattctgcagaggcaagcactgttaagaatttactgttttggctgggtgtggtggctcatgcctgtaatcccaacactttggaagtctgaggtaggtggatcaagaggtcaggagttcgagaccagcctggccaagatggtgcaaccctgtctctactaagaatacaaaaattagccagacacggtggcgggcagctgtaatcccagctattccggagactgaggcaggagaatcacttgaatacaggaggtggagcttgcagtgagctgagatcgtgccactgcactctagcctggatgacagtgagactctgtctcaaaaaaaaaaaaaaaaaaaaaaggaacaattgactgttttatcaaacattttccatgcatatgtatttttcaacaaaaccataccttgaatactattctgtactgatgcaatgatggtctcataagattataacaccatatgtatttttactgtactttttctatgtttagatagatacttcccgctgttccagttgcctacaatattcagtgcaggaacatgccataaaggtttgtagcctaggaggaataggccatgccatacagcctgggtgtgtagtagagtacaccatctaggttggtgtaaggacactctatgatgttcatgcaatggcaaaatcacctaatgacatgtttctcataatgtatcctcatgaagtaatgcatgcctatattgtttattttgtatatcttatatttaaaattttaatagctttcctgaagtacacttctgataagttacaatctgataagttctaaaatatgtctgttcacatgaaaccaccacaatcgagataacgaatgtatccgtcacccctgataatttctccttgctccattttaatccccccatcctgctgcatccttcctacttccacacccatgtgcatttcctagaactttatataaatggaatcatatagtaagagtatctgaataatgttaataataagttgtcagtttataaagaccttttttaaaaccatctatttaatgtctaacttaagagtacgattttttttttttcctgcaatggggctatgtcttgattttctggggagagatattagaagtggtccagttcataaacatttaatatttcccttctggataacatcaaagcacagagaacagaatagagaataacatattaggcatagcattaaaggaagaattagtctttctttgatatgtccacaaaaattgaaatcaagtatattggcatgaaaaggtgaaagaaaaagatttctaagatgatgatttagtccacagggcttgcctctctttaagcacagaggttattgccagctgaaagaaactggggttctggtattaaggaaggtgggagggatgagtggttggcaggcaaccaataggatctgccatttttactgagtcataacctcacatgatgctcatgaacctcacatgtagtttttagcacctttccattcaccactttgttatcttcagcttactggtcgttttctgatgtatctgactgttgtctgtagactacctctgggggcctctcatctgcatgattatctgcagtgtcatttttatgtggatcatagctgcttccattttatggggtatcaccttctgcttttcctattgaaaagagatcagtgtccagttgagcaagattagtcaactactcgaagtgaggacaactaatgaagcaacacttgacttccttgtggttttgtgttgcactgatctgagaggagctgacattagttaagcaattcacacagtgttcagcactgtatctgatttcattactgaaggttgcaaccctagtaaagtcactacaaattgattagtgtgataacaatcacttaggaagataaattaatgagaaatgttcatctttataaatatttgcatctgggagttgaatgaaagccccaggacattctagctttcagccacatggatgtacagcttctaagtggtaaagtatcatgctgtccagaaaagagattgagaaggatacatgctaaattaagcattcaaccatgacatccaaaggcagaatgtcttagaaataccacttgaatgcattagcacaaaaggttgtaaagttaagggatttaatgctatacaactctatgtttgaatgctatttcaatgtgattggatatctttttaattgctaagtataactgcaagtttttggcaggaactactagtagatagaacgaatgaatgagtactaaggaaacctttattactactttgtgagtaaaggtctccttaggattcattcattcttagacaaagttgtacatccctacttcttcaaagaggctttttacctcacatcttaggatgctaggattagattatgcttttgcataacttaatgtgaactagcaaaggaaaggaaaatagcatttattaagcacctattattgttccacacctacagcaataggaaagccgtatcatgaatttatcttcatgttcacctcaaactccatttgagggtgggtatagggctcctagcccattgctgtattgaatttagaagttcggaagaggagagggtagaaagaaaacttgaatggatcagaaaaattaacttacattaggagaataaagtggaaaattatgcaaatattgagagtatttatgtcttttaaaatattttatcccgtaaaaaatcttggctctgcctatcgtaagatagtctcatgtatgaaaaccagcatatagaattataaagtcatatataaatgaggattttagaagtggcttataccaagaggcagtgtgacaacatggatttgagcatgtgctgccttgttggacttgggtggcaactagtgctaccatttgttcagtgagtaatctttgaacaattgtttaacctttcaaatgcttgttttcttacctgcacaactgagatattaacacctacatcatgtgtggtcgtaaataagtaagataatgttttttaactgttaatacagaacttgacataaagtgaggtccagaaatggtagccgctaccttcatctccttctgacaatgatgataatgatgatgattttcacatcatcatatagtccagatttcatccgatgtttggacttcctctgaatcaaatggtcttgcaacctctgcttggatatcttcttaatgacagacttattactctcaaagaaaacccgttttatattcagtagcttttagtttaaaatttttcctttgctgtgttaccttcttctaaaatttgacttttctctcattcttcttaaacatttttgctgggtctagcattcttggcacagtctttctgaaaaaaaatagcttcatgatatatttcaagtactttaaaaatgtttatacactctgattcagtaatgacgttttcactcattttataacatagcaaaagcaaaacaaaatatttaaagattaaaacacacatggaggggtcaagatggttgattagaagcagctgtggatggctgctcccactgagaagaatgaagaccgcatgtgaatcctgcaccttcagctgaggtatccaggttctctcactgggactgatgaggtgttggtgtgacccacagagagtgaggataagcagggtggagtgatggcccacctgggagcagcacaggcaatggggagttcccgcccccagccaaaggagcagagagcgattgtgctaccctgccaaggaaaccaagatttacccacatatctgtgcaacccatggatcagaagatacccttgtgagcccacgccaccagggtcttgggacccaagaacagagctgtgcagactctcagcagctgctcgagtcgtggccagcagcagcatgctgaagactgcctgagatgaccaagtttccagaggggaaggggagctgccatcactgtgccccagccgttttcccctgctggtgccctggagactaggtggtttggatgggaaagaagtccccacagtgcaacacagcagctgtagcagattgtggccagactgcttctttaggtgggactgggctccatccctcctcaccaggcagggcctccctgtgggaatttcagcaactgcagccagaggtttacagaccgaactctaatccacctggaatggacccccagggggagaagcagctatggtctccaggctcagtagttagtctttcctgcctgctggctctgaggaggccaggcagtccagacaagggggattcccctgagcacaaaacacccgctctgccaaagggcagccagagtgcttcattaagtaagtggctgatcccatgcctcctgactaggtgagaccccccacacacacacccccaataggggttgccagatattttatgcaagagcattccagccagcatcaagtcactacccttctgggacagagctcccagaggaaggagcagacagccgtccttgctgttctgcagactccactggtgacacctccaggtgcaggaaaagacccaggagtggccccccagcaaactgcagcagctgtacagaagaggggcctgactgttaaaagtgaacagaaagcaacaacaacatcaacaaaaaaatacccacaaaaccctatccaaaggtcagcagcctcaaataacaaaggtagataagctcacaaagatgaggaagaatcagtgtaaaaagctgaaaactcaaaaggccagagtgcctcatctcctccaaatgattgcagcacctttctagcaaggacatagaactgggctgaggctgagatgaatgaactgactgacataagtaggcttcagaaggtgggtaataatgggctggacgaggtggctcaggcctataatcccagcaatttaggaggccgaggcacatggatcacctgaggtcaggagttcgagaccatcctggccaacgtgatgaaaccctgcctctactaaaagtacaaaaattagccaggcttggtggcacatgtcagtagtcccagctactcagggaggctgaggcaggacaattgcttgaacccggaaggtggaggttgcagtcagccgagctcacaccactgtactctagcctgtgtgacagagtgaggctacatctcaaaaaacaaaacaaaaaacaaaacaggtgggtaataacggacttctttgagctaaagaagcatgttctaacccagtgcaaggaagctaagaaccatgataaaacattacagaagctgttaaccagaataaccagtttagagaggaacataattgacctgatggagctgaaaaacaacacaagaacttcacaatgcagccacaagtatcaatagtgaaatagactaagtggaggaaagaatctcagagcctgaagactatcttactgaaataagacaggtacacaagattagagaaaaaagaatgaaatggaatgaacaaagctgccatgaactataggattatgtaaaaagaatgaacgtatgaatgattgaggtacctgaaagagacagggagaatggaaccaagttggaaaacgtacttcagaatatcatccaggagaacttccccaacctagaaagacaggccaacattcaaattcaggaaatccagagaaccccagtaagatattccatgagaagatcaaccccaagacacacaatcatcagattttccaaagtcaaaatgaagaaaaaaaatgtttagggcaacctgaaagaaaggttcaggccacctagcaaaagaagcccatcagactaacagcagacccccctcagcagaaaccctacaagctagaagagattgtgggccaattttcaacaacttaaaaaaatttccaaccctgaattttatatctagccaaactaaacttcctaagtgaaggagaaataaaatcattttcagacaagcagatgctgagggaatttgttaccactaggcctgccttgcaagtgctcctgaaggaagcactaactgtggaagggaaaaactgttaccagccactaaaaaaacacattgaagtacaaagaccaatggcattatgaagcaactacaccaacaagtctgcaaaataaccagttagcatcatgatgacaggatcaaattcacacatagcaatattaactctaaatgtaaatgggctaattgccccaattaaaagacacagaatagcaagctggatagagtcaagacccatcagtgtactgtattcaagagacccatctcacgtgcaaagacacacaaaggctaaaaataaagtaatggaggaaaatttaccaagcaaatggaaaaacagaaaaaagcaggagtcacaatcctagtttccgacaaaacgggctttaaaccaacaaaaatttaaaaagatgaagggcattacataatggtaaatggttcaattcaacaagaaaagctaactatcctaaatatatatgcacccaaatacaggagcacccagattcataaaacaagttcttagagacctacaaagagacttagactcccacacaataatagtgtgagactttcacacccactgtcaatattagacggatcatcaacacagaaaattaacaaagatatttaggacttgaactcagctctggatcaagtgggcctgatagatatctccataactctccatccacaaacaacagaatatacattcttcttggcaccatatggcacttactgtaaaagtgacctaaaattgataaaattccaattgtgattggaagtaaaacactcctcagcaaatgcaaaataactgaaatcataacagtctctcagaccatagctcaattacattagaactcaagattaggaaactcacttaaaaaccacacaactgcatggaaattgagcaacctgttcccaagtgactcctggataaataatgaaattaagtcagaaatcaaattctttgaaactaatgagaacaaagggacaatgtaccagaatctctgggatgcagttaaagcagtgttaagagggaaatttatagcactaagtgtctgcatcagaaagctagaaagatctcaaatgaacatcctaacatcacaactaaaagaactagagaaccaagagcaaacaaacccctaagctagcagacaagaagttaccaaaatcagggcagaactgaaggagttggagacacaaaaaaaattcaaaaaatcaacaaatctaggagctggttttttgaaaaaaaaattaataaaatagcttgctagactaataagagaagaatcagatagacacaataaaaaatgataaaggggatattatcactgatcccacagaaatagaaacagccgtcagagaatactataaacacctctatgcatataaaccagaaaatctaaaagaaattgataaattcctggacacatacacccttcccagactgaatgaggaaaaagttgattccctgaatagaccattcacgagttctgaaattgaggcagtaaaagcctaccaacaaaaaaacaaacaaacaaacaaacaaaaataacaacaacaaaaaagaaaaagcccaggactagatttacagcagaattctaccagaggtacaaagagaagctggtaccatttcttttcaaactattccaaacaattgaaaaggagggattcttccctaacgcattttatgaagccagcataattctgatacaaaaacctaggagagatacaacaaaaaaagaaaacttcaggccaatattcctgatgaatattgctgcaaaaatcctcagtaaaatactggcaaaacgaattcagcagcacatccaaaagcttatccactacaatcaagtctgtttcatctctggaaagcagggctggttcaacatatgcaaatcaaaaaatataattacataagcagaactaaagacaaaaaccacatgattatctcaatagactcagaaaaggccttcaataaaattcaacattccttcccgttaaaaaactcccaataaatgaggtattgaagaaacattcctcaaaataacaggtgccatctataacacatcttcagccaatattatattgaatgggaaaagctggaagaatttccttttgaaaactggcagaggacaaggatgccctctctcaccactcctattcaacatagtattggaagttctggccagggcagtccaccaagagaaagaaataaagcatattcaaataggaagagaggaagtcaaactatctttgtttgcagatgatatgatcctatatctagaaaaccctgtcatctcagctcaaaatcttcttaagctgataagcaacttcaggaaagtctcaagatacaaaatcaatgtgcaaaaatcacgagcattcctatacaccaacaacagaaaagtggagagccaaatcatgaatgaactcccatttacaattgctacaaagagaataaaatacctaggaatacagctaacaagaaaatggaaggatctcctcaggagagttacaaactactgcttgaagaaatcagagaggacacaaacaaatggaaaaacattccatgcttatgaataggaagaatcaatattgtgaaaaggtccacactgcccaaagtaatttatagaccaagtgctattcccattaaactacctttgatgttactcacagaagtagagaaaactattttagaagtagagaaaactattttaaaattcatatggaaccaaaaaagagcccaaattaccaagacaatcctaagcaaaaagaacaaagctggaggcatcgtgcgacccaacttcaaactatactacaaggctacactcaccaaaacagcattgtactggttcaagaacagacacatagaccaatggaacagaatacagaacttagaaataagaccacacagccaggcgcggtggctcatgcctgtaatcccagcactttgggaggacaaggagggtggatcacgaggtcaggagatagagatggtcctggctaacacagtgaaaccccatctctactaaaaatacaaaaaaatagctgggtgtgctggtgggtgcctgtagtcccagctattcaggaggctgaggcaggagaatggcatgaacctgggaggtggatattgcagtgagtcgagattgtgccactgcacaccagcctgagtgacagagcgagactccgtctcaaaaaaaaaaaaaaaaaaaaaaaaagaccacacatctacaaccatctgatcttcaacaaacctgacaaaaacaagcaatggggaaagtattccctatttaataaaacgggagctgacagaactggctagccatatgcagaaaattgaaattggaccccttccttacaccatatacaaaaatcaacttaaggtggattaaagacttaaatgtaaaaccccaaaccacaaaaactctagaagaaaatctaggtaataccattcaggacgtaggcatgggcacagattttgtaatgaaaatgccaaaagcaattgcaacaagagcaaaaaattgaccaatgggacctaattaaactaaagagcttctgcacagccaaagaaactatcatcagagcaaacagacaacctacagaatgggagaaaatttttgcaatctatccatctgagaaaggtctaatattcagagtctacaagaaacttaaacaaatttacaagaaataaaacacattataaagtgggcaaaggacacgaacagacagttctcaaaagaaggatgcatgtcgccaacaaatgtataaaaaaagctcagtatcactgatcattagagaaatccaaatcaaatccacaatgagataccacctcacggcagtcaaaatggctattactgaaagtcaagaaacaacagatgctagtgaggctgtggggaaataggaatgcttttacactgttggtgggaatataaattagtttaaccattgtgaaagacagtgtggtgattcctcaaagacctggaactaaaaataccatttgtcccagcaatcccattactgggtatatacccaaaggaatatagatcattccattataaagatacatacatgtgtatgttcactgcagcactatttacaatagcaaagacatggaatcaacccaaatgcccatcagtggtagactggataaagaaaatgtggcacatatacgctatggaatactatgcagccataaaaaaggatgagttcatgtccttcgaagggacatagatgaagctggaaaccatcattctcagcaaactatcacaaggacagaaaaccaaacaccgcatgttctcacttgtgtgggaattgaacaatgagaacacctggacacagggcagggaacatcacacaccagggcctgtcagggggtggggggctgagggagggatagcatcaggagaaatacctaaagtcagtgatgagttgatgggtgcagcaaatcaacatggcacatgtatacctatgtatcaaacctgcacgttgtgcacatgtaccctagaacttaaagtataataataaaaaagatactaaaaaagaaaatgtggtacatatacaccatgaagtactatgcagccttaaaaaggaatgaaatcatgcccttttcaggacatagatggagctggaagccattatcctcagcaaactaacacagcaaagaaaaccaaacgtcgcatgttcttacttacaagtgggagctgaacaatgagaacatatggacacggggagaggaacaacacacaccggggcctattgatggggagtcagagggaaggagagcatcaggaaaaacagttaatgcatgctgggctttaaacctaggtgatgggttgttaggtgcagccaaccaccatggcacacatttacctacttaacaaacctgtacattctgtacatgtaccccagcacttaaaaaaaaaaaagacaaccccatccccaccccccgacacacacatcagtgctgtacaaaatcctgtgtaaatgttggttcttattaaagtctaaattccacatataaaatggggcatgagggtatccaagtttgtcaatatttatcaaagttgagaaatatctgtacactttttgaaaccctaagccagtcatcctcagcatgaattgttatttttgattctgtcatttctttatttaatgaagagggagatttgtaaaaatccattttgattttagcatgatgtcaattgagatttattccatcatcctaattaccaagacatatctaggaggaatgttaaaagcacctaataatttaattagaccaattacttcatttactgattggggcactaaggctcagaaagaaagcaggatttaccaaattatacccagctaaatttagaactaaaatccagaatggcagtattcttccctgtgaccaaactgactgttaagtggtaattttttaatgatatgtttagtgtgacaagtggttacacgtggcaatttccctctcatgaggaataactttgactgaaatgcatgttgaactcatgagaagattcataagcactatgagaaggaaactggaaacaacagtggataatgcaacggaactgaagcttaattatggatgatctaatcactgggatgatattgtatacttaatgtatttctcgtaagagttaagcgaaatgattttagtgacctgccttagaaagtattaagtcagcttatgacagaagttacaaactgaatccaggtcacagatgtagtctatttgcctcacacagtatttttcttttaatatgtgtgcttctaatatttaacaatctgagaatctcacatttttttaaaaatctacattttctgattcttatgaaggaacaaaaatatggtagagtgtttcgatattcttacacggtagagttcaggggcagtctcacattttgaaaacttcatactttatatgagacattttttcttcagtttggcatagtctcaccagtcactattgtgtcatacccagttacttaactcatttatactgaggacctctgaagtaccttgcaggtgcagtacctggtttatggtgttatgaatgtacaatacgtttttacttaatgtcctcagtaggttcttagaaactgcaactttaagtagaacaccatatattaggtccttgagaaacattgttttgtccagagtcattttgttataacattggtgaaaaaaaaaatgcttttgttacatgttatttcacttaaagtggcagtttccaagaacctatggatgatgataagtgaggtcttactatatatatatatatatatatatatatatatatatatatatatatatatatatggttttacataaaactacagttttatataggtcttactatatatatatatatatatatataggtctttatatatataaagagagagtaatatatatagttatatataaaactatagtttatatatagtaatatatatagttatatatatatatatatatcatcatgcaggagttaagaaactaggatgatttcataggattaatattcactcctctttaccattccttacttcttgtttctctctcttgtgacccagtttctcctagtggtctagcttgggggttcccctaccactttattgaggtataattgacaggtaaaaattgtatatatatttaaggtgtacaaacttaatgatgttttaatatacatcatgaaatgactaacataataaaaccaataacgtattcaccacctcacataattgccttattttatgcatgtggtgagaatacctaaggtctactttcttaacaaatttcaggtatataatacatgcttattacctatagtcaccatgttgtatattaggtctccagaacttattcacgttataaatgaaagtgtgtactctttgatgaacatcttgtttcacctaccccactcccaccctcactaacaacccttctactcaatgtttctgagtttgactttttaaaattctacataaaagtgagactatgcagtatttgcctttctgtgacttggtgatttagcttaatgttctccaggttcatccacgttgttaaaaatgacaagatttcttcttttaaggctaaatagtattccattgtgtatatataccatattttctttgctcattcatctgtcagtttagatttaattcatatcttggctattgtgaataatgctacagtgaatatgggcatgcagatatctctttaagataatgattttctttctgttggatatgtacccagaagtgggatggctgtatcctatggtagttctattttactttttttgaggacgctccatgcagttttccataatggctgtaccaatttacatttcaaccaacaatacaaaaaggtcctcttttctctacatccttgccaacatttgttatctttcttctttttgataacagccattctaaaaagggtgaggtcataactaattgtggttttgatttgcatttccctgatgattagtggtgctgaacaccttttcatatacctgttggtcagttgtatgtcttctttggaaaaaggtttattcaggttctttgccaagttttaaatttgggttatttagttttatgctcttgagttgcatgagttctttatatagttttattattaatccattatcaggaaggtagttttcaaatatgttctcacattccatagatttccttttcattttgttgatttttttttttattgtatggaaaagttttagtttcatgtagtcctacttgtttgcttaattttgcttttgattcctatgcttttggctcatataagaaaaaagtcatttcaaagaccaatgtcatagagctttgcccctatgttttcctctagtagttttactgtttctggtcttatgcttaagcctttaacccatttttgagttgatttttgtgtacagtataaaataaggattcaatttcatttttgtgcatgtggctatcctgttttctcagcaccatttattgaagagactatttttttacccatcacatattttggtaattttgttgaaaattacttaaccatatctgtgggtttattgctcagctttctattctgttccatttatctatgtgtctgttttttgtttgtttttgttagtaccatactgctttgatttcaataactttttaatataatttgtaatcaggacatatgatacctccagttttgttcttcttggttttgaaattgtatgcaagttcaatggcaggcagtagttgtcttagaatttctggagtctgaagtatggccctttacagccattctctactctgagtcttctaaaatgtgcttcctttttgttcgtctaagcactaaagaacttaagctggggaaggagggagataaagatgagaaagtgttaagatttggattctgagtgctgtttatgagggaaaaaaaaagtgagaactatcatgggatggcagacacgcacacagtctgaataggttccattgataaattagttgcaaggagcaaagtcatgtctctggttagtttagaaacaaaatgaaggctatgatggcttctcctcagtaagcaaagcagctccaactcccaagtgaacacactgcacacaaaacagtattttccatgccacttgcatggaacacgagcatcttgctgtcttaaattaagaagttaactggaccatgaagtattgcctgagtaaataaaagtgatttgtactaagtcagaagggtgcattaggcctctttgcgtttctttgctcacacataaattatggatattattaaaaattggaagggtcatctataagcccatctgtactatgaagccaattgccattccccaaatgtatctgttttcctcttataacttattgtggacgataatgtgaaccagctgcttacattttttttaaacagacacataaactttgaatagttcaacacgtaatactattgtcagtttattcgggaaaacagagatacgtattcaaaggcttttggctgccatacaattaacatggctgatggggataaattgactgtgcgtgcttttcttaaatgaagcttatactagaaatgtaagagttactgagggctttggtcgatctcagttataacaatgtcagccagagttctggtaggagaagtgtgttcaaacttcaaaggagcctgagaatgtctaattgtatgagttgagggccactgggcaggtaagattcctcaaattcttcctcattgcctatcatggtacagaagggtccatcattagaatctcttttatttgaaggcttctggatctctcagtaatttttattcagccagactcatactataaacactcctttcactgatgtacaaacacatttccacaaaggtttggaaataacttataagaagtacatacagtaacatagtcacaaaagatataatgggttaagatcagaaaaaaaacataaactataattggaggcaaagatgagggcaagctatagaatataaggggagtccatagcatcccaggagtttgctcttactaaacctggagtttggctatgaatttttgaaagagagagacagtgtgttggatgtaaccttctatctgtactttctagagatttggttaaaatgtcctggatgatgtggggagttaaaactagcagcctagtgttagagaaagtacactagattcaaagtcagggaatctggcttctcttctcactgtccaagtgagcccttgagcaagttacttctcttcatgtctcagtttctttatctgtgaaccatctatctgtgaaagaagctggatctggatataatcaatggttttctgtagcttttttttaagtcatgaaatatttttaagcctaattttactttgaacccccaaatccaaaccagctggaagctgagctgctgtggttgaccaggagatggtcctgcacctgttgtcctacccaaccaatcttcctgtcaccagccacagggggccgaggcccttgctgggattccacagaccacagtttgaaaatgaccagactggatcaaaaaatagcctcattttttccaggtctctgttccaatgccattttctcgtgaagaccttccctgactgccttatctaaaatatatctctgacccagtagatttatcttgttatatcatatcatatcagattacatatgtatcatataattatatatttttacatttacctgtttgtttgtttccactattactttataaactccatgacagcagagatggagaaaggcagtactacatggtatttgggagcaggatctggaataccaacttcctgaatttgaatctttgctccaccatttactagccttgtaactttaagcaagttacttgaccttttctgtgcctcactttactcctctgaaaaatgggcataataatagcactatctcataagattattatgggattataagagttaatttatgtaaagcttatggaatagtgcattggatgtagaacactgtataatatttgaaaataatactatatattattagcatttattaatactattatctttttttgccaccgtctccttagtttctagactagttcctgtcacatgataggaaaacaaattgtttgaatgaatggatgttctcttaggatctttctgactcaaagattctctaagaagcttttggagagacaaacatctcttcaaaaggatcttatacatttattaattatctgtattagctacatactaagtattcaactatgtagacagtggcacgagcagctatgtggtgtgaggccatgagggagtaagaatagactttaggtggaagagctaagagagggctaaaggtaataagtttcatctttacgtactctgcagctttgacctcctatatgccttgattcatgccattcataagcttctgagagctcctaagtgttgagctgtgtgttatagataggacattttaatagaacaaaattagcatttccagtccttcaaagctttgggtttctcatcatcatcactatggcatttcaacatcatctaatacttttgatttcaagaacatcccagctgtctagaatgactagttgctgctgagactgcttcttgcttatttcataaattgcatttatgagaaagaaatgcataccagagtccactgcagcttggtttgttcctttagtagtaagaagattcctacctaggttaggaggcattcccacagaccgtagtaactgctgagtacatttgaggagaataatagagggaaggtagccttaagaaaggcacatgggccggtgcgccagctcacgtctgtaatcccagcactttggaaggctgaggagggtggataacgaggtcaagagatcaagaccatcctggccaacatggtcaaaccccgtctctactaaaaatacaaaaattagctgggcgtggtggtgtgtgccggtagtcccagctactcgggaggctgaggcaggagaattgcatgaacctgggaggcagaggttgcagtgagctgagattgggccattgcactccagcctgacaacagggtgtgactctgtctcaaaaaaaaaaaaaaaaaaaaaggcacatgttttaatatggtcatgtggtcttaaaatctttgtttttcttcactcctatgttgttggcaaaaaaaaaaatgttgctgtaaaaaaaaaatgctttttttcttaatgcttccatcaaaacagattcatcttctggcaactctggctgtacccagtgctctgtcattgctatggatatgttacgccgttagtcttaattttaaaaaacttgttccttgtcaaaaacactgataatttttcaggagacacagtttcagaagctgaaaaaacttttttgccatatgaaattataatcatatactgttactttgattttgtgatctctatcagcagctaagtgtaaccttttgatgcagcactctataaattattaaccatgatgttttaaatggcagtggcctaaattatgactgtgggactttgcatttccatgaatgattgtttttattagcaatgattcttcctctaggcaaataccaaatggtctgcaaagtaaatgaggcttttaagattgataaatatttcacagatgcacttgttgcatattggagggggagaaggaagaagagagagagtgacacaaaccaccatgttgaaagaatgagttaagcagactgccatgttttcttccttgcttggtgcaataaataaggtggatttctcaacctcgtaagccacagcttccattttgcaacatcagagtcctgaaaataaaaaatagcaacactctccagtaaaagacaagtacagatgttacaataattgaagttttccaccaccaagctgtgtagataggttttagccctcagttaaagctcagcagttatgtttaaaaataagagaggaatatttatggaaagattaattatccttaggtggtagctcattaagagatgtgaaatgaagttgagtttatttttaaatcattaatgcataggtatttatattattgaatgactgtatagttcccgtatttatggctgacttcagttgctaacaagccaaagtctttcacttatttcttagcattctcaatagttttttgtattgtcttgccatgtgaattttctgaaatgtgaagttcaccgccatgctttatttcttttcttttcttttccttttttttttctttttctttttttttcctcagatggagtgttgctctgttgcccaggctggaatgcagtggtgcaatctcggctcactgcaacctccacctccctggttcaagcaactcttctgcctcagcctcttgagtaactaggattacaggcatgcaccaccgtgcccagctaatttttgtgttttctagtagagatgggtttccccatgttggccagactggtctcgaactcctgacctcgtgatccacccatctcggcctcccaaagtgctgggattacaggcgtgagccaccgtgtctggccgccatgctttatttctattgctgctacaaagagcctactaaataacaaagagtttctttcttcctcatcatatcttagcaaaactcgggttagggagtgttgtggtttaaatgtgtcccctccaaaactcatgtgttaaaacttaatgacctatgtgatagtattaagaggcggggcctttaggaattgatgaggtcatgaggactcctccctcatgaatgggattaatgcccttatgacagaggtttcgtgcagtgtttggcatttttagcctctcctgtctcctcttctgccatgtgaggacatagtattcctcccttggaggatgcagcaacaaggcaacatcttggtagcaaagagcagccctcaccagacaactgaacctgctggaaccatgatcttagactttgtagcctccaggactataagaaagttaatttctattgtctgtaaattacccaggctggggttcttttggttgttgttataacaagaaacagatggactaaaacagaaatgtacaggaagtataatgaaaacaggatttgacagcattatgatagatgttacacaaagtataagaagatgactaaccccaatgcaatggtggaaggtaaaggaaaattgccttctttctgtgggtaaagacactggaaagtctttttgtcagggttctctccacacaacacatcacagggtcggtggtcctgttcgatccagcaacattgattatatggtaaagctgcacatgacagtttttaaaattggcccatatggcaaaaagtcaattcttaaaatttcccttgaaaaaaccttaaatcgcccacaaaatatagtagccatagtcttatatgcatagccttatgcataaatctaatgtccaggagaaccactgaggctaaactaagtaatgggaaaaaaaaagactctacgtaaatgtatggacatgggctaggcacggtggctcatgcctgtaatcccagcactttgggaggctgaggtgggcagatcacctgaggttaagagttcgagaccagcctggccaacatggtgaaaccccatctctactaaaaatacaaaaaattagccggacatggtgacaagcgcctgtaatcccagctactcgggaggctgaggcaggagaatcgcttgaacccaggaggcagaggttgcagggagccgagactgagccattgcactccagcctgagtgataagagcaaaactttgtctcaaaaaataaaaataaaaaaaggtatggacactaaaactgttctgttcttgagatactagcaaattgctatcaggaaatgaggaatgcttgggaagttttaaggtgttcctaagtgtctgcagggttttgctgttctaatattgaatatctgtaactttaatacatattaaaatatctgctgttgcagagattgaatgaactactagatgtgaaagtactttgcagagggcccaacctattgtgattgctcataaatgtttgctgaatttgaatccaaataccatgtgattagagtcttacattgtaatagctaacagatacagtgctaatgtaaaattatcttgtttattttatttatttatttatttgagatggagttttgctgtgtcacccaggctggagtgcagtggcatgatcttggctcactgcaagctctgcctcctaggttcatgccattctcctgcctcagcctcccgagtagctagaaccacaggcacccaccaccatgtccggctaatttttttatttttttagttgagacagggttttaccacgttagccaggatggtctccatctcctgacctcatgatctgcccacctcggcctcccaaagtgctgggattataggcgtgagccaccaagtctgcctatcttgcttatttcttatagtgaccttataaaggctctatcactttgatcttctatttagagatgaacagtcaaaggattataggcgtgagccaccaagtctgcctatcttgtttatttcttatagtgaccttatgaaggctctatcactttgatcttctatttagagatgaacagtcaaaggcttagaaaggcacagaaagaacatacatctaatactccaacccaggttgattctcacaccctgtccttaactgaaatgccatcttatcttggagaagtaaacagtagttacaggttgatctgtgctgcttacccagctggctttctcggtagccatgcaggacgcttgccagtttcatgaagaggagaccatgttatttcctttctctacccattgtggtttctctggtcattcctcacaccccctctgatggcttctgtactgtagtttctcttcacgtagtcacagtttcctatggagtccattttttctccactcaaactgcagatctcctaaattgtaccatctcctactatcctgttacttctctctgtccgtaccttttgttagaattgcattacagtatctacttggaaataatcaaggacccatgtgtgaatttagtccctgactcaggaaaaaatgccatgatattctaaggataatatgctctatagatatgttttcatccagaaccccagactatacatttttgtactacaaattttttaatgtgtaagtgttctactggtttctcagagttcagcaaaatgaaataaatggaagattataaaaacttacacaaattctaaatttccaaagacatggactttcttatctctgattccttatctaactacagaacatagaaaataagagtgactcttttcttaggttttccaattgtccaaatacctgtgccactctagatgcctaacagagatgttaatttattatatataaggatgccttagggcttaattacctgtgggacctccatcggagaaaggattgtcttcattctatattcaatttgccttataaaattcttcttataaataataagtgcaagaacccataatgattctcattccttgaactgttccttcatttcttattgaactgatgtactcagagtatacttaaaagcccactgtccccacgtagacaataaatattcttggacaaagtttttttttcctcttttaggttgaagacttttcttttatctccttcaaatgttgcagtaggtgttcatgtcaatcaatgtaacactataaatttgcgtggttttttcggtcagtattcattagtggcagcctagggaataactaagagttttccaggttatttgtatgaattttaattaaatacagacagtatatttggataccatctgtatggacatcattcttttttttttttggcatgaagatttacatgaagaaattgtctggtcctactcagctccatggagctgccagacacgcccccacattatgcagtcagcaatgtacaaaagtggaaacctagactttccatgtgttcacagtcttaggcctctacggcttgccctagccaagattttttgccatttcctaatctaccctcagcctttctcccttccaaatcatccttttgttcatggccttgccatatcctgattctttatactctattctgcttctctaactttgatggatacttcatctcttgattgtggtatgagttctgtctgtttaactccatagccttcagccatgcaggaaggtcctccctagttcccatatggaaatgctttccgtggatatcttccttcccatgggaagacttgcatcaaggtgcttgtgagggcaatatagcatagtagcaaagtacatgtaatttaaagtcagacaaaactgtgtgtgaagcttggttttgcttcttactagcttcttactagctttgtaactggaggcatattacctgacatcttagtacttcagtctctctatccgtaatatgggtaactaatagtatcatagagttgttttgaaaattaaacatatacagggtgcctacaacagtgtccgccacttaactcactataaatgaccactattattactagaggcttcgtgatagaagaaagccctgagaaaagtatcaatggattggtagtttggttactcctatgttgttaaaaatataaataagattccttatattcatctccatttattaattccagttgcaatgctcagttgactcattttgaatcctgccaaaattgtaccttctgagctgaagccaattaaaataaaaatctcttttttccagaagccaaaagccatttcccaagaggttcttgttcaacccacacatgcaaatgcagctgtgatggttttgtcagagattttttttcagaatatcacacaccaatgttagccttaaagaatgataccggggctctctgcttcttggttcatggggtatacccacaagcaaaatagaaacaaagcaaaggtaggtagccccagttggcacagttgattgactttaataggtcctgattatgctgctcatattccatgaaattaaaaagcttacaaatgttatgagccattacccttccatttaagggagcttatgacatgttagcaacgtttaatgaaattcttttcaaaatgccattggcagactcaatgagattccatgttgaaactcaacttgaagaattgtctgaggaagtttgttctctacctgcctgtctttgtaatgtgtgggacccatttcaaggccaaaggaagttctttatcagttaggggataattttcatgtatccagaagtatttctgctttaatcatgagagtgctttccagttgaagacaacatcatagagactgccatgttaatgtttgtgtttagagagcacaagaatagtctatttttacacaatgatgaattttaaaatttaagtcatttctgttcaattctgtctatatttggtgacagtctaaaacattctagtaaatattccaaaatgttattgcctgtcctgtctttgatgagccatcacagtataatttgggaaataagcctttgtgcaataaggtaattaaagcataagaaatgaggtaattaaatactatattatatggtacttattatttacacagtaaaagttcaagaaataaaaaatactgcagtgagttgacggataatttttttaaagaataagaaagatgcgtatgagacataagtaatttagggatcattggttctttctgttaaatagtctttcattatcactttgataatggggatatttaatggcaatattcatttgtcagggtactagccatatcaacatcttgttgctgatgttctaccactactttttgagatcttatgggtcaagaaggatactatgtgatttagatgcattttaaaaatcctcctgacattcttataaggtcgtttatattatctccttttacaggtgaaaactgagatgctaagtacttaggcattggtctctagttagtgtgtggagcagctggaattcaaagccaggtgtgaactaccccacagcatatattttcttgatatgaatctgctttgaaaaacagattatgccagggcagcccccattgtgaactctttgcaggcaaaattcctgttataggacttagtcatcatcgcatttatttgaccatgtcattgcttggcactcaataaatgtacgattaatgtataattaatatgttaaggaatcacaactcataacacaagtaaaatgcagctttatttttgtcatcactgatcctttaagctttgaggtgtttgtttgtttgtttgtttgtttgttttttggcagaggttatgatctggagggaatcttttcttcttcctcccacacaaaaatgtggacagttcctagggtattttctttccactgaaagttagtaaaaattctggtggctcattaagagacaaaacgcagtctcagttccaacattttaaacatttcatctaaaacacttaccaatgtttcaaacctcattcaaagttaagtatttatttcttttcctcagatacagccttgacttggtggctctctgcctttggttgtctgggccctcatcatcttctgatgtgcgagctgctttccatagtcctagaccctaccaggatagtagtaatggaggatgaggcagttctttcttggctttgtgactttgtgccgctgggactgataaatatttaagctgacttcctccctcgtgaagcattttctgggttctttggagatttccggtcctgaaactgcaaaacatctacagcacctatggcaaaagccagtgaagcattctgtttgtgaacaggctgttttccccattattctactccatggggaaacttcttgtctcccagtagtccccttggggaggatttcagatgtctccaggacagtgctctctcccccttggcacatctgtgttttgtgaaaaatgatcatccatcttttacctgacaaactttgggagtctagtctctctctgaagcaggggccctatcctgcctctagtaccttctgcattcctggtgggaagtctatggtgactttgtggatagagaacacatttcaagatatcagattggattcactgaagcctgttctcactgggcttgaggttagaaggtagcagccacacacacacacacacacacacacacacacacacacacacacacacaggtatatatatattttcacaggtcccctttcctccattcccttgacccttatatcttgaaactagcgagggtgttctttgatacttcctctatcaaatcttcatattttatctggtgccttacgttggagttctatatcaattttatcttcatgcccagttgaaaccacatttttaacatcctcctaaatgtgccctgtgattctctgactttcatagtaaagctgttagatgggctgccttagctagtcccatcccatcctgtatacaaggtcttgacacatgatggaaggaagaaaatgttggtattcacccaggatacacaagtgaatggaaagaaaaaaaaaaaagatgctagtggctagatacttctgctttcccttcttctgccttctcatggttctgggcctggaaagacataccgtcttttcttcctgtgagggttaactaaaccaaagattatatatcttttccttgcagccagatttctatgggcccgttctggtggttcgggtagagctttcagaagccatcttggttagtgataaatccttcttggctttctcagagccccagagtctctagaataatatatttggaaaaaaaaaaataccattgactaaggataggcttagtggttgactgaaagtgcttccactggaggttatggtaatgtcatttggagcaattcactttagatttttaaggaggcaaagcatgtatttgaagaatagataagaaaactgcaatgaaaggatgttgtttctaatggaactaacccagaatttagagttaaatgttttctgattttctgtttgttgcttgtttttgatacctttctttgttgactctgctatccttaagaatttgaaaatgtaggtcaagaatgattttttttctctccctgtgcctggcgacttctcattgactagagatacagcctgtaagtttgcagccatcacaaccccattgtctctgctcccagagctctatgattgctctgctctcagtgtcttatacagagcaggtatttagcaagtttgtagacttaatttttttggacttaatgcaaattaagacaccttcatttcttctcacctgttttgcttggtatataacacttaaaaaaaagcctctctgagctctttctgcttatctaggattgtattaagtgtttgaatacattttacggcccagagtagatgctaaataaatgattattgcataaatagaaagagttaaggaagagaagaggaactggagaacagaggcacaccctctcctgtgatatcttgccctacctcaatattgcaagtttcacactgtcccttcatcttttcaaaatttctttgttccagtattaattccttctcaggcaattcctagttagaatttaatttaaatcaggggtgtagataacaactaacagttttatatattatactgaagggatgtgtgcattgtggctaagcacaaaagggattcaaaaatcaaaataatattttgggcattttggcagagcctttggggagattctgacagaaggtgccctggggtccttctaaaatcaggacaaaaaaacaccacttactttgctgatatctatgtctaaggttcgtgtattgagtggtccttctcagtgcacaaagggaaggaaggggtgtgtctggactaggcacacttgggtctccctctttacatgagttgcaactctgatacacacacacacatacacacaaaattttatatatatataatttttattatttcaatagttttgggagtacaggtggtttggggttacatgaataagttttttagtggtggtttctgagattttggtgcacctgtcccctgagaagtatacacagtacccaatatgtagtcttctatccctcacccccttccatcctttcccccaagtcccaaaaggccattatatcattctcatgcctttgtatcctcatagcttagctcccacttataagtgaggacataggatattttgttttccattcctaaattacttcacttagaataatggcctccagcttcatccaagttgtagcaaaagacattatttcattcatttttatggctgagtagcattccatggtgtatatatatcatattttctttatccacttgttgattgatgggcactgaggttggttccatattttttccaattgtgaattgtgttgctataaacatggttgtgcgtctatctttttcatataatgatttcttttcctttgagaggatacccagtagtgggattgctgtatctatttttatcaatcctgataggtttcaaagtatattctttatctgaatggcaacaggatatgttggaaaaaccatggtctttggaaccagataggcatggaacaaattgttgaacctgtctaagcttcattttactcagttataatatgtgaatacgagttcatggagtcaaaaaccttctgagcaccatacagaacactaagtgaatacactttctcttttacatatgccacaccttgaaaacataaacaattgtcaatttcatctttagtgaaagaaacaggttctgagaggtctttgatttatccaaagttgaaatagtagttaggacttctaactgtaaaggccttgactctaaagtctgtatttttgagcatgatgttgtattgtctaattgtttcaaactcaatatggctctaataagatagaaatattgtatgtaaagcactttctatggttcctagctcccctacgtaccaaagtggtatgaagctattattatttgtcacttattttttttaggatttttctgtgtgtttaatagctagtcatttagaggggaagtaaaattactctctggggcaaggaattggcattaagtttttgttttcttttcttttctccatatttatatctgtggcaatgctgggaactaacaaggctagagagaagagaagaaatgtcttcccttttatatgttcccctttaaattagctaagctgcataatttaaatagacatttaacacctgttcctccctgaatatttacatgaaaatcctgggccttaaatgcttctgagccttgatagaccttaaacttgtcattaatttaacaagtatgtattgattcttatttcgcatagtttgctgctttgtcttagtacataccaaagtgttgatgaaatcctaatgagccacgttccccatgatagaagcagtaatgcagaagtgtgctttttacccaattgccttgccatcaacacagtcgtcctgattgattttgatggcaggcaattgaccacttttcccacaaagatgtattgggcatcccctgagtgctggccagggggctgagggctagggatataattttttaaaagataaacattttcccgcttccatggagttaataatctagtggagaagataaacaagaaacaagtaggtatccattttgttaagaactatgaagaagacaaagtgtgacgtaaggagaaactaatccattgttcttatgaaaggtatctctgagacccacagaagctagccatggcaagagtaatgaggataatttcaggccaaaggaatgtgaatgcaaagattctaaagcaaagcacttgctgtctatgctcaaagagtaggaaaaaaagctgatgctattagatgagtagtaacacaatggaagagctgtacaagttaagcaaggccatgttggttatgttggagggctggggttttgccctaagtcagctaaaaagtctgaggaattttaagctggcagaggatgaatatagatcttacaaagttgattgtggctgatgtgtaaaacaaatgtaccttagagtagcaagagtaggaacaaagagatcagggagggagctcctcggtggttcaggtgagagataatggtaattcccaatgggatggtggcagaaaaggtggagagttgagaaatattttagaggtacagttgacaggagctgctgacagaaccactgggaacaaggaaaccaagggaagaataaaggatgattctttttggaattatttttaaacaaatgtgtgttagtcttgcctaggtcataaactaagtttttaacatggatggatggtgatgaaggggcgcatcataagaagaaaagggaaaggagacctaacatttatggagaccttaaagtgtgtcaggaattgtgctaactttgcatgtgctatttaatcttccactttatagaaaccctataaagtaaaaatcatgacttgcacattttatgtatgctgcaatgaatctttagagatgctaaataactcaacaaaggtcgtagcattggcaaatacaggaaccagacattgagactgatctccaaagtctctttttcttccccacaacattatactatttcccagggctaaaataatgccatacaacttggcattttattccttgaaaagtgactagcattgtgctaggcatctgttgaatgttcattatatactggttaaatttaaaatcactgcaaacatttgactttcttgaaatgccaaatgtttttaaggctagtgaacctaaaaaaataaagtgtgtttcaagatgaattgatcaaaacagtagacaggcaaagttaggggaaaaaggaagataagttattgaaacagtggagaggggtttagaaagagtaagacaacaggtgcaattgggaagatggatctgtgggtttttgtggaggaagaatagagtattaactttaaaaaaaattatttggacaaagcacactattttccagatttataaaaccccaccactctttttggtcttaatccaaccacttccgctatttatgataactgttgtgcccttcaaggtagtttagtttgcattggatatattaaacatagtcacctttgaattctacatctaaatgcaagaatttatcagaatgatttatctacattgtatgagtgcaatctgacattctggagccagaagtgcaaccagctttctggaaaaaaataagttaagccctctttcatatactgctaggcaatatgcattatacatattcatgtaatgctcctagtaactcagtgaagtaggtactactattattcctatattataggtaagaaaacaggaaagtgaacctcagagacatggagtaatttgtcttaaggcttatgagctgcacgaccagcattcctacttatgcagtgtgacttcagagaaagactcaatctctattctttgctgcctccccttagcaataaccacatccttaggttctgctgtgctgccttgcaacacgctggctcagaataaagaattgtctagagtatcacagcaaatcaggggtaactgcagagcaattccaaatcagaagagccaggcaccccttcatagtcttttgagatcagaacctgcagactatgtaatctatgtatgtgaattcaggtaaacagaggcaggcatctaagatataacaaaaacacagaaatctgcatgagggcaagatcaggtctagaaaccaaagaagatcatgattctaagaaacttctcaaggcagaagctgctttatgatctgtagatgtaatagcttggctggtttcatctaaaccagtgtttctcaacctcagcactttggacattttgggctgaaagtttctttattgcgggagctgtcctgtgcactgtaggatcagtggtttctactcagtatgtgccagtagtaccccccatatacactagtcatgacagttaaaataaagtctgcctgatatgcctccctcatttataaccactgatctagataaagaaagggttcaaggaatctgtttgttcatctaacaggtgcttgctaagtgctgctcagttttcagcatcatgtgacttcaggtccctttcctggtagtaaggcaggactctcgaagtataatactagtctggagacctcaggcagtatgttgctgttagggagggcatgtgctctgaacttgactgttgtgggtctaatctactttgagcatctttcccttgggcaagtcactaattctcattaagccacagcgtctgctctgcaaaagaggtagcaacaatgctggacacatgggtttgctgtgaggatttcatgggaaaacaaatgtaaggggctgggctaagtgccagacacaaagtgctcaggggatccttatgatgacgatatcttcacctcttcatccaaagggactgagaaatagcctttgatcctccaagactgcagtttcagaaaccacatttatggctctccttttaggataaaggttaaataagtggccagtgaagaggttattctcctgtgattgtagggaaactttttcataaactctggtagaccctatggaattagtccaaagactggactggctcagcttccactgcagttttgtgattaaaggatttaggagattaacagcatctcttcaggaagtagctcagagagctcagttgggtgtattccagtgaagaggcattctctgaattaaatctcttctctgaaaagcgagatatgtttatacacagaagtgaggatgaggaccacaatttcaagttaacaaggagtcggatacccagtgtgagcaatatcccttagtctaggtgatattagcaagcatatcaaagataggcaaaaaatgagttgcatcattattcttcctttccctagttgggaaaattttgaatagcatacgataaagagctagctaaatagcttgccttctaatgctcagttctgtgagtaatttcctatgggaactttggtggatcactcaacctacctggtaataaggttacctctcaattgaataagaggattatttgagaactgccagattgtgaaatttgaaaacggccaagtcagaaaatctgaaatgtgtaactttgccaaattatgtgagaattgccactcagccataagctccaactcctagcccactccaccaaatttgaaataaatacagtgttaatgtgttggcagcagcaaacagactagtggaacaaaagtagaagtcagggtggtattacctttggccaagaagtttgaaggaaggtagggtttttttagaaggccaattaaaaaaaaaaaaaactcacactagacaaggacaatatttttcccataaatatgggtatcgagttgtttcggcaagaggtaacagtgatgttgatgattttgcatcataagctttaacatacactcaaaggtatgtacacaaatagtagcaataatagtcattactattattatcattgaccatgttaacttgctcatatattgtcacccttatcttaacgagcacttggaactggatgttaataacatcatttatgaggaaaggaaacatcgtcttagcaagatgaattgacttgcctaaggttccatagctagtttgtggaggagtccaagcattcttctgactgggtgacctcttcaaatgttggctaatcctctgagttgggtgttttgtttcctttcagcatgtcagtttctttgactgttcagtgaagaggttgttccagacagttcttcaaatctcttcttgctttaatatatctttattcttctaggtagtgactttttttgtttgtttgtttgtgtttgtcccatgaaattagaaaccttgtaataagacttgtatgtgttttcacttaatatggaggggcagtagttataccaccccacaaccaaacttgtcaaaaagtacctttttttcaatacagtgaaaggaaagagaagtttatcaagagtagtggattggcatgaagtctggagcctcagatttctaatcccagcactgccactgtttccatggttgtgaacaagatgctaagcctcgtaagggctcagttttgtcatctagcacagcagaccctaacgtttttggcaccagggagcagttttgtggaagacaattttttcatggacgggagtcggggttgggggatgagggggtagttggggatggtttcagaatgaaacttttctacctcagaccatcaggcactagactctcataaggagcgcccgacctagatcccttgcatgcccagttcacagtagggttcctacccctatgagaagctaataccactgcagatctgacaggaggtagagctcaggcagtaatgctcactcgcctgccactcacctcctgctgtgcagcctggttccctgtacccgtcttcggcctgggggttgggaacccctgatctagcaaatgggaaccacgggtgcccagcttatcacatgcgatttggaaatggaagtatggatatgtctgcgggaagcccaatactggggacattcaaagaatgttgaggacacaaaataaatggagtagagaaggattccacagcaaaatctggctttagctccaagttttatgacaaattacccagtgtgtcaagtgggtgtcagtttcttcttttgaaaaacggcagcattagactggatcaggatttctaaaactatcaagaataaatgtccctcaaaaatgtctgagggacacacatttggaaaacacagcacactctatctcccccttggatgttaatatgactgtattctgagatgctctgcaataaaaaacacacctacttttatttaactcatttgccaaattaagttgaccatggaacactgtattctggaatatgtgttaatatcccatgagacacttttggaaaattcaggattagatggtatcattctctgaaaaattataaagagatattatctgttggatgttatatctacaaatgttgggggtcactttctttcttctactcttctgacttgtttctctatgtctctcatgaagttaaatttgccttcttagtgtgaggaccagcaggtatgtagatgtgtgcacattgtgtgtattttattagcaagtattttgaacaccaatgaactactaccatggtagattctatggaaaatggaagaacaatagagaatatacttatttaacctccattgtgtacccaagaaagaaattgtagtgctggataactttcagattattttatctcattgaattctgtgaccctcatgctatagaaggaaaaaaaaaatgagattacaatgggtcaagataattagagaaagctttatggaataaatgaaattttgtgtagaccttgaaaatgtgtgaaatatgatcttgtcaggtaggaattacatggattagaccagaatggagctaaaatttgaggcacaggaaaagttatatcttgacttgttacagtgaaccctggcagctatcataagtatttaagcaaagaaatagcatgggataagtaaaagttttggtggagagggagcttagaggtaaaatcaggaggaggtccttgatgtaatttcaggaaaggtaactagatatagtaaggcattgtcaggaagtaatacactggatttcaagtaagaaaaattgaactgttacaattcttttattgaaaataatttccatctgtacaaatatttcatgattaatctgtttacctattttgaagtagttgtatttgtttgtggcacctctttgcttcagatgcccatttacccactacagaggcaattgccagtgtcttgttcatccttccagaataagtttctcagcctcagaactatgataatacatttggggccagatttctcacttttgtggggactgtcctttgtattgtggggtgtttagcagcattcatagcctgttacccactagatttccatagcacccctgccccctctgttgtgacaaccaaaaatttctcctgaccttgccacatatccatcgggggacaaaatcaccctggttccctggttgagaataactattccagagatgttctgtaaagaggaatttgttgtaccaaaagatagaagaaatgataatatgacttttttttttttttcttttgagatggagtctcactctgtcacccaggctggagtgcagtggtgcgatccctgctcactgcgagctccgcctcccgggttcacgccattctcctgccttagcctctcaagtagctgggactacaggtgcccatcacaatgcccggctaattttttgtatttttggtagagacagggtttcaccatgttagccaggatggtctcaatctcctgacctggtgatccgcccacctcggcctcccaaagtgctgggattacaggcacgagccgataatatcatttttatataaataaaagattgggaaggctgaaagttggtctcgaggactgaggcttgtgtaactagaagacagctagaatctgtattagttactatatttttggctgcaggaatcaaatctgtggacttaaactggcttgaataagaaggaaatacattaggtcacttgacaggtgatcttgaggcaagtcaaactccaggtttcattgatttggtagcacacagggtcatcatggactcagatcctttctgggctttgggcctgtcacccatagcattgggctggttccctgcagtattataagatgctatcagcatcagctgtttctaactgcttctttatttatgtccaatagtaggcacatagcctgagtcactaaagagtgagaatgtttctctcccagaaaccaccaggaatcctctttttaggtgttaatggcccaaatggacttagcaatccaccccaccccaatacctgacaatttcactggcaagatgaatatgctcagctttggaggatagaagtcgaatgtccccttaccaactttggaaggagaagagttaattggaaaagtatgaaatatggtgagttcagtatggtacctcatgctttttgagctggttgccatttagatagattttgtttggatcagtaaaagtaccaaattgaatacaaattggttcatgcaaattgaaaacatccaaaaggaaaatttgctgagagacaagagcatatagggttaaagaccataatcttggaggaaattggatatagataattaagtcatagtttaagagctttggtcttgattctaaacacagctgactcagctacctgctgggcatgtgatcttcaccaagtcacttttcctttccgtgtattttttttttatttgtcaaattcagaagataggactttccttataacagtgatatgggtggattaagtgaggcaatgtgtgcagagtgctgaatcaagtgacaggcactggagcacactaatgcacagtcactggtgatggtgagtgaggccattgcctttgagctgggaggaataataggagtccacaaaaggaaaaggagagctctggaagcacagggccggtctctgatcctgcgggaagagatgactgcacagagcatccttgagaacattaaataatgttctaaaataccctgtctccaggtaaacatcacagcactttcaaatttgattcagccttgagctccttaaggttctgtcaacctagaatacttgccagttcagacaacacactgcttagattatgtctcccctcccaccaccttattcccttccctacatcaaaatgcaagattcagttatgcagtctaaaaatgaaaaaaaaatccacctaaatctgagaattatattcaatattttaggactatttaacattctataaacatttaaatatgatattaccttgcccaaggtatgacatcatctttgatcacagattggtactgagggaaaacatctgttccatgggatttttccgtaaaataagatgtagagtatttctatcagcaaagcaggatgagctcacgttgtcagcctagatgtgaacatggtggtgttttatagccctggattgtataaatctgtttaaaatattattctactgttgaacatacttggctgcaaatatccatgtcttccatcaaacacacatttgtcaagcacctgctagatgcagggcatggacttagcttggcaccagtgcaaagtgaggatggagaactagaaggaattaatgttcattaggtgtgtactccagtaaatgggctagaaataaaacatgctgggtagaaatgtgtgttatttagtctaatgcatttcactaccttgttgcactaggccacattcatggcatttgctattaattgtggcattagtttttctttggttacatgatcctcagcattcaactgctgaatgtgtattagtagcttctcagactcttggcattctatgccattgcctaaactcacagagtcaataagcagtcgaactgaaattctactttatggctgtctaaccatggtacccaaaccctttctactaaataaatctgcttcaactatggatcaagaagtagtcactgccatcaggaaatttaccatttcatagaaaagtggaaactgaatgcaaataacccttatcaacataaaaataataactgagagtactgaactattatgtatggctttgcatacataaacccaccctgttttcatgtaaagtgccatgaggtttctaccattattataccagtttcacaaatggaaaaactgatgtgcagaaaactgacatgaaagctgacacacagagggggaaagaagtagatccaggatttaaaaccaggaaactcttttatagctcccaatcacactgctacctctgataaacatttcacaaggttacaagtgacacggaggttacaggaattgtagataagttgtatttcttatatgagtaaatggtcagggcattggggtaggaaatgagatttggtctgatccttaaggaacattggttgtgcagaagtggaggaaatggacattctataagaagggctttcttttcatgagcagaaagggaagagatgctgctgtctagataagctaagtgcttcacgacacttctgcgataagctgtaggatggtcttgtgcccctgcttacccattctcactgcagacattgctgcctgtgtgagcctggggcctgctggtgcagccagtaagagctaactttatgaccattgatttacactcagatcccttggtccacagatacatcaccaagcactccagcttctgaagtcagcgaagggaggtttatgactcaattttattcgtttgcttctgcagacaagtggcttcagttgtggaggagttgtttgagataaaacatcattattagattcccgctctctgagcccactctctagtcccatagttacctttgagctaaggctcaaacaaaggacctggttgagaactgttcctctgtgcacaaaagaaagtcatttattagctactagaaatttaagaatttgggacataatgctttttaaaggagatagtgaagggcttaggaataagcatccttcatgaagacggcatgggaattgtcactttgtttttctgccttcgtaggtcatcttgttggctttcatttttcaagacagacatcttatttagtgtacatgtttctttaccacttggctgtctcagtcttccaatattcctacatatactcattcctcatactcaacaggatcctcccctgtatcttttctgaccttgttgccacactcgccctgtcagctctttagcccttgcccctctaacacagtcatctcttacctcaagacctttgcacttcttgttcttgctacctgtggtattttagttgagatatccacctgtctcatccttcactttatccagatctctgccaaaattaccacaatttcagaacatcttttctatgaaaactatgccattcccaacaaatgccattttatttttttcctaggacttattcccactgaacatattatttgcctttttagcttttgtctatctcatcacaacccttccctacacactcaaatatgcacactctttctcccagaatcttctcctatgatcatccatattctcactctcacaatcacgatccagtacattattccttgcctctctccttggatgtgtgtgttcacgggaacagggcagggttttgcgggggcaggggagtgtatctttaatgcctagaacagtacttggcacatggtgaaaattcgacagtcactgaatgaaagaacaaaagaaagaaaaaaaggaagtgggggaggaaaggaaaagggagggataaaggcaaaggaagaaagaaaccatgcatgatcttggtttttttcacatatgttagctaaacctggttaaggtgacttccggttctaagagctacctcccatggtctagcgatcctgctgtcaatacttgctgatatattccatgccatccctgacacagaagttactatttcctgacattcccatgctgtgcattctctcattttgcttttactgtgacttctaccagttttctcctgttcttctaaggtcttacaaaaaggtcatctcctccagaaagccttttctaaccgacctgaaaaaatggggttcttgtttattttcctattcatttgacttgatcactcataccaaggcatttgatttggcttgtttaaccttaaggaagggtagcatctgttatgtactgcccaggcctttgtccatagcatggacatctgtaagcaggtcttcccctctaaggatttgctattcaaatttggagcatcagcgagaactcccatccccactgctcatgccacagacacacagcacatgtttctctctagcactgtatttccctctttatttcccctgataacatcaaggtgagagcctataaggcaaatgtgtaagtgggtttcttcttggtgaccaattcagataaattggtcctatttgcctgtagtgctgtgttgagaagatgtgaaacggagtctgaacacagtgagaaagtgagcagttaccagttggcagtgcctgacctaggtacaacagtggggatgtggagataccatggttcatgtttgccatcccttccctagtgggatctaacattctgtatgtttgtttgtaaataagtcacagcaatcatgcttatattactcatttatcttttattagaggcgagtccaaacagaagacttttctttgcctaccaccttgtacaaacaagtaccaatggatgtggagcccctgtgaatggaggaacatcctaccaagaataagggtcagctcatttgaaaataagaacatcctcctgcagtcattgtaggataccacatctgttatttctccctgagatagcaataatattattaatgataataataccaataaaagtagtatagactgttatatagtagggcacagctgtcctctgtttgtcttcagcccaaaatatttttagatttgttttcagaataccttttcatccattgctttaaacccgtcccaaatctaacttcatctttagctccttccaccttaaagagtatggtcttagtccatttagtgttgctataaagaaatacctaaggctgggtaatttatgaagaaaaaaaggcttccttggctcatgattctgatggttggcaagttcaagattgagcatctgcctcaggtatgagcctcaggctgcttccaaaaggcgaagggcagccagcgtgtgtggagatcacatggtcagagatgaagcaagagaggtggagagattccaggctctttctaacaaccagcccttgtggaaaatagcagagtgagaagtcactcacccccaatggagggcattcatctgttcatgagggatccaaccccatgacccaaacacctcccagtaggccccacctccatcagtagggatcacatttcaacacgaggtttagagggaacaaacattcaaaccatagcaggtactaagtttttcaaaagtgtttcttctttaagatgctctcaaatcacttgttcccacacttggaataagtttccctgatttgatgtatttgagcacctgcccagacccatcctatacctacctgttaattcttttttttaattgagctataattcatataacataaaattcacctttgagaataatacacttcagtggtttttcatatattttctattttttacaatcatcaccactgcctaattccagaatattttcatcatcccataaagaaaccccatactcatcagcagtcagtctccatcctccccttcttacaacccctggcaaccctaatctgctgtctatctctatgggtctagtctggatatttcatacaaatggaattacatagtacatgaccttctgcatgtgacttctttcccttagcataaggtcttcaaggttcattcatattggggcctatatctgtacttcattgctttttatggctgaattactattacgtttgggtacaccacatcttgtctatccattcatcagttgatggacatttgagttgttcctgctttttgactattatgagcaatgctacaatgaagatttgtgtacacatttttgtgtaaatatatgttttcaattatcttggttatatacagtcgtcccccttaatccgtggttgtactttccataatttcagttactcatggtcagcagaggtctgaaaacaagtgagtgcagtgcaataagacattttgagaccaggtgcagtggctcatgcctgtaatcccagcactttgggaagccaaggcagtcagatcacttgaggccaggagtttgagaccagcctggccaacatgatgaaaccccatctctactaaaaacacaaaaattagccaggcatgtggcgcacgcctgtaatctcagctacttgggaggctgagacacaagaattgcttgaaatcaggaggcgaaggttgtaatgagctgagatcacgccactgcactccagccttggcaacagagcgagagtctgtctcaaaaaaaaaaaaaaagaattttgaaagaggggtaccatgtatacataatttttattatgatatatttttataatctattttgtcattattgctgttcatgtgttactatgcctaatttataaatttagctttattgtaggtatgcaggtataggaaaaactgtttgtgtatatatgtgtgtgtgttatataaacatatgtatctatgtttaaccaaaaaaaagtatgcatatgtgtatatatatatgcatataacatatatgtatataaacatgtgcatataatatatattatatatatatattatatatctaaatgattcagtactatgggtggtttcaagcatccattgtggatctttgaatgtattccctgaagataagggaggaccactgtacctaggaatgcaattgctgggtcatgtggaaattctgtgtttaacttactgagggaagcaatccaagtgttttccacagtagctgcacccttttacattcctttcaacaatatgtgaggtttccagtttctccatgtcctcaccaacacttgttttctgtttccattacagccgtcacagtagtgtgaaatgatatctcattgtggttttcatatgcatttccctaatcactaatgatgttacacatcctttcatggacttattggccatttgtatatcttctttgaagaaatgttgattcagatcttttgtccacttattaattggttgtcattttattgttcagttgtgataagtttgtatatattttggacactagatctttaagatatacatagtttgcagagtttatttccaagaaagtttttactttcttgacagtgtcttttgccctgaagtgtttttatttttgatgaagtccaatttatctactttttctttgaatgattgtgtttttggtgtcgtatctaagaacctgttgcctaatccaatggcaagcacatttacatctatgcttccttacaaagattttacagttttagttcttatgtttaaatcttcaatccattttgagttaatttttgtgtatgttgttaggtagagggccgtatttattcttttacatatagctattctgtcgtcccagcatcatttgttgaaaagactattatttctcccactgaatggtttggtacccttgttgcaaatcgactgaccatagctgtatcaacttattgctgaatcctcaattttattctattgtctttattgctacctttatgttagtaacatagtgctttcattattatatctttgtagttaattttgaagccaggaagtgtaaggcctacaaatttgttcttttttttttttcaaggttgttttgactatttgggaatttttgcctttccatttgaatttttaagatcggctctccaggattgcatttaatctgtagatcagtgagagtatttccatcttcataatattgtccaccaatccatgaacacaagataccttcccatttatttagctctttaatttcttttagcagtgttttgtagttttcattgtacaagtcttttacttttttgttaaacatatttctaagtattttttggtgctatcatcagtgaaattgtttttcacaatgttttagggcttacataattttccttccaaagattcatctttctgtctaaagaatcccatttttcaacttggtcatctcatatcacatgtttatttaattgtcttaacagtgacttgaacacctaatatctaagaaaatactttctgatacagataagaaaaaaaaaaaaaaacccaggtattagagatacgctcagagtcagtctttatgaactcattttccttcctccaaataagccaagccaagtcacatcttactgtgttccctattagagcagagaaaccattaggaagattaaattgcccgtgattatttgttgcctaaagcctctatatcatttttgtcaccctgtgtcttttctgaagggtctttttctagaaatcttttttgcaatttcccagactcctgctgtcccaatgtccaaattgggtctgtcctttcttgctactcttctattattttccagagttttcctccctccactctatcctttgtttacaacagatctctaatgcatgtctaaaaatcaagagatcatttgtgtttagcaatggcttaaaataactaatgctaatgctgaggtcctcatgggtttaacttggttttattaatttctacatctctacagctcctctgtttgctggagtgtgtgctaaatatatatttgtgaaatagacaagaaaagaaaagaaccatttctgtagacttttaccagtttaaagcaaggagcaatgtagagtcaagtcatgtgcattttactctcagattgcctgagaaacaacttaggcttttcttaaacattttctttattgatggacaactatgtaaatcagcaaataatgagagaattttcatagtctcagaaaaaatagctgcttctttgtaactgtggttgcagcttatgctccagagagtgacatttacaaataaagagtcatatgttttaccacatgataatttctactgtttgaaagcaaatttcacatgttctagagttaaaaggtcagtgtgagctataagtgtaccttgctgtctgttcttaatatcttgtgctttctctagttttagtaatttcctggcttttgaggactagtgactttgatttccctttttcctaagaagtattcctcatttgagaaaatcaagcatggctgtgaattttccatctgcagaatatttctatctttcaaatattttcccaggaagccaccagtcagttgatcattttcagcctgcaaccggcatagttacatctgcagctgaagatgttgaagactccatagcaacaccatctgtcccttcacagaatgttttctttcagataaagatgggaggtgttaatcataattaggcaagttgcatgctgggatcagaaaatgatttgatttcccaggatttgtacaacaacaagtattgctggccatgtggttattcatgaatttgggggaagccaaaattaacagtactattatggaatatcatttttcatactagaataggagtcagcaaactacaggctgtggaccaaattcagcctgtgacctgttaatataagtaaagttttattgtaaaataaccatacccattcatttatgtattgtctgtgattgcttttaaaatatagcagaattgaatagaattgcctacacctatactggaagattattagaagaagatttactttcactaaatctgtatgacctttcagagaggcacatgtccatttgagatttgaaactgttaacttaaaacagagtagccctgcctccagaaagtcttccgtgatatatcccctctgcctcctcatcaagctgtacatagtattttcctgtcctcctcttatattgtgggcaggcctcaattactgcatgtatcttatataactttaataacttaatatctaaaattacctctgtgccttttattttctctaaacctgtgaaaattctcacgttatatcctgatttggagagttgtccatcaaaaatggaaacattattcttgaggaaggactatgtcttttttgtattcccagtgcctaatattaatacctgggatggaaaaatgggttcaaaaatgttgaatgagtgaattaatagactgagtgtgttattagtaaatacaaatatatatatatatatatatatatatatatatatattatttaactctcttttaaaggcagtttgagatattaattaagtgtggtctctagactccagggacttacaatgaaagcccattccaccacttactagctctgagtctttggccaagttacttaccctctcccatgtcagcttccttacctggaaatagcaatattgcctccttcctccattggtggagaagacaaaattatataatccatgcaaagtgataatatggcaccaggcacacactaggtatccaacattttatggccattactggtgatgatcatttattttaaacaaaattcaactccttgtcatgttgctgttagttttgccacactcctaaattactacttgcatgtgtacatgactatatccttcatgcagataaccaatttttaaattctgttctgtgtcagacactgactataccactcaccgggggtagaaagatggatcagatgttattatgatccttaagtaattcataatctagtacactgagcctaaatctgccacttaggaaagtatgtgaagctgagtcacaaaagggaacagagattgatcataactgagaattactgacctttaatttttataatgagagaggaaagccctaagtgaataagatgatactgtgtgtaaggaattttagacatcagccaaggagtgttgtggggagagaatcatccagatccccaacgaatgtgaaaacactgtttctgtctgtacttgcagatggttctgagtaaaaagacgatcaggtgttctgacctgagaaaagttctatactcattgatcttcagtaacatgtgattaacaggacattagaaggcaaaagccagcattttggtgaatggattgccaaagccattcactttgcgaagaataggactaagagctcctgttcagcatctgagagatgtgagttgaacgccagctctactactcactggctaaatgaccttatacagatccctttctttctaagatttctcatctgtacaatgaaaatggtcattgtatcaactttatcaggtggttgatatgggtttcagcccacagccttaggaacacaggcccaacttcaaaagtgcccctggctctctcagactgggaggttttccatcatgaagacatccaacttggaatacccgcatctgtcatcccctccttctctaggcttagtctctgcctggctgcttcttcagactgtgaccacaccagtgtaagaaaggtatcagtaggtcagacaacaatgccttattggtaccatgaaacttgcgaagtagaacttgggtttagaacatcaaaacaaaaaacgtacactgtctagatagatgttcagggtacttctgcatgaaaaatctatggtgacccaggtaaagtatttccacaagaggcagactagaataattaaaaacacaaactagagaacaggaagtttcaaattttctactttctaatagtgagactgggcaagttaccaacttctcctcagcttcctcatctgtaaaatgggagtaatgaagcctgactctctaaggataccttgagaattaaagggtgtagcatagtcctcagtaacagtggttgttaggcaagatactgaatttctaaacttctataggagacaggcttactagtcactaatctttagtctgttagaaaactgtgcctgcgtaaaggaatttaccttcccacagacttttcaagagaattttgagcttcagattctgagggtactgagaacactgcatttattctaaagcagtgtcagtttctgtctaatgatatttatcaactctaagaagtaaagttatgggtctctttatatttttccctccaatggaagagaaaaaaggacaatgtctgaagtttccataaaaagctaccaatggtaatggaggtcagaggttagaaatgtaagtatgcattgccatggtgatggagttagcattgttatgagcttgttttatttatggttagctatttctgtcagttttgtttcatcacctttgttttttctcaaattacaaaacaattaaagaatttggcaaggaaaatgagccagatgtaacagtttcctcttacatctcttaatagaagcaaacatgctgtaatgagatttctttttccttccatcagaattgcaccctcccgcaagttctcagctgcagagcagtaacaaagccccttgaaagcagaaaagcccttactttcgatggcatgtaattaaatttaagtaatgttacatcagctggttgaagagggaaatctggaaagaaaatcttctaatttctgaaatttactccaagcaacacccagaaattcggctaagtgttgacatgaggtttccatatgatgatggcattaatgcacctgtaggctatgtttatgtggcaatgaaggaggctcaagaaattcataaaactggaagctatgtaatagaaaacagtttaaaattcagattcagatggaatttacaacccgttagtaaggtaatattggataattgttagtgtttaggatgagacttcttatttttccctcaccctctatgttctaggcaaatgaaatttactgaagataattttaataagaaacactatagtgtggtaaaatggttacgaacagtggctttagagttagacaaacttctgtccattcaaatctgtgtcctgcctgtgttttttttggatcaaattaggtaagtcagtttatatatttgatcttcagttttctcacccaaaagacagatgtgggatgattaagtcagtaactattgacgacattattaggttgaaatggtccaatgaatgtaaagctcttaccttggcatatataatatactcaataattgctactattgtaattatttattaggcattgacattcagtaacctcatcaattagaattcattccaaggggaaaaaaatgcacagatacaatcagtcttaatgaaggatatgattgaattcaaaaatatggagagacgtacctttctataattcccacctccacacagagcatatcactcttccattaacaggatttgattcttctacattacagggctttggaagtcatttcctaaccctagccctcaggtttccctatctgtaatttatgcagtcagagtagatgccctctgaggacccttccaggtctggctttctgtcctcccagcagattctctgagcagattccaagccatttttgaagccatgactagaaataatcatcattgcctgaataaattaaaaataacgagtggctcttcatttgaaagaattaaccagtgaaaccatagcaaaagactggctgaaatgtatgcaactttgtgttagccctataagcaacgcagtgaaactcatagagaggtttctctgatgattcaggctctgattatctgtttttgattagtttgaaacatagatcagaactgttcctgttagggtggcggccagtgtcacctgcttttctgaaggtagaaataatcaacctaatggtgttgaatagacttaagtggtttttcagtgtctgagtgggttactcaggtcactccttccagtaagagtataatctgcaaatggaccaatttttgttctatatcacatagttaggttttttttattctttttcatgttttaatgtggtcttatggaaagaaggctaaatttagaatcagtaatttgggtttaaatcccaactctcacattcatgatcttggataaattactttactatttcattaagtttaagctgctttgtctttcaaataaaggtagtcttccttatattaaaggatcaccgtgaagattaaataagagaactcatgcagagccctcaggcacatgtattgtacaaggaggacactgaataaataaacaaatgactcttcatatattcttttattaaacaaatatttactgaacacttataatgtaccaggtactgttttagctacttgggagacattaaagacaaaaatagaccaagattctgtacctatggagcttaatttctagtgaggaaaatgggcaataaacaataaccatagcaaagtaagtaaattatgtaatatgcaaagatagttactgtgtgtgggaagaaagaaaagtgtagcatattatacaggatatgaagggcccgggtgagtttggggaaggttatagaatggagagtggtcataatgggtctcttgagcagtggccatttaagcaagcacatgaaggtggtaaggagataacaaaatgagggtatttcctggaagacatatcctggccaaagtgaaaggcaagagcatcttgtcacattgaggcacagcctgaaggccaatgtgactgaagtggaatgacccaggggactgcagcaagagatagtcaggcaggtggcgtggacctcctagggtctcaaacgcaattgtgaaggtgttagttttcactctgaggaaaagggagacatcaaaaaattttgaggagaggaaacgcagtatttgacttatatatatatattttaaaatgaccattcaatttgctgttttagggcaacagtggggctgggagctgagagaggccattgcagaaatccaggtaacaggcgatggtggtctgagccatgaggtggtaaggagtaatcagatgctgaatacagtttaaaggtctttaacctttatgtagttaaatatatacatataataatttatattcttatacatattttatatacttaaatataacttaaattatatttaaagacctttaaattaccttccattttttggattatagtaacaatatttacctaattaaattaagaaaccaattaacaagtatatagtgatgatagattgttattattattattattttgagacggagttttgctcttgttgcccaggttggagtgcaaaatcgcatgatctcagctcactgcatcctctgcctcccaggttcaagcgattctcctccctcagcctccccattagctgggattacaggcatgcccacaacctcacctggcaaatttttgtatttttagtagagatggggtttcaccatgttggccaggctggtcttgatttactgacctcaggtgatccacccacctcggcctcccaaagtgctgggattacaggcgtgagacaccatgcccagctgacagaccattattaacactcttaagtaggcactgtgctaagtacccatcaccctcatgagataggtataatcattaacactttttaaccgataattagtctgagacacagagagaccaagggaaataaccaaggtcccatggtatctcagtggtagagctgggagtcagatcctatgggtctgacgctggagcttttctgcgagaaggcagtcttctacaatgtgaatagccatgtaaggccacactctgcctttccctctttttcccccaaagatagttcttactgtacaccctcaagttcttcagactaaattacagagagatttgccatacttagtctctttcctacctggaatcattatcaaagaatgaagcagctacatgcattgcttaacggaagctgtttcccctttggggggatcagttggtcagttctgatccaaagaaagttcttccctactccctcaagtttttcaatctaaattacagagagatttgccttactcagtctctttcctacctggaatcattatcaaagaatgaagcagttacatacaatgcctaatgaaagctgtttccccttttggggggatcagttggtcagttctgatccaaagaaagttcttcccctactccctcaagttcttcagactaaattacagagagatttgccatacttaatctctttcctatctggaatcattatcaaaggatgaagcagtgatgcttaatggtagctgtttacccttttgggaaatcagtcggtcagttggttggtgaatttacttattggaaaaaaataaggaataaacaattgtatcaaaacactattgtttttagttctcccaagatcaccataaatttcttaaaaatttttaattgtgggccaggcgcagtggctcatgcctgtaatcccagcactttgggaggccgaggcaggctgatcacaaggtcaggagatcaagaccatcttggctaacatggtgaaacctcgtctctactaaaaatacaaaaaaattagccgggcttggtggcaggtgcctgtagtctcagctactcgggaggctgaggcaggagaatggcatgaacccgggaggcggagcttgcagtgagctgagatcatgccactgcactccagcctgggcgacagagcaagactccatctcaaaacaaaacaaaacaaaacaatttaatttacgttatgtaaattatacataatgtaaaactgaatcatcttaaccatttttaagtatgtagttgagtggcattaagtacgctcagtgttcaatgtcaccatcatctctccacagaactcttttcatcttgtgaaacaaactctgtgcccattaaaaaataactccccattccctatttcccccagcccctagcaacccccattctgctttctatttctatgaatgtgaccattttaggtgccttatgtaaatggaatcatgtagttttcatcatttttttggctggcctatttcagttaacataatgtcctcaaaggttcttccatgatgtagcatgtgtcataatttccttatttttttaagactgaataatattcctttgtacatatacaccacatgttgtttatccattcatctgttgataaaacagattttaacaatcttgtagcacattgacttaacagcttgaattttagaagtcacatcatcttagagattcaaagtcagaaagtctcttatttgctcctagcctgtaaacaaggatagatctgaaagatcagagacttagcaactgacttatttaaattaacaggacagtctcacagttcccaggacataaatttctattgacttttatttcataaaatcataaatgtggagcatttctccctgtacattatcatctcatgtataatgtttcatttgtcttaatcattttgtttgcacaatttgcttatttgggttgtatttaggttttatgaaatgttagtttccacagtaagtaatagatttcttgaaatattagccttagggaaatgtgatttgacagttcttcaaagaatgtgtaaaattaattataagtgaaagtcatttcaatttcagtaatatttttttaaaaacctgccagccctagattattctctttcaactcatatcatagacctgtccatcattatggtcctacacatgcctattgaccaaattacataaatcaaagtaattgttcactacaattaatcttttggggggatttattcatattttattttaaaataaaatttgcataaattcagtttttttattatactttaagttctgggatacatgtacagaacgtgcaggtttgttacaaaggtatatacgtgccatggtggtttgctgcacccatcagcccgtcatctacattaggtatttctcctaatgctatccctcccctagccccccacccaccgacaggaccccgtgtgtgatgttccccttcctgtgtccatgtgttctcatagttcaactcccacttatgagtgagaacatgcagtgtttggttttctgtttctgtgttagcttgctgagaatgatggtttccagcttcatcaatgtccctgcaaatgacatgacctcatccttttttatggctgccttgtattccatagtgtattatgtgccacattttctttatccagtctaccactgatgggcatttgagttagttccaagtctttgctattgtgaatactgctgcaataaacatacgtgtgcatgtgtcaaaaagtggccaaaggatatgaacagacacttcacaaaagaagacatttatgtggccaagaaacatgaaaaaaagctcagcatcactggtcattagagaaatgcaaatcaaaaccacaatgagataacatctcataccagttaaaatggcgatcattaaagcaggtgctggagaggatgtggagaaataggaacatttttacactgttggtgagagtgtaaataaattcaattttttaaaaaaacatgtctaccaaaataaagatattgccggcatttatttaacttctgaaagttactcatgtggcttattttacctgttttagatggcatgctattttaatattgcaataagatcacaccagttttaaaggccccagcatgtcatcaaatccctgggttagaagaaacattaaaacttaaccccatgctaacttgagctgaatctacttagcagtctgtggtcttccatcctttacttgaatgccctgtcacctgctttcccaaaagttagtcatctttgtacccctggcatgatttaaggtataactgtgtcccttccttaataatatttatttaatatgttcctgttaataaacccctgtttttctttgataatctaaaagagaaatataacactattctaagtgaaaaaatcaacatgactttccatgaatacatgacagatataaaaataaataatgatatattaaaattaagactgtttctccctttgataaaaatgtaaatgtgaaggtgttacagagatattaatgtcatcatagacctaaaatgagacattatctttaatataatcaaaaatattaaaaaggaaattgaaaggaaaatgaccttctcgtacataatgccaagcattatgatacctgaaaccatcttacatactagtgagttctaatctttggggaacatagcttcttcttctcattgcatcctttgaacagcttagctgttagaaagtcctcttctcattaagttgacatctgtctatatccattaagtatccacaaatgatcctatacttcagagccattcagagcaagtttgatctcttgaacaagatccatgacagttttttggatactttgaaatattttctcttggttaaactccctcagttcttcccatttttcctcatatgaaataattctttagtagtactcacctactttctgcttttcaatatatttactacctttctcagttagtattctccagagaaagagaaccaatagagtgtggagggggtgaatggatggatggatggatggatgaattaatgggggaaggagagagggagggagtgaggcagggagggagggagggatggatagataaatagatagatagatagatagatagatagatagatagatagatagatagatagatggtagctcatgtgattatggaggctggcaagttcaagatatgcagggtgagccagcaggctggaggccttaggaagagccattgtccagttcatgtctaaaggccatctgctgaggagtttccttttgcccagggaaggtcagccttcgtcctgtttaggccttcaactgaatctatgaggcctacccatattatggagagcaatctgctttacccagagtccactactttagatgtaaatctcacccaaaaatatgctcataattgacaacgtgagctcagaatagttaagtgatttgtctaatgcatactttgcagcttcttagaatgtagtagactcctgcatattaaaaatataataatctccaaaaaagttgaacaaagcaacccaaagattgtggtcagtccgtgatggatgcgggatgatgacagtgatatgatctttattattggccatgtcaacaacagtggctaacatgatattgagagtgtgctttctgctaggcacagttctcattgcttttctgatattatgtcatcctcatattaccctgtaagttaggttctacttttatttattttgaatggatccagaacctgaatgatagaagaattaagtaacttgtccaggtttatatggagcttctaagaggtagggataagactcaaactcaggggctgggtgtggtggctcactcctataatcccagcactttaggaggctgaggcaggcagatcacttaaggtcaggatcacagcctggccaacatggtgaaacctcttctctactaaaaatacagaaattagccgggcatggtgatgtgcacctgtagtctcagctactcaggaggctgaggcaggagaatcgcttgaacccgggaggcagaggtagtgagccaatatcgtgccactgcactccagcctgggcaacaaagcaagactccatctcaaataaataaataaataaagactcaggtagctgtaaccactaaatggtcctaatccctactcttccccccattgaaagcactggctgcagaatgtaaccgacggccataaagtctggaaatgtaggtgcctagttgacttattggatcatattaggtggctaattgatgtcctagtgactggctagcaagtcactcagagtggctacaacagaatggcatactgtccacacactgttgattgataatttctaaagcctgaattgggccatgtgcacttgtacagtgggctaacatgtgtgccagatccaaactcttctgacatgctaaaagtgcagatttgcttagtgaatgtcagaggcaagaatcacctgggacagtgcatcatagatataagttcaaggataagggaaatgcattaatgaaccacatttgtttcagtttctcacagttcattgaactacgcattgctaatgaggaacaacagagtgaacatattatgtaatatcactgatcatatcacgtactgtaatagaataccatgaaatcattattatgtatgtacaccaatattacagaattcatggccatacagtagtcaccatcttggttttcacctttttcaatatctttctttaaagtgtagggtctggatctgaacattgtattccagatgtgctcttactgtagtgggtaaagcaggaccatcctcccctcttctaggtaccacagtctaaaagctttctggcagtcagcgaactcagcgaactcatattggctttgatatttattcatgtgaaaaatatttttgtacccaccatgtacgagacacttgtatgcactggggatgcatgggtaaacaaaagaaagtccctgcctcattgatcttttattatactaggaggagacagacaaaaaaaaatagacaatcagccgggcatggtagcacacgcctgtaatcccagcactttgggaggccgaggcaggcggatcacctgaggtgaggagttcaagaccagcctggccaacatggtgaaaccctgtctctactaaaaatacaaaaattagccaggcatggtggcatgcacctgtattcccaactactcaggagactgaggcaggagaatcgcttgaacttcggaggcagaggttgcagtgagccaagatcgccccactgcactccagcctgggcgacagagtgcatattgattttttgagaccctgtctcaaaaaaaaaaaaaatagacaatcagacttataataaaattctaagccatgctaagtgaaatgtggaaagagagagcaagagtaagaggatggagagtaaagaggctactgtgttaggcaaggaggtcaaggcaaccaggtggatatggaggacagagggaggcacttccaggcacagagaaaaagaagtacaaattcctgtaggcaggaaggtatgtggattgtttgaagaacagaaagaggccaatcctgctggagtagtaataatatggagaaacccagtaagaaagaaaaatattgaggaggtagtagcagaccggatcatgtaggatcttgtagttaggagtttgaatttaagcctagctgtgacaaaaagccattgaaggatttttttcccccatgagagtgacataatctgtgttgaatttgaaaaggattacctgactgctctgaggataatagaatttaggagggcaagagtagaagcaggaaaatcaatatggactaaaacagctatgtttacatttccaagatatgttcatttttaattatctttttaatttgatttataatttaatggcactaaagtcagaaaatgtattctgtgtggcactgttgtttggcatttctttgtgaactaggacattatttttgcaaatggtttagtataattgaaaataacgtagattctcaatttcttgggtgcagagctctacacatccattagttcaaactagttaaatatgagcattcagggtgtccacattcttgctattatttggtcagcagaatctatcattttctaatagatttttgttaaaatttaatgctagcatttgctaaatttccttcatacttctgacaacttttaattaatgtgttttaagctacattgatagatacatacctagtcatgatttatagcttccagtcatattttgttgtttttatatgcagtctctgtggagtacatgaatgctttttgccttaaatactgttttgtctaatactaattttgatacccagctttctttttaacttttaagttcaggggtacatgcacagcatgtgcagatttgttacataggtaaatgtatgtcatgagggtttattgtacaggttatttcatcacccaggtattaaacctattaatagtatccatgagttatctttcctgatcctttccttcctcccaccctccaccctctgataggccccagtgggtggtgttccccagctttctcttagtaagactttgcctagggtgtcttttgccatatctttatttctagcctttctatattgttttgctttaaatatctcttttataagtagtatttacttgcaattttgtacatgttatggatattttctattcctactatcttggtttgtatttcttctctaccattctctttcttttcatcttttttgttttttgtttcattttgtttttgttgagacagagccttgctctgtcgcccagcctggagtgcagtggctcaatctcagctcactgccactctgcctccagggttcaagtgattctcctgccacagcctcctgagtagctgggattacaggtgtgtgctatcgcacccagctaattattgtatttttagtagagatggggtttcatgatgttggccaggctggtctttaactcctgacctcaagtgatccgcctgcctgggcctcccaaagtgctgggatgacaggatgtgagccactgtgcctggcccttcttttctcctttttaaacatattttttttggtctttctttctggcagtttcttttttattccctctctttatgttctactggcttattaagtatttatattctctctcttagatatgatatagggatcagtctgctttaactgtccagtaacctctatagcaccctttcctctctctccccctgaatgtataaaccttgcagcagtgagcttcactgctgtctcatctctttgagaactcttaaggtcccctctaattcacttgagctaagcacacaatcacagtctccgtggcctgcttctagatccttatgccagcaagcctttggctacagccttcatggtagttagtatttctgcttctggtccacaaagatgataatcccccaaaactgttttactgtggtaaaatacacatgatataaaatttaccatgttaactgaagtgtataattcagtggcatcgagtacatttataatgttgcacaaccatcaccatcatctagttccatgatgctttttattaccccaaacagaaacgccatatccattcagcaatcacttttatctctttctccagctcctggcaactgctaatctactttcttgtggaattgcctactctggatatttcagataaatagtatcatatagtatgtggcttttgtgtatagttcctttgacttagtgtaatgtttgcaaggttcatccatgctgtagcatgtatcatacctcatttttgcaggggaataatattccacagtatggatatatcacattttgcttattcattaatctattattgggcatttgtattgtttccgccctttgattattatgaatagtgctactatgagcatttgtgtacaagtttttgtttgaatatctgtttccaattctttctggtatatacttaggagtagagttgctgagtaatatgggaattccacgcttaacttattgaggaactgacaagctgtttttcatagcagtcgcacccttttacattcccaccagcagtgtatgagggttccagtttctctacattcttgccaatatatgttattttctgttttttttctattataattattctagtgggtgtgaagaattacccaatttttagcctcattttaacttaccgggtttccatttgttgttgttgttgttagcctaacattgctgtgggcttggagcaaaagagtcaatcaaaacatgacctgatctctccaacctgaagtcttttatcaattctggccatatttcttaagtagacaattgaatgaagcacccataagccaaagtatctgatcatatagccattacttttcaaagagtgtgaaaggagatattctctttgtgggacagatagacacatactaattgaagcaatcaaaggttgcttcaaaaaatttcctcttttgacatcacccctttccaaccaaactaatataatgtagacattagctagttaagtgaggagagtggagaatatatgtgcttttcctgtgagaattgaccttcctcaaaggattagtgacgactacaaaatcactcctcttgtctctcttttgacctgtccacaaaattagaaattttgaccagccaagaaagaaatttagggtacacaaaaataattaagaaatgtacatattacctgtatttttcaatgcttcttcaataatggtcatgtttttatgaatatttttgtattttatattaatgatatttatgattatgaacatattgtttattcatgactttttatgatcataaaaacaatacatggtcatttcttttcccaataaaaaaattggaagcacatactgtacttcttaagagctttacagactcagcagtcttagagtatgaaggtctcagccttggatttggataatgagcctgggatccaggtcaggttctgcatgacctgaagattactgcttaacttttctgtaaatctgagaatcacgtggacacaaagttgcaactactttgcctccggtcatgaaatattttgtttgaataccctcatttttgcctgcccttcatgactgccccacccaggtgaacctgatttaggaccccacatggacttagtgtttcatgtcctaactttaatcagcagttacttagcctttctccattctccccaagcctagttctctatggcagctggtgaaattcatccctcctctcagactggaaggctcacaggtaaagaacagcattgactatggaaccgtcagacacctttttggtcaaggtgccttcttatgcatcctgaatcataccagagagtcagctagatacacattctatgaagggatctcttcttgttattttttattaatttttttagagatggggggtctcactctatcacccagtctggagtacagtggcctgaccatagctcactgtaacctcaaactcctggactcaagtgatcctctcaactctgcctccccagtagttaggactataagcacatgtcaccatgcccagctaattttttcttttttgtagagacaggatctcactatgttgcccgggctggtctcaaactcctagcctcaagtgatcctccctccttggcctcccagagcattgggattacagacatgagccactgcacccatccccatcctgttctttaatactaaatactgttagcacatattgagtcctcaccctttactcggcactatgctgcctgttttgcatatatcgtcttctcacagacacctatgaggcaatgctattctctcccccatactttataggtggggaaatggagatacagcaattaagttaaacacctgcttagctggtggatggtcaggttctagttccagcctgtctgcctaaagccatgctcttaatcactacatagaaagcagaaactgaccatatcctaacatcactgtcagtttgatggagctgacagagcttagcaaccatcagtgccaaattaaccccctatttaaaaatataagtccagaggtacaaacatgatgctaaattccttatacatgctatttaatcaatttagttctgtaagggaggtactgttactatctccattttgtacattattatccccattttctagctaaagaaactaaggctgtgtaatctagggttactggttcagaaatagcacagctaggatgttaattcagggctctgtgcctccaaagccctaattaaccacaacagcacaccacaaagaaaggctcgagtaaccccagggttagtagtctgggctttgggttttttttccctgtgttattctgattttttaagaggtcatacctccttcaaatcagtcagcattagactaggcatatttcctctacaacaaatcagattgtatctctcccatgacataagccagtctctatgtagttgtttttctctccgtgttagtaattcgaatctcaacttgcacttctccctgaaagactcacattgactttatccaaacttttcctgaaagaggggttttgactccccagaatgccatgcaccattctgtgaaaggtcaaaatccaaagcaacagggcctcactgatggagggaggaaaaatatgcaaagagaaccaaagaatgtgtgggggccagccacaaagcccagacttgtgctctcagatctgcgggagctcttggccactgcaaggccaagaacaccttgcatggaagagccctgtttgcaaatgtggccaaaagccagagaagtttagcccacggagtttctgcagcaaagagtggggtggaacagtcttgtctgtattgctatctgtgccatgaaattaaccttccatgtgaaaagcgtatcttaatcttggtatcagtcaagttttaatgctttaatattggaatgtgattgacttcatggggaagagacagctgcctccttgaactgcagggttctctctgcttactggctttctcagaaaccatggtcaagtctctctccctatctatgaagaattccctaactgtccaaccagtgctgaagtcttttcttcatcacaggtcttaaacttacagcttagactacacattccactgtagtagaacaagcggaaagtgctcaactctagagtgctagtcctatctttgcaatttaccagtatgcaagtctgggtaagttgtgctccacactcagcctcagtctccccatgtataaaatggcaattatacttactcaccaggactgtagacattaagccatccaacaagttctattgagagtccaccagatgtgaggatagctacgaagccctttcctggttttaaagagataaaccatagatagctaagtcataacttgtatatataaagcaatcattaaagtagcattccctaaaatgggtcccattaacatgtactttaagcaaaaaaaaatatgattaaataaattttggagcgattgggtacacaaaggtacacaagttatgttgacataggacttctcagagcaaataaaatactaacatggactgtgcaactagaaggtaggggagagtatattgaattgcctaaactattttactcataaaaatttgggagctcaaatttttttaatactttaagttctagggtacacgtgcacaacatgcaggtttgttacataggtatacctgtgccatgttggtgtgctgcacccattaacctgtcatttacattaggtatttctcttaatgctattcctccccctgccccccaccccacaatagaccccggggtgtgatgttcccctccctgtgtccaagtgttctccttgttcatttcccacctatgagtgagaacatgcggtgtttggttttctgtccttctgatagtttgctcagaatgatggtttccagctgcatccatgtccctgcaaaggacgtgaactcattctttttcatggctacatagtattccatggtgtatatgtgccacattttcttcatccagtctatcattgatggacatttgggttggttccaagtctttgctattgtgaatagtgccgcaataaacatacatgtgcgtgtgtctttatagtagcatgatttataatcctttcggtatatacccagtaataagatcactgagtcaaacggtatttctagttctagatccttgaggaattgccacactgtcttccacaatggttgaactagtttacactcccaccaacagtgtaaaagcgttcctatttctccacatcctctccagcacttgttgtttcccaattttataatgatcgccattctaactggtgtgagatggtatctcattgtgttttttatttgcatttctcttatgaccagtgatgataagcattttttcatgtgtctgttggctgcataaatgtcttcttttgaaaagtgtctgttcatatcctttgcccactttttgatggggtttttttttcttgtaaatgtaagttctttgtacattctggatattagccttttgttagatgggtagattgcaacaattttctcccattctgtaggttacctgttcactctgatggtactttctttcgctgtgcagaagctctttagtttaatttttttcccatttgtctattttggcttttgttgccattgcttttggtgttttagacatgaagtccttgcccatgcctatttcctgaatcgtattgcctaggttttcttctagggtttttatggttttaggtctaacatttaagtctttaatccatcttgaattaatttttctataaagtgtaaggaagggatccagtttcagctttctacatacggctagccagttttcccagcaccatttattaaatagggaatcctttccccatttcttgtttttgtcaggtttgtcaaagatcagatggttgtagatgtgtggtgtgatttctgagggctctgttctgttccattggtctatatctctgttttggtaccattaccatgctattttggttgctgtagccttgtggaatggtttgaagtcaggtaaagtgattcctccagctttgttctttttgcttaggattgtcttggcaatgagggctattttatttccatatgaactttaaagtagttttttccaattctgtgaagaaagtcattggtatcttgatgggaatggcattgaatctataaactaccttgggcagtatggccattttcacaatatttatccttcctatccatgagcgtggaatgttcttccatttgtttgcatcctcttttacttcgttgagcagtggtttgtagttctccttgaagaggtccttcacatcccttgtaaattggatttctaggtattttattccctttgtagcaattgtgaatgggagttcactcatgatttggctctgtgtttgtctattattggtgtataggaatgcttgtgatttttgctcattaattttgtatcctgagactttgctgaagttgcttatcagcttaaggagattttgggctgaggcaatggggttttctaaatatacaatcatgtcatctgcaaacagggacaagttgacttcctcttttcctaattgaataccctttatttctttctcttcctgattgccctggccagaacttgcaacactatgttgaataggagtggtgagagagggcatccctgttttgtgccagttttcaaaggatgcttccagtttttgcccatttagtatgatattggctgtaggtttgtcataaatagctcttattattttgagatatgtcccatcaatacctagtttattgagagtttttagcatgaagggctgttgaattttgtcaaaggcttttcctgcatctattgagataatcatgtggtttttgttgttggttctgtttatgtgatgggttacatttattgatttgcatatgttgaaccagccttgcatcccaggaatgaagccacttgatcatggtggataagcttttcgatgtgctgctggattcgatttgccagtattttattgaggatttttgcatcgatgttcatcagggatattggtctaaaattctcttttttttgtagtgtctctgccaggctttgatatcaggatgatgctggcctcatcaaatgagttagggaggattccctctttttctattgattggaatagtttcagaaggaatggtaccagctcctctttgtacctctggaagaattcagctgtgaatccatctggtcctggacttcttttggttggtaggctattaattattacctcaatttcagagcctgttattggtctattcagagattcaacttcttcctggcttagtcttgggaggttgtatgtgtctaggaatttatccacttcttctagattttctggtttatttgtgtagaagtgtttatagtattctctgatggtagtttgtatttctgtgggattggtggtgatatccccattatcatgttttattgcatctatttgagtcttctctcttttcttctgtattagtcttgctagtggtctatcaattttgttgatcttttcaaaaaaccagctcctggattcattgattcttttgaagggttttttgtgtctctatgtccttcagttctgctctgatcttagttatttcttgccttctgctaacttttgaatgtgtttgctcttctctagttcttttcattgtggtgttagggtgtcgattttagatctttcctgctttttcttgtgggcatttagtgctataaatttccctctacacattgctttaaatgtgtcccagagattctggtatgttgtgtctttgttctcattggtttcaaagaacatccttatttctgccttcatttcgtgatgtacccagtagtcattcaggagcaggttgttcagtttccatgtagttgagtggttttgagtgtgtttcttaatcctgagttctaatttgattgcactgtgatctgagagatagtttgttgtgatttctgctcttttacatttgctgaggaatgctttatttccaattatgtggtcaattttggaagaagtgtgatgtggtcctgagaagaatgtatattctgttgatttggggtggagagttctgcaggtctctttcaggtccacttggtgcagagctgagttcaagtcctggatatcattgttaaccttctgtctcgttgatctgtctaatattgacagtggggtgttaaagtatcccattattattgtgtgggagtctaattctctttgtaggtctctaaggacttgctttatgaatctgggtgctcctgtattgggtgcatatatatttaggatagttagctcctcttattgacttgatccctttaccattatgtaatgaccttctttgtctcttttattctttgttggtttaaagtctgttttatcagagactaggattgcaactcctgctatttttttgttttccatttgcttggtagatcttcctccatccccttattttgagcctatgtgtgtctgtgcacgtgaggtgggtctcctgaatacagcacactgatgggtcttgactctttatccaatttgccagtctgtgtcttttaactggggaatttagcccatttacatttaaggttaatattgttatgtgtgaatttgatcctgtgattatgattttagctggatattttgccctttagttgatgcagtttcttcctagcattgatggtctttacaatttggcatgtttttgcagtggctggtacaggttgttcctttccatgtttagtgcttccttcaggagctcttgtaaggcaggcctggtggtgacaaaatctctcagtatttgcttgtctgtaaaggattttatttctccttcacttatgaagcttatttcggctgaatatgaaattctgggttgaaaactcttttctttaagaatgctgaatattgtcccccactctctactggcttgcagatcttctgctgagagatcctctgttagtctgttgggcttccctttgtgggtaacccaaccgttctctttggctgcctttaacatttttccttcatttcaaccttggtgagtctgacaattatgtgtcttggggttgttcttcttgaggagtatctttgtggtgttctctgtatttactgaattctaatgttggcctgctttgctaggttggggaacactccgaagagtgttttccaacttggttccattctcccagtcactttcaggtacaccaatgaaacgtagatttggtcttttcacatggtctgatatttcttggaggctttgttcgtttctctttactcttttttctctaaacttctcttcttgcttatttcattaatttgatcttcaatcactgataaccttttcttctacttgattgaatcagctattgaagcttgtgcatgcatcacatagttctagtgccatggttttcagctccatcaggtcatttaagctcttctctacactatttattctagttagccattcatctaatcttttttcaaggtttttagcttccttgtgatgggttcgaacatcctcctatagctcggagatgtttgttattaccaaccttctgaagcctacttctgtcagctctttaaagtcattctccatcccacttttttccgttgctggtgaggagctgctatcctttggaggagaagaggtgctctgatttttagaattttcagcttttctcctccggtttctcctcatctttgtggttttgtctatctttggtctttgatgttggtgaccttcagatggggttttggtgtggatgtcctttttgttgatgttgatgctattcctttctgtttgttagttttccttctgtcacgtccctcagctgcaggtcttttggagtttgctggaggtccactccagaccctgtttgcctgagtatcgccagcggaggctgcagaacagcaaatattgcagaacagcaaatattgctgcctgatccttcttctggaagcttcatcccagaggggcacctgcctgtatgaggtgttagttggcccctactgggaggtgtctcccagttaggctacatggggttcaggggcccactagaggaggcagtctgtccattctccaagcccaaacgctgtgctgggagaaccgctgctctcttcagagctgtcagacagggacgtttaagtctgcaaaagtttctgctgcctttttttcagctataccctgccccctgagttggagtctacagaggcagcaggcctggctgagctgcattgagctctgtcaggttcaagcttccctgggcgctttgtttacctactcaagcctcagcaatggtggatgccccaccccctgccaggctgctgcctcgcaggttgatctcagactgctgcgctagcagtgagcaaggctctgtgggtgtgggacctgctgaactaggcatgggatataacctcccggtgtgccatttgctaagaccattggaaaagtgcagtatttggatgggagggtcctgtttttccaggtaccatctgaaatggcttcccttggctaggaaagagaaattccccaacctcctgtgcttccctggtgaggcgatgccctgccctgcttcagctcaccctccataggctgcacccactgtccaaccagtcccagtgagattaaccaggtacctcagttggaaatgcagaaatcaccctcttctgcatcaatcatgctgggagatgcagaccagagctgttcctattcagccgtcttggaatggacctgggggctcaatttttttttaatttattttttaagaatggctatttatatattatgggaaagttttttatagagcactggaaaatgctagcaagaaggctcaggctgttggaagaaatgttgttttgtatgttgtgaagatgaaattgtaaccttggaaacatagaagagtgcattgttcattgtcaagtgccacctttccagcctatctctgatctcatacgggtttggggttgttacatgagtgttaattttgtctttctaaatgcagaacaaagatctagtaccttttgtactgctcttttatagttcccagtactgtgatgggtgcataaaagggcaaccaattgagctctagcattcctgtccacagccatgtaaggataaaacatctgcctctttacacacccaaaagcaatctctgtgacatctgcactcccacagagctgaatccaggttacactccgttgctttgggctcttgggttggatattgaggaagtcattcttagccaaggcatcccagttaaccctcttatctgacctcacccctaaagaaaatatatcagtattttttttctcctatgcagtttgctacatttcaggaagcttgactagcaaattagaattaaaacttaattttatgtctccttctgatttccttatccctagatctaagtatgtaattcaagcccgtctccccactatcctttggacacacacagacgcacacaggtgcatgcatgcacgcatgtgcacgcgcacacacacacacacacacaaacacacacagtaggagaaccactgatttttcacttcctgagaagcttctttgaattctttgtaaccttcaaactatgagagatttgccttgagatattacctttaagttaacaattgtgttttaatatgtctaccctcttataggatccccactgatgatgtctagagagcagaaagcaaattttaagctgccagaaagagtcaacatggaaatgcacagaattttgtgagagttgacagctgagatagtgtaattatgaacattttcataaaggagattttagtatacagtggaaggcacagaggaacttaaaagacatgatgtaggattgaaggcaatgccaactgtgcaccctaatacatcagactcctaggcatttcacacttaacatttccaaagctgaaccttcaagccccaaacctctcacctaccaaactctgccttcaaatattcactcccttacctcctgccctgtagctcagtaaatggctgttgcctctccaattgccaagcaacacgaggattatccctcactctgcctcctttctcattcccaagccccatcagttaccaacccctgccagttctcaaaatgtaacttgtcttgccctacctccactccagttcaggttgctattgtttcttagctgaatgactacaataatctcccacctggccactcatatcatgtactcctctttctagcagatgccacaaggtaaccagagtgatcatgtttagttcacaccttctcctgcttaaaactcttcagtgacttctcatttctgaagaaaattcaaaaccgttaaaatggagtatgaaggcaaaatgggtagatagacttaccagatatctggacataccacaaagccacagaaacaaagataatatgacattggtacaagaatagataaatagacaataagacagcctacaagtctgagtcagactcaaatatatttgggaattaatatgtaccaaagtgataccacataatagtgggaaaaaataatgattgtttggtagatagtgttgaggaaactgccttccatttgaattcctacataactacatactgaagtagactccagagagaataaagacttaatatgaaaagtaaaactcaaatgttgatagaagaaaatatatagaatgaactaggaaaggaaaggatttctttgtgaaatcccaagacgcaatccattagtagaaacaaacgttttcttacatcaaaattaaacatttctgttcatcaaagaacagcatgggcaatattaaatttttctatctcccttaagcatcaaactccaagcacatagtctttctctctgtcccttaagtatataccaagctcttttttgcagagggccaaatacacttgtctatgtttttgctaaaatgtctctcccctaacaaggtctttcctgaccacccgagttagaggaggtctcactgcatgtgatctcatttcaccttctactttgtgttcactgcaaacgttgagactgcaattatatgatcgcttacagaactcagttaagtgtctatgccccctggtagtttgtagactccggcagaccaggggctacctgctcagcctttagaacagtgctttatgcttagaagacagatgaaaatgttaatacagtggattaataaggggcagttgaaagagggcacattcactaccacatgccagatgagtgctacatgcccagcacagattccaggcatgttttgacctttatgtccacaagaatttgagtaataatgtgtgctcctgcttctttctgtcacctatgcttctttctgtcacctagagactcaacatctcaagtctaatttgtatcttctaccattccttgcactgcattaggaagtgaacaaatatttgctggctatatatctatatggcctcctcccaccacactgctttttatatgtttagattataacatcactcatgcttaatggcttgccttttgaaaactgacagttactgtcaacttttatgtaattatttcttttgttgacaactctcactctctgttgactcttaatttgatctgagcattcagttattcagcaaatatttattgaaagcctaatgggtgccaggaatatgtggggcactagaaaagctggcagtccccttgcagtggtgacagatgaacatgacctctcaaagaaatcattgagagaaaacagctaaacttagtgaagtattgagagagaccaaaatgctcccaaatttgggcacagtgcagagagtagctgaataggaatgctacaatgggaaaaatggactgtttcccagcttattttgagaaagagcttcacagtgtagcttcattattcatgactggaaaaaaatttcaaaacaatagaaatctacccaagcatatttataaaaagagactccaagaaaatagaaataactgtactatagtattgtttttcagtaacttgctatgcttttaaaaggatcaattcagagacaacttaaagcatcctattgaaaataataatgttaataatagagatatttgatgcctgctgaagaaaaacttacaaactatcctttgaaaatgattttaatgacaaatctcactttgtagaagccagttttttccaggtgatattcaaagttagtgttattttagtaaacatagagcactgcgaccaatgcattgtgatgactgtggagaagtcactatgttctgactacccagtgttgagagccttccagaagagtgcttgtgcagagagagccctgggtgaagaatttgctgtgagaggacccatggactattcctttagtatttccaaaggcaaaatctcatggaaatatattttgtctcagtataagggagaattttctaatgtgatcaaaagtgaaatcatgtgttcacagtgtatcagactccctgccaactcaaagatgggggcctttccaaggtctctttctgaaactcaagatcttagaattttgcagcctaatacagctttcaattatataataaaaaaactttgtattttatcatagttttatatgtaccataaaactgtgaagcaagtacaagggtatttctatacatcccaaactcaggctttcctattaacatctaatattagtaggtaaattttgtcacaattaatgaaccaataatgatacattattattaactaaagtccaccctttattttgattactttggtgttttttttttttaaagtaatatcctttttctgtccaaggattgtatcccggaaaccaccttatgtatagctctcatatctccctacgctcttggctgtgatagtgtctcagattttctttggttttgatgacctcgacagttttgaagggtactgataaggtattttgtaaaatggctgtcaattgatatttgctatttcctcgtgtttagatggggattatggatgttgaggaggaagaccacagaggcaaagtgccattgtctttttatcatatcaagggtgcatgctatcaacatgatataccagtcttgatgttgcttttggttagctggctgaggtagtgttggtcagatatctcaaatgtaaaattactcttttatttcccctttctatacggtgctctttgaaatgaagatactaggcacagatcaccattaaggagtgaggatttaatctatgtagattttttggaattcctctgtctgggtagatttgactattcaacctcatttatctgttcatttatatttgtatagactcatggatatttattttatgctctgggttataatacaatactgcattatttgttttgttcctcaaatgctttcagctttagctgttgaaagctctttcagttgtcttctgtgtcactttgacatatccctatgattgtaagattttggtttttttgttttttaaacacttcctttctggcattaaaagatgctgcagcctcctgttgaggatttcttgtgccagccatttctctaaggagctctcctcatgtagcttttgtttgtttgtttatagttttaaagtggttctagagtcatttcaggtactttacacatatttttctttattttggggggtctttttttcaacatcattatgtagcctttaacttcatttcacagatgcagaaactaaacagaaactaaaagagaaatgatttacccaaggccatacaattaccatagaagtggagttgttataaagcctaaattgtttgcctccagagctcacactctgaacctttactttacaaggtcagtctcacttgttacctaagttagtgttagatagaaacagtgctgctgtgaccagcctgcccttttgttaggaggaaaggtgaaaataagccaagttttcctctggcaagtctcccctcaggattccagccacgctaagagttcaaagcccttcctgaatgtgggagttgttgtgtgctgtctcgtggttttcactatttatctgaattcccagatcagattgttagctcttcagagagcaaggaaaatatactacactgtaggattattaaggtaagtaacttctgtcagccacatcacatcaaaacaggctgtgatgatatggttgctatcaaatacaaatatgaaaatctgcacctttcataccaggagagcataaatcttgattgaagtgatatcatattccctcccctttcctccacttttgaaagccacctggggatgggtgttggctgccattctgccatgtgcaggtgactggactgggctggccaatccagtctgcatccccaccagttttagaaggaaaaagacattagacagcccacaattttcttacctctatgactttcttttttcatttcaacttgataaaattgtgtctattcttttcaaggcttagcccaagtgttcattccttcaggaattcttctttgcttcctgctccacagccccaaactgagaataatctcacccttcagggaagtcccccaaacatctcatagctccgaaatcactcttgctattctctggctagcatatttgtgaccatctcctggtctccattagaatataagacttagaaggtaaagactgaactttgcctgtcttctgcttgctcacaacttgtaggacaatgatttttatgtatttggggctcaaagcattgagctattattgaattttcaggcagtaatataccagatagtgacaaaggttccaaaagccaggaatggctaccagattcctttttccatgttctgtgtcagagattcatcctttaatttatggctttagtttcctctaagaaaatgacaacttctaaaccaagtgttagcacgcagtggcctttgagctacattcaaccctctgcctcttcttgtatcaccagtgatctaagaatggttttcatgtttttaagtggtgggagggggagacaaaacacaaaaagaatatctcatgtcatattcagattatattaaattttaaatataaaattaaaattttatgaaatttagatgtcattttccatgaataatatttaatgaaatacagtcataccctctttgtttacatatggcctaaggcaagttttacaccaaaacagcagagttgagtagttacaacagggacatacatcccatgaagcctgaaatattcagtctcaagactttcaataaaaagtgtgccaagccctattctgagtcatgcccagaaatgtgtaccactgtgtgaaaaagttggggagccctttagataaagggcagagtagatacaggcacagacggcctagaggaaaaggaatctggagacaagaaaaggaagaaaacggaggcagaagcatacttggggacatcagatctcctgggttttgtatacatgcattgcaaacatctctacaaaggattcttatagttggtgggtatgcccgaggggcagatcttgggtattttacagaaccttcctgctcttctataaggactctgcatgggtcttttgaagaaaggatgacattaggagattatcattcatttctgatcattctgtataccaagactaatattttcagtaagatctaatgggctttgtgtcttaattttctctgattcaaccataataatgtgtgtgtgttctgggggaatctatattgtgtgtgtgtgtgtgtgtgtgtgtgtgtgtgtgtgcatttctttggaagaaatctgttttagatagatgctagttaattatcatgtacatagggatctttaaacatttggagtttttgagtaaagacacattgattggaacttggctaaagccatttcagccccttggagagttgtaatgacagttctttttgtttagaaatctatcattttcatgtctttctcttattttcttattgcagggtaatgccctgtacttcaagtctgccagaaatgttacagtgaacattctcaatgaccagactaaagtgctaactcagcttataacaggtaagaaaagggagaacttaacagtgcctagcccatgcgaggcactcagaatacagaattaatggtcaaaggaaacaccatatgaacctgaaaataaagtgtgctaacacattgttgagaaagagaatgtagcatgtgttccatgattctactagagggtagaatcccatccgtacacatattaaacttatgaaatctaatgatacctacttagtggggtaagaaaaaaaatttttctaagcagattttcatagaacatggcccctaaatataaaccagctgcttcatcaggtgctcagccaaagaaaagcttcttgctccaatgctggaggaaaaacaggctgtgttggattggttgagagaagaatgcagtatctataaagccagggaccatactttatgggctgtgaaagggatttttaactatagtttgaacccatgccatatttgctgtacgtgctgactttgaacctaactcaattgcaggatgtggatgtatctttactgaatatgtttgtgtgtaatttcttttaatacagcagatctgtgcctaacggctgtggaaagcacccactgtgttttaaactacaaattcctgaaatctaaacaaggactggttattcacaataatgattataatgataaacatggacctcgtgatttggtaacgtgttgagcagcacaatcaatgcccactctgtaagcagtgaacagggaggcattatgcacccccacagtggaagggaaaaggaatgtatgtatgaatggcattgttatacttacagacagaaaatgccatttgtttggcttcagggctaaaagtaaagtatacggatggacattttgagaagccagttacccaaatgcctcgaaacattactgttattgtgaataaaatatctggaacccactaataagccatggggaaacaggtacctttgtgaccatagtcttcactcctggggagggagcctcactcccactcttcccctggagtgctgcatgtagatgtctagagattcatagccagtgggtgacttggaccatctgccaatcaagaaactcagggattgaaggaactgctgcccggcagagcccataatccataaacatgttgtttcagcgtgtgactggatcttccaccttgcttatataacatctggcccacagtcacaatgctaaataattaaataaacagcttcagtaagcaatgatttaagcagcgtgtgtgaaaattgcctccaggagggtaataaatccaacctccagctcccagattttcacattcaaaaggaacttatttagcctgttgatcatttcccatttatttgtagtgggagatttggtttatttgagattttgttttgataaatctggaactgcccaaatgactattattcagcaaaagagtgagtcagtctctttttttccccccactcttcctctcccttctctccctacccttctgacaccccttttcccctccccttcagtgcttctctccctattccttcccctctctcctaccacccctttatccctttccttccccttctctcttctcgtctctcttcttcttcctctcttcccttgtttcttcctccttctccctcctcctgtgtcactattcttgactctatccctccagtggtatttggtatttgttttctgtctccctatgatgaattctagagaagacattagatatgtttaaaacatcattctaaacacacacacacacatacacacatgcaacaatacacccttaaaagttttccttcaatactctccttttacattacattaatgcacacagtggaaaagcacccagccatcccagcagacaataccttctaatgcctgttgtgctgggtgctgtacttgttggaaaacaaatcactcctgtcttctaagcaatgaggtctacaaaggctatcctgaggaataaagaattctgtttacctaaagaatgtctcaaaaacccattagaaattctaatgttagatgtccaggaagtcttttcacaggaaacaatacttcacatgatagttaagttctcaaattagatcacgaatgcctatttgaccataaggcaggctgctgatttagtatctcagtagtgggtctgaatggggaaccctcccacctacatggaggaaagcagtggagatgctttggacagcatcatgagggagtggggaagggttctagtgttaagagagttgggaagagaaattaggcttgaaggccaccaggcctttgcacctcccagactcatggagactgttgatgcattttgatggggctccagttctcctccctgtttaggagattaattaaggaggcactccacacatagactacacagagggggattaattcaagattagtttcacattaggaatagtggtttttttcttcccagagaggaacaatgagttcaacatgtgacctcctgagctgtctccagctccatttgcatttttctctagagtcatttttaaggattccagccatgtccagggaattttgcagcctcaggtgaaatcaacaaaggacaagccatctgcaccactgagccagcagttgctctgtggggttttggctaaaactaccaattactgagcttcagatacccaaagggttgtggctcttggtgaattccactttatgttctgtgaagccctgaaaagcaagatagcttaattgtactttgtgttctctgattgctgaagcatactttctatactgctatagtcctttagtatatgcttctgtatgtctcacagctgttcatgaattcaaagtaacacaggaaggtgtccttaactcctcagggaccaggatgatgatattgcccaggtccacagagaagtccaagcatgtgtgtccccaagttatacaactgcttttttatatgaatggaacaaaaatgggcaaactgctcgccctgtgcccatcctgaggtcattcattcattcgttagtacttcattaccttcccattctcaatctccctcctcacaaaaataaagtaataaccctaaagcactgacaatataatatagattttattcaaggttttgatgccatcaagaagatagctacatcttagcctttgcagaaaaactgaagccaaatccctcattggacatctcagctctttcaagatttccttctggcccttgtctccagttttctatttctccttctcctcacagatcttatttcctggctcttccagatgtgctggccccagctcccttctccttcctagacaaataaatgcccctttccttctgtggaataattctcagagctccattccagactgagacctgccattgtctctaaccttgcgagagccctccgccttgcccccatttgttctcctcatctgcagcatcaaagtggtcagataagatgacttccgggttccatcatgcttggaagtgctgtcctatctctgctgtttcagtctcctactcattagggagcctttccaatgtccttctttgtgttggagggctggtgtggacacactggcaagggatgaggtctgcttaatagatgtgattatgtgagtaaggagagtgcactaataagtactcatcatgcattcttttccacgtgttgtcccattgcagtagaatggcgacatccacaagagtggtgatgtccacaggagtggtttcctacactcacagcactttaccacccatagatttctttttataaacacaatgtcatttgattctttcaaactttctataacatagatagatacagtaggcagtgatagtccaatgttatagatgcagaaactgaggttcagaaagatcaaatgatttgccccaaatcatgttatcacagaataagaatgagttgggaaataattcatgtcttctgattcctagtccgacagtcttgacaaagagaaaagccaccccagatgcccagtggctggttggcactatcagcccagccttagcattctcctgcttcaatgtaatttttcagaacacgcgcaccagacaaggctgttcagtggccatgatggatcaagacaaaacaacacaaacacacaaacacaactctggtcatgtgtgtacatagcaaaactatcaacattgtccagaccacaaaaaagaccaaacatccccctatcctggctaataagagtgactctgtttctttattcaccacattttttgcatttccctggtctgtctttgttctagataagatttactcccattttctgatagtatttaatccagggtagagccttatttccttaaacgttccccaaaataagctaatataaggtcacattctctgataagtcctttctcatgacttctttctgagatgccctatggttttccttatggtgtgtgttgtccctcactgcaatgagtaataaacccaatttgttcaacaacaggtgtgttcctagtggtctttggctggaaggcactggggactctctcattgctatttattattaagtgacactcttttgaaaaataccagaaagaaaacaattccatgtcagaatcttctgaacaattttggaaaaagtataagatttctagactctaccctcaaatttttttctgtaggaacttctagttgaaaagatgaatttcttttgatctgagctaggttcagtgagaatgattatactcctggattattcctgtgtgtttctgtagaccagcttttgagaaccccatgaaatttaggtattcaggtagatccagtagatccagctcagatagattggaatgctttcttcttttagaaattctagctcatcaacctggtttactttttccatggtacctaaatctttctgcagttttctggtttaataataaaattttaaatgtatattggtgtgtctccatcagaatatagatgctatggaatcgggcttgatttccttgtgcagtattacagctccacattcaagaacagcatctgttgtcatctgataaactatctaaatttagttttcactgaacaaaatcctaatataaaagattgaacaacttctaaggcaattaattacagtaaccatttctgctatgaaatgatctgtatactaaggaaataaatttctcttggtgtcaaatgcagccagtgggttaagggtacaaagttaaacacatttcagctgaattttaaaaagctctttctgataattagggagggccaaagatatgtgattgtctcgagaagtgttgagcctctggtgccttgagaaatgcaagcaaaaatccacaactatttgacagcaatttggtggttagctgagggaaatcacagtcaaggattagtttggaggaagggcttgctggtcttcaaaattatagcccaagaatatattactaaaagtaattgacaagacctggctaaagtcatgagactgattttcatggtcagcttttgaaaaccagtccactgaacattgaagtctcatacaatcttgttagatatgtgtgttctatgaaaagctttttgtagtcaaagcgatgagactaatggtgttttctctctctctctctcctctctcctctctatctctctatctctctatatctctcaggtccaaaagccgtagaagcttatggtaaaaaatttgaggtaaaaactgtttctggaaaattgctcttctctgcagacaataatgaagtggtagtaggagctgaaagattacgagttttaggtaaggaaacttgaatcatttaacttgtttgatgctactgtgtacattttagaggagaagcaaaatggtgttatgaacaggatatgtcctcccaaaattcatatatcgaaatcctaactcccaagataatggtattaggaggtggagccttgaggggtaattaagtcatgagggttgagccctcatgaatgggattagtgtccttccaaggggatgagaagaccagagatccctctctgacatgagagggtacaagaagtcagcagtctgcaacctggaataggagcctcaccagaacctgaccaggctcgtatctgatctcagactttaagcctccagaactgtgagaaatcaatttctgttgtttataagccacccaggctatggtactttgttacagcagcctgaactgactaagacaaatggtgtctagaagagtgatttaggccagtttcctggattcttttaaagcaaggcagttgaacctccctgagtctggtcccctagtggaaatttctcaagctgtcaagtctttttggcacatctttcaacactgagctttgtgtgaaaatgagtgctcatccaaagaagtctcatttagaacatcctgtactcacagactggcaggcgtgcttgacgcattccagacttgcatacatgatgcagtgattcctaaacctggttgcaactgaagaatcatctaggaaactttggaagggtttaggttcatagttccaactctgatttactgaattagaagctatggtgaaaacactgagaattcgttattaaaaatatttgcagaaatttctatgatcccactgttggaattattgaatttgagcacatagcaaatgaatcttttatggctgtatgctgaaatgatctagcatggtgatttaaggatcctagaactccagctgaccgggtttttaattcctgctgtcacccactagttttgtgactttgggcaagttgctggcatcactgagccagtttccttttctgctcaataaggctaagaacatctcccatcttgagttgtccctaaggttaaatgagactctgttacatccacttatcagagcccctagcacaaaatagtgctcagtcaacagtaggtgctgctgctgctgttactacttatactactattactattaatgctaattctacttttccttctttagctccctgagattcactgtagcatagtgattaaaatctcaggctctagaattagcctgtttttaacccaatttctatcctttgctagctgtgtaaccttaagcaaagtatctaatctctctgtgcctgcttgcttacctgtttataaaattggtataatagaagtatctatcttctgagactgctaaaaagattgaatgaaatcatctatgtaaagtactgagttggctaaaatactaagtgtccaataagtgctaggtgttatcatcttaaattattagtattattataaggtacgtttacctgaaattatatttatctctgcattattatttgcactttgcatcttctttatcttccattactcctgtattttttcttggtctttacctcctcccacagtcagcttgtctggtctatttctctcttcctctctcagtacacatacatgtctaatttcctttctggatgactcttagagcttcatctccagtctggtatcttccttgaattctggatcttctttatctggatattctgccagcctctcaaattcagtggatcttgaatgcctatcatggtcaaatgcacgcatatgtacatgtgtgcatatatattccatcacctcacccccgactctcccacttgtatttgcccctgacttccttaacactcttactgtccccattatactgtcctgtcccagtctcatcctggccatcatgagctcagcatagtcaaaagatggaagtgaccatccttatggggcttaatggaggcaaaaatgcagggtgcagagatgataaagccaggtgcagtctaatccctggtcagtggtttatgtgtggcatgatctgaaacaactccctttttctttcagggccttgcttttttatatctgtaaaattagagttacctagagaagatatttttatacaatgttttccagtgaccaaagcttttaaaaataaaatttcatacatagtcccaataaataaaatagatgaaagaccaagatttctctgggttgtaggcgagtatattagtctgttctcaccctgctaataaagacataccctagactgggtaatttataaagaaaaagaggtttaatggactgacagttccaaatggctggagaggcctcacaatcatgacagaaagcaaaggaagaacaaagacacattttacatggaggcaggcaagagagcacatgcaggaaaactgccctttatgcaaccatcagatctcatgagacttattcacgatcataagaacagcctaggaaaaaacccacccctatgattcaattatctccaactgggttcatgggactatggttgctacaattcaagatcagatttgagcggagacacagccaaaccatgtcggtgaggatttgaaaggggagacttgagacattggagtcttagtatagtttgattcttttccccctctgtgtcctctggggactgcttataacttattttttaaaaccccttatgtggatactctttttataaaaggtctattgattacttgctatgatttaggtactatgcttgatatgcagtattatatttacacctcagaaacaccttgtggggtagacaccatttttatcacccctgttttacagttgacacaattgagctgagccatagggaaaggtgaaccaaagcatggctgacagctagaattcacaacctggcatgttggacatagagggctttaccttaaagccctatacttgctgtggcctctatctggtctcattttcagaaggggaacattgcccaagatcaagtgccagtaagtggaagggcccatgttcaaatccctgcctatagactccagcctcggtgcacttcactacatgtaaatatgttcctaagacttttcctattttcacaatttatgctttcctctttttgtagaaatggcattttctattttaattcttggctggtgtggagggaaacccagagacttcgagctatcctcatgtttaagagcactttgggccaggcgcagtggctcacatctgtaatcccagcactttgggagcccagtgcaggtggatcatgaggtcaggatttcaagaccagcctgaccaacatggtgaaaccccgtctctactaaaaatataaaaattatccaggtgtggtggcacacagctgtaatcccagctactggggaggctgaggcaggagaattgcttgaacccaggtggtggaggttgcagagagccaagatcgtgccactgtactccagcctgggcaatatagtgagactctgtctcaaaaaacaaaaacaaaaacaaaaaactttgctgtaccagctgtaaaacaaaaatgcctaggggaaaaagtggtgttatctcacacccagatcattctatgcaagtgaatttggcacttcctgttaattccttggtgcatcatgagtcacttcaccactttaaaatctgactttgcaatggcataggataattttaaacgtccagacactttggcttaatcttaacatccaaaactctgtgatggtatcacttcagaacttaacctctaccctaccccacccccacattcacttagactgaagactgggaaatgattataggttttggtcacttcaaagcaggtgggtattttcgttgttgtttgcagctatgtttgtgatatttcatttagagcataatgtaggataaaatctgtctctcttcatcattaggaacatttgcttttttatgtgaaatgtagaaaggaagcatcaaaataaatatcactgctgctgtcaatgctaaaaagacttggaaatgaccaccccacaaatcttgcatcaacctactcagtgaaatgagcccagtgggttgcagaaatgagcttcttatcagctgggattcagccatatggtgtggaatgacaagtctaggcagtttcattttcagcataatgagaagtttgtctttttgagtcgtcagactgtataaactcttgggaggtttgaatctggttgcacatttcatggtagcatctaacatagctgggttttatccttatcaggaccacttaggacctgagtgaccgtattcaagtatgttttctctctaagctttagtttccatttgtatagaaaaagaaaaaaaaatggaaggaagaatgaatgactataataagaaatataagtaaatgctatgtaaaaagtcaattatttaagttgatagcaagttgagtagaaataagcagtagagacctaaaaacataatgtctcttacatgtagtagctttacttgtggattcagaacaattttaaaaatttttctctggataaccacacccacctattcagtttttaggacaatgacaaccttgagcacattcaagggatcttgaatagtatggtaaaaagactagaagctcaattatttggaaacttttattctggaaaagatataggaggaataaatgtaggtaggctgtagtcactgagctctcatacatgcatgactttcctggggaaagcagagcaaccaagagccatgcagttgagtaattaaaaacacaggttttgtagctaactatatatcctggtttctgttgtaagctagtgctttgggtatgttgcttcatcgttctagggatcctcttataactctgtgacatagggtaataatgttgggtgctctgtgctgttgggagtactgaactacacagtgtgtgtagagttaatagtacagtgtgtggaacacagtaagcattcagtacatgctaactggtgttggtgatggatttttttttcaattgacacattacaggcaaacatacaatttgattttttgatacatctccatcatataatgatgaaactaaggtagttagcatattcaacaccttgtgcgtttatcatttctttttgatgacaacattcaaaaaccagtcttgtagctattttataacatacagtaacttactgttaactgtagtcaccctcctgcacaatagaacaccagaacttatttctcctatctaaatgcaacttttatccattaaccaaactccccaaccttctctcctccatcccctcccaatttatggtaaccacctttctattctcaacttctatttaatatgaaatcaacttttttaaaattccacatatgaatgagatcctgtggtatttttctttgtatgtctggttattttacttagcaaaatgtcctctggtttgcccattttgtcccaaatgacagaatattattctttttatggctgaacagtattccattgtgtacacataacacattttctttatgtattcttttttatgtatttcttgttggccatgtaggttgattccaagtcttggctattgtgactagtactgcagtaaacgtggaacttaagacatctctttgatgtattgatttcatttactttgggtatatatcctgtagtgggattgctggatcatatggtagttctattttaattatttgtagagcctccttactgttttctgtaatagttatacttatttatattcccactaaccatgttaaggattccctttttttacatcctcatcaatatttgttatcttttgtctatttgataatactcctaactggagagagatggtatctcatttgcatttcatttatatttaaatggttaatgatgttgagcatattttcatatacctgttgaacattggtatgtttttgagaaatatctattaagatcttttgcctatttaaaattggattattttgcttttttgctgttccttttgtattctagatattaactcctgtcagatgtatagtttgtcaacattttcttccatgtagttggttgtctcttctttctcttgtttccttggctgtgaaaaagctttttagttttatgtaatcccatatttttaactttgttgcctgtacttttgagatctcacctaaaaaatccttccttagcccaatatcatgaagtattttctctacgctttcttctagtattgtagttttgggttttacatttacatctttaaatccattttgatgtgatttttatatatagtgagaggtagaggtctaatctcattcttctacatgtggatatccaattttctggcaccatttattgaagagactatttttccccaatatgtgtttttatcaactttatgaaaaggcaattggctgtaggtgagtgaatttatttctgggatctctattctcttccatcggtgtatgtgtctacttttatgccaagtaccatgttgttttggttattatagctttgtagtatgtttagaagtgcaatgcctgcagtttaattcttcttgctcacaattgttttggctatttggagtcttctgtggttcgagatgaattttagaatttttttcctatttctgtgaataatgtcattgggtttttttgtttggttgtttttgtttttgagatggagtctggctctgtcgcccatgctggagtgcagtggcgcgatcttggctcactgcaagctccacctcccgggttccggacattctcctgcctcagcctcccgagtagctgggcctacaggcgcctgccaccacgcccggctaatttttctatttttagtagagacgggtttcaccgtgttagccaggatgatctcgatctcctgaccttgtgatctgcctgccttggcctcccaaagtgctgggattgcaggtgtgagccactgagcctggccgtgtcattggtatttttgatagggattgcattaaatcggtagaatgttttgggtagtatggacattttaacaatttaagaattaatctaatctgtgaacatggagtctctcttcacttatttgtgtcctcttcaatttatttcatcaatgttgtatagttttcagtatagagatcttttcacctccttgcttaagtttattcataggtatcttatttttcgtagctattgtaaatgggattgctttcttgatattttttcaaatagttcactgttagcatatagaaatgctactgatttgtatacgtccatttgatgtcccacaactgattagaattgactgttagatttcttaattctaataattttttttttggtggaatctttagggttttccatatgttatatataaaatcttatcatctgcaaacagggacaatttgatttcctcctttccattttgtttgtttctttctttctcttaatttctctggctacaacttcctgtacttcgttgaatacaagtggtgagagtgggcattcttgtcctattcctgatattagagggaacttcccattcagtatgatgttaactggtgatttcttgtatatggcctttattgtgttgaggtacctaccttttatacctaatttgatgaatttcttgcaattggattttgagttctgtcaaatgcttcttctgaatgtattaaaatgatcatatggtttttgtctttctttccattaacgtagtatatcacacttatggatttgctgatggtaaaccatccttgcattcctggtatgaatcctacttggtcatagtgaataatctttttaatttgctgttaaattcagtcagttaatattttgttgagaaattttgtatctatgttcgtcagaggtattaggctatagtttctttttttgttgtattcttgtctggttttgatatcaaggtgatgctggccttgtaacatcagtttggaagtgtttcctcttctctgatgttatggaatagtttgaaaagaattagtaatacttcttctttaagtgtttggcaagaagtcagcatgaagccattatgtcctgggcttttctttgatggaagacttttattactgattaaatttctttgctcattattggtctgttcccattgtctatttcctcataatccaatcttgttaggttctatggggtccaagaatttatccatttcatctagatcgtcaagtttgttggtagatagatattcatatagatacataataatccattttatttctgtggtatgagttgtaacgtttacttttttattttagattttatttgagtcttctctttttgtattaatctagctaaatatttgtcaattttgtttatattttcaaaaaaacaactttgtttcattgatctttttaactataatctcttttttaattctactcgatctttattatttactttcttctaccaactttgggttttgttcttacatttctagttccttgaagtgtatctttagattgcttaatataaatcattttactttttcgatataggcattcattgctatgaaattccttcttatgactgcttttgcaatgtctcaggctttggcatgatgtgtttttattcttatttctctcaaaaatatttaaatttcctttttaatttcattgttaacttattgaggagactgttgtttacatgtatttgtaaagttctgaagtttttcttctagttgatttctagttttataccattgtcagaaaaaaaatgcttgatataatctttatcttctttgttaagacttgttttgtggtataacatgtgatctattttggagaatgttaaacgtgtaattgaaaagaatatatattctacagctcttaaatggaatgttctgtaaatgtctattaggtccatttggtctatggtacagtttaagtctaatatttctttgttaattttctgtataagtgatctttccattgttgaaagtgaggtgctgaagtcttctactattactgttttggagtcaatctctccctttagatctagtaatatttgctttatatatttaagtgctttggaattgggtttctttatttacaattgttatatcttcttgttgaattgattcttttatcactatacaatgaccttctcctttctttttacagtttttgacttaaagtctactttattttatataagtatggctactcctgcttgcttttcatttccatttgaatggactgtcttttttcatttctccactttcatctatgtgtttaataatgaggtgagtctcttgtaggcagaatataatggggtcttgttctttaatccattcagtcactgtatatattttaattaaagaattttatccatttacattcaaagttatttatgataggtgagaacttactcctcctcttttttacctctgtggtgtggtggttttctgtggtgctaagatttgttttctttctctttcttgtttatgtatctgctgtaatttatttgtgattcctgtggggctaacgtgaagtcttatagttacaataggttattttaagctaataacaatttaattccagtcacatgagaaatactctagacttttttcctccctgccaacaatttatatttttgatattttcttgcctgaaaacatatatttaaattagtatatatagtatatccattatacatatacatgaaatatatgcacattatatatgtatatatacatatatacacattttatatgtatatatacatatatacacattttatatgtataatatatataaattatacactatacatatatacacaatattcacacatatatacatatataatgtgtataatatatactttatatatatattatgtgtatgtttcttaaccactaattttagttgttattgtttttgactgtgttgacttttagccttcatattaagggattgaaagatttacatagtaccattgtagcaatggggtattttgagtttgattatgaatttacttctttttttttctcttgtgtgtgtgtgtgttttattattatactttaagttttagggtacatgtgcacaacgtgcaggtttgttacctatgtatacatgtgccatgttggtgtgctgcacccattaactcgtcatttaacatgaggtatatctcataatgctatccctcccctctccccccacccaacaacaggcctcggtgtgtgatgttccccttcctgtgtccatgtgttctcattcttcaattcccacctatgagtgagaacatgcagtgtttggttttttgtccttgcaatagtttgctgagaatgatggtttccagcttcatccatgtccctacaaaggacatgaactcatcattttttatggctgcatagtattctatggtatatgtgccacattttcttaatccagtctattattgttggacatttggcttggttccaaggctttgctagtgtgaatagtgctgcaataaaaatacgtctgcatgtgtctttatagcagcatgttttataatcctttgggtatatacccagtaatgggatggctgggtcaaatgatatttctaattctagatccctgaggaatcgccacactgacttccacaatggttgaactagtttacagtcccaccaacagtgtaaaagtgttcctatttctccacatcctctccagcacttgttgtttcctgactttttaatgaccaccattctaacttgtgtgagagggtatctcattgtggttttgatttgcatttctctgatggccagtgatgatgaacattttttcatgtgtcttttgactgcataaatgtcttcttttgagaagtgtctgttcatatccttcacccactttttgatggggttgtttttttctcgtaaatttgttggagttcattgcagattctggatattagccctttgtcagatgagtagattgcaaatattttcacccattctgtgggttgcccgttcactctgatggtagtttcctttgctgtgcagaagctctttagcttaattagatcccatttgtcaattttggcttttgttgccattgcttttggtgttttagacatgaagtccttgcccatgcctatgtcctgaatggtattgcctaggttttcttctagggttcttatggttttaggtctaacatttaagtctttaatccatcttgaattaatttttgtataaggtctaaggaagggatccagtttcagctttctacacatggctagccagttttcccagcaccatttattaaatagggaatcctttccccatttcttctttttgtcaggtatgtcaaagatcagatagttgtagatatgtggcattatttctgagggctctgttctgttccattggtctatatctctgttttggtaccagtaccatgctgttttggttactgtagccttgtagtatagtttgatgtcaggtagcatgatgcctccagctttgttcttttagcttaggattgacttggcaatgtaggttcttttttggttccatatgaactttaaagtagtttttttccaattctgtgaagaaagtcattggtagcatgatgggaatggcactgaatctataaattcccttggacagtatggccatttccatgatactgattcttcctacccatgaacatgaaatgttcttccatttctttgtatcctcttttatttcattgagcagtggtttgtagttctccttgaagaggtccttcacatcccttgtaagttggattcctaggtattttattctctttgaagcaattgtgattggaagttcactcatgatttggctctctgtttgtctgttattggtgtataagaatgcttgtgatttttgcacattgactttgtatcctgagactgctgaatttgcctatcagcttaaggagattttgggctgagacgatggggttttctggatatacaatcatgtcgtctgcaaacagggacaatttgacttcctcttttcctaattgaatactctttgcttccttctcctgcctaattgccctggccagaacttccaacactatgttgaataggagtggtgagagagggcatccctgtcttgtgccagttttcaaagggaatgcttccagtttttgcccattcagtatgatattggctgtgggtttgtcatagatagctcttattattttgagatacatcccatcaatacctagtttattgagagtttttagcatgaagcattgttgaattttgtcaaaggctttttctgcatctattgagatagtcatgtggtttttgtcattggttgtgtttatatgctggattatatttactggtttgtgtatgttgaaccagccttgcatcccagggatgaagcccacttgatcatggtggataagctttttgatgtgctgctggaattgctttgccagtattttattgaggatttttgcatcgatgttcatcagggatattggtctaaaattctcttttttggttgtgtctctgccaggctttggtatcaggatgatgctggactcatcaaatgagttagggaggattccctctttttctgttgattggaatagtttcagaaggaatggtaccagctcctctttgtacctctggtagaattgggctgtgaatccatctggtcctggacttcttttgtttggtaggctattaatttttccctcatttcagagcctgttattggtctattcagagattcaacttcttcctggtttagtcttgggagggtgtatgtgtccaggaatttatccatttcttctagattttctagtttatttgtgtagaggtgtttatattattctctgatggtagtttgtatttctgttggatcggtggtgatatcccctttatcattttttattgcgtctatttgattcttctcttttcttcttggttagtcttgctagtggtctatcaattttgttgatcttttcaaaaaaacagctcctggattcattgagcttttgaagggtttttggtgtctctatttccttcagttctgctctgatcttagttatttcttgccttctgctagtttttgaatgtgtttgctcttgcttctctggtccttttaattgtgatgttagtgtgtcaattttagatctttcctgctttctcttgtgggcatgtagtgctataaatttccctctacacactgctttgaatgcatcccagagattctggtatgttgtgtctttgttctctttggtttcaaagaagatctttatttctgccttcatttcgttatgtacccagtagtcattcaggagcaggttgttcagtttccatgtagttgagcggttttgagtgcgtttcttaatcctgagttctagtttgattgcactgtggtctgagagacagtttgttataatttctgttcttttacatttgctgaggagagctttacttccaactatgtggtcaattttggaacaggtgtggtgtggttctgagaagaatgtatattctgttgatttggggtggagagttctgtagatgtctatcaggtctgcttggtgcagagctgagttcaattcctggatatccttgttaactttctgtctcattgatctgtctaatgttgacagtggggtgttaaagtctccccttattattgtgtgggattctaattctctttgtaggtctctaaggacttgctttatgaatctgggtgctcctgtattgggtgcctatatatttaggatagttagatcttcttgttgaattgatccctttaccattatgtaatggccttctttgtctcttttgatctttgttggtttaaagtctgttttatccgagactaggattgcaacccctgcctttttttgttttccatttgcttggtagatcttcctccatccctttattttgagcctatgtgtgtctctgcacatgagatgggtttcctgaatacagcacactgatgggtcttgactctttatccaatttgccagtctgtgtcttttaattggagcatttagcccatttacatttaaggttaatattgttatgtgtgaatttgatcctgtcatgatgatgttagctggttattttgctcattagttgatgcagtttcttcctagtctcgatggtccttacaatttggtatgtttttgcagtggctggtaccggttgttcctttccatgttgagtgcttccttccggagctgttttagggcaggcctggtggtgacaaaatctctcagcatttgcttgtctgtaaagtattttatttctccttcacttatgaagcttagtttggctggatatgagatgctgggttgaaaattctttactttaagaatgttgaatattggcccccactctcttctggcttgtagagtttctgccgagagatcggctgttagtctgatgggcttccctttgtgggtaacccgacctttctctctggctgcccttaacattttttccttcatttccactttggtgaatctgacaattatgtgtcttggagttgctcctctcgaggagtatctttatggcattctctgtatttcctgaatttgaatgttggcctgccttgctagattggggaagttctcctggataatatcctgcagagtgttttccaacttggttccattctccccgtcactttcaggtacaccaatcagacatagatttggtcttttcacatagtcccaaatttcttggaggctttgtttgtttctttttatacttttttctctaaacttctcttctcacttcatttcattcatttgatcttccatcactgataccctttcttccagttgatcgaatcggctcctgaggcttgtgcattcatcacatagttctcgtgccatggttttcagctccatcaggtcctttaaggacttctctgcattggttattctagttagccatttgtctaattttttttcgaggtttttaacttctttgccatgggttccaacttcctgctttagctcagagtagtttgatcatctgaagccttcttctctcaacttgtcaaagtcattctccgtctagctttgttccattgctggtgaggatctgcattcctttggaggaggagaggtgctctgatttttagagtttccggtttttctgctgttttttccccatctttgtagttttatctacctttggtctttgatgatggtgatgtacagatggggttttggtgtggatgtcctttctgtttgttagttttccttctaacagtcaggaccctcagctgcaggtctgttggagtttgctggaggtccactccagaccctgtttgcctgggtatcagcagtggaggctgcagaacagcagatattggtgaacagcaagtgttgctgcctgatcattcctctggatcttttgtctcaaaggagtacccggctgtgtgaggtgtttgtctgccctattggagggtgcctcccagttaggctcctcgggggtcagggacccacttgagggggcagtctgtccgttctcagatctccagctgcgtgctgggagaaccactactctcttcaaagctgtctgacagggacatttaagtttgcggaggtttctgctgccttttatttggctatgccctgcccccggaggtggagtctgcagaggcaggcaggtctccttgagctgcggtgggctccacccagttcaagcttcctggccactttggttacttactcaagcctcggcaaaggtgggcgcccctcccccagcctcgctgccaccttgcagtttgatctcagactcctgtgctggcagtgagcaaggctctgtgggcgtaggaccctccaggccaggcgcaggatataatctcctggtgtgccgtttgctaagaccgttgggaaagcgcagtattagggtgagagtgacctgattttccagttgctgcctgtcacccctttctttgactaggaaagggaattccctgaccccttgcgcttcccaggtgaggcgatgcctcgccctgcttcggctcatgctcggtgtgctgcacccactgtcctgcacccagtgtccaacagtccccagtgagatgaacctggtacctcagttggaaatgcagaaatcacccgtcttctgcgccactcacgctgggagctgtagactggagctgttcctattcagccatcttggctcctcccctcgattatgaatttacttctacagtgagctttatacattcctgtgtttcatgatagttgttattgttctttcatttccaggtgtggcactcccttaaggattttttgtaagttatgacgaattccctcagcttttgcttgtgtgcaaaagtctttttttctcctttatttgtgaaagacagcatgctgagtattgtttttttggctgacagttattatcacttaacactttgaatatattatttcattctaccctgccctgcaaggtttcttttgagaaatttgcttgtagtctattagatattttcttatttatgacttgacacatttttcttaaagcttttagaattctttcttttgctttgacttttgaaaatttgattataatgtgccttggagttgagtctaattgggaatctttttgcttcctggatctttgtagacgtggcgagttttcagctattattttgttaaattagttttctgtgcctttcttcatctattccccatctggcatttgtataatgcaaacattcgttaacttaatagtgtctcataaatcttgttggctatctttattcatgcttattcttagtcctttttatctgactggactatttcaaaatacctgtcttcatgttcaaaaattctttcttatgcttaaccaaatttgttattgacactgtcagtcatattttttgtttcatttattgaatttttcaactccaagatttctggggtttttataattatctctgttgaatttctcattcagatgatgaattttttcctatttcattgaattggtggtctgtattttcttgtagctcaatgagtttcctaagctcatgattttgaattccttttcaggaattctatacattttatttttgggagggggtctgttactaaagaattattgtgttcttttagaggtgttgttttgcttttttatgtttcttgtacccctatgttgatatttgtgcatctagtggaatagtcatccttttcaattttgtgggatagcttttgaagggagagacattttcctgtagatgagtcctatgatgtttgttgagaatggtgcattggcttttgttctgggtggacccagtaacatagcctctgtgcagtttcttcagctgaaaactttgtcagtgatagctgtgattatgccagtgacctaggctacatgagtttgtgatggcagtagtgaagttttgccgagagctgaaggtactgaactggtggttgggcttggtgcatttggctactatgggctggttactcacaaggctttctagtggctggttcaccagcaggctgactgttggactggacatgtgcaggtacagcaagtcagccagctgtgtgtcaccttccccactatgcaggtctgcctgtatgggggtaagggtgttggatggattttaaggcagcatctcagctgttccactgagcctaggctctgagtagccagggttgtggtgctgtaactacccatgtgagtacagtggtatgatggcagtgtgtcagaaatggagaggtgcaatggctaccaccctccagagcagcatgtactctagcagttgatccattgttaagatgctgtggtgctgtagccacttaggtcacagtggatggaggttgcacagtggagagtcctactttggggcagtgcaactgcatgactcaactccccaaattgcattcggggcctataaagactgcagaactctctggcagcaaggactataggtgtgtgtagcagtaataaggactactgggggtatccagcttactttctcccttaaaaataaaatcactcctggctgcaagttaatcccagtagaggagataatgtggcagaggtacggtgctttgctcctctctctgtggtgctttcctgggtttccatgttccacagggatcttgccactgccctagtgatctccattgtatttcctcagtcactccagttgaaatatagatgtttgttgtttgcatccctttttgtggggagataagcacctggcaactctagtcagccatcttgctgtttcattgtggtaatagctgagtttcaaaggactcatcaaatcctgaaattgtacacagcccttgtgtgttcacaaaataaatttgcttagaacttgtaggagtattcatatatcaggtatgtttggaccaatggattttgttgacatagtcagggccagaaaacacctttacaggctaggaagtattacacagcccttttcacacatgtgtgagtaaggctggtctcactgtcatatgtattctccagttggaccttaagtaatggagagattaaaggccaggttgactttccactattcccccaactcactaagacagtggatctcaaaaatatggtcctgagatgaagagcatcagctgtggtctacttgttagaaatgctaactctcaagctataccccagagctactgaatgagaaactcagggatagacctcagtaagctgtgttgaagcaagacatccaggtgattcctatgcgaaccactgacccaagacaatgatagcaaaatcattttgccacaaatctcctggtaactttcaaatgagttcaggctcagcttttagtattttgctgcaacataaatatagctaacatatgttgagtgcttactctctgtaaggggctgaactaatcacttgccctgaataaatgcatttgatcctcacaacaaccctattaggagggtacaggctggctggcttccttccttccttccttccttcttttgctgtgtcatccagacttgggtacactagtgcgatctcagctcactgcaacctttgcctcccagattcaagcgattcttgtgcctcagcctcctgagtagctgggattacaggtacgcaccatcacacctggctaatatttgtatttttagtagagatggtttcaccacgttggctaggctggtctggaactcctggcctcaagtgatctacctgcctcggcctcacaaactgctgggattacaagcatgagccactatgcccagccaggcttattactttcattaacagatgagcagattgaggcacagagtggtataataacttgtccaaagttccacagagagcacatggcagagtcaggatctaaatccaggcagtcttcaccacactctatgacttctatcagtggactcttttccgaaactccacggcacattgttatcacaatgagagggaaagagaatggggcaatagtttccaggtattcctctcctttttggctactggatgctccactattccctaagaatgctccacaattctcctaagtctctgaccattcgctgatccctttactaagtcttctttcacctggtcacttagattcaaacctgttgactcccccacagtttagtccttttttttatgttcacatttctgtgggaaattccacatttacagatgtcctacatatggtttaaatatttgcttcttttcagatgacccctaaatctgtacttgcctcaaactgtcttctcaattccagtttcaaattcccagcagcctgtacttttcctcatggggggtctttgcatcacttccacttccttacttgctgctaaactaatgtctcctccatcaaacttccagagatttctcccctaattttccttatggggccaccattctcctagtcttcagggccttgctttcattcaggtaccagttgtcttttttcacatgaacgaaaaatgtttttgccacccccggtttttccatgttacaaaggtctctggcacaaaagaattaggcttataacttggcccattcatttaattaccaaaatgtaaagttagtatgcaagatgaggcatgatgtagtttagctttaatttcagaacacattttaaaagattagacaggaatggcctttaaaaagcagcaagaaggtaagcaacataaaggccagtgcaactaagaggcatcttcagtgacaacaccagggaaaacatgactttggttttcattaatgaccaatttcattgaacaaggaattggacattatagcatttataaacaaagcacagttataaattgctattctaattgttaattagttgtatttatactgtagattagttttttaaatatatcctctagatgccacttgatgctaattatctgagttacattattatcaattgaaaaacattttaattaagtacaaagctatttaaattagcataagacttatagaaattcaaatatggtttgatgcttaactttttttttaggactacatgagatggtacatctaggcttttgaatttgatgaaactctactgcaacgtggcaaatgataatttcagtgaaaggggtgggagtgttcttagtgatgttcactcattaaatgtgtatgtctgtcatatgtattgtatatgatattgccaaatcactgctacaggtgccacaaatacactgtgatgattaccactgttcctgctctctatgggagctctctgtctaatcagggagatagatacacttggcagatctgggagcccaagaagaaaacaagctacataagaagtatagaaacaaagtgcctataaaatccagctgcggttgggtgtagtgggagagagagagtttagaaatcttcttaaactttcaattaggtacatttgaactagattttgagtatagatgaggagggaagaaaaatatagtcttggcttggtgaatggagtcagatgtgtttatcattcgggtctcacttggttgtgatataaatccaattcaaagggagaggcaaggaaatttattgcctcatgtgattgaaaagcccaagagtagttggctgcaggctagcttcagtggctcaaataatgaaaccaaaacttagtctctctctctttcttttaatcatgtctcagctctattttctaatcttgtattctgtcttcagctctgctggtgagcagaaaaagtggttatcatcctaatataaatacaacgatggcctgagttttattctgtgtggactgtcatggaccataggtccatccttgaactagttagtcactgtgatcaggatgatatagtgtgctggttagcaaagcctaggtcatattcccactgctagagctagggttggaatgactgagagtgaaatagagcacttctccaaaggaaaattggggtgttgttatcaggagagggaataggtgctaggaaaaaaatgcaaatacttgttatagtagtcagatgtatgagcatagaaaatcatgatggttggatggttgtatatgagacagtggaacccaggcattgtgaagggtattagtggaaaatacttgataagttgtctctcccttgcttgctgagctcctaacacaatggtaccaagcatgtttttacctcctaacatttttacttactgttccctctgcatagaatcctcttttccaagatgtactaatggcctcttcctttgtggctcaaacatcgccttatcaaagaggtcttccctgaccactttataaaaacagcatgttcccattatcactgtctacatcaggaattggtcaactatagactgccaaatcaggccaaaaccactgcctagttttgtaaataatattttactggaacatgatcacactcatttaagtctgtctgtggttgcttttgcagtacagtggcagagttgagtagttgagacagagatcatatggcccagaaagactaaaatatctactatctggccctttacaaaaaaaaagtttgccagttcctgatctgtgcctccattctgctgtattcttcttcaggctagttatcacaacatgacatgatgtatatttgttcattttctttctatccttcctcattagaatgtaagctttatgatagcaggaagttttgtctcatagacttagaatagcacctggcacataataactgctcagtaaaatttgttgcatgaatggattgaaagattttgaatactgaaatgtctcacaactcacctgacagtgtagtaaaaagaagcaggggagagcgtgcccctaagttgcaagaatactgtaatacattcgttaaagattcataaaggcctaaactaggatagaaagagaagagagaacaaatagacacgataccttgagatagaactaatgaaacttggcaagtaatttcatgtggaggatcatggggaaggaagttggggatacctctggtgctgttagccttgtcagtcagataactgtgacatcattaacagaaatttataggagcaatggcagatttgggattggagattaacagttcagctttagatgtactaggtcttggagtttgacctctgccttggagaggtccactgcccagtgggagaagccaggcaaaaagcccacaagagatgactggctgaggagagggatcagagagtctattcacgtaacttaaaacagttggaagtgccccaaagcaaatactcagcaaaggtcgttaactagagcttcacccaacagcacccagccacccagcccatttctttatctgaagaaggctccaggggtggtttacagggccatgattgccctccctggtacatcctcagaagtccagggccctatcccatgttcctgtgcttttcctcacccactctgccttttaccatgacaaggtgaagcaactcaaaaggctttagaatgcaacaaaacttagttctgtcacacttaccagccacgtgaagttggccacattgttcaagtcacatggacatcacttaaatgtattcaggttctaaataaacagtctctctccttcctttctctttgcttctttttccttttttctcttcctttctgaagtatttcatcagtacgcagaaggaagcatgagaatggctgaaggattatattttagagtggaacatggtttctcagatagggtagtgaaaatagaatagtccaaaccttgatgcctgggaaatgagagcctacgaatctaatagtaacatttgagtaataaatcctaaaactcaccagggaccaccttctgctcccagttatcgttagcagagataatctgctgggtattcaactgtttagaaagaattgctggttgtctagttcttctgtggcacctcatttaaaagctggtttattatttacaggaatacaggaataatgtattagatcataaacatacagttcccataaataatgcagcaagaaagccaaatataaaagtctcagatgaacaactgaacaaccacgacctaataaaccagagatacttaatgagaaaaagcaaaattctacaatatagaaataataatggggtttcatttgaaatgctacagggagtacagcactcataattctcaaaaaaaaaaaaaaaaaaaagagccagtccgaaaacctaggtgatttcactgcctagtagcgcgcattcacccactgatgtctgtaggcagcataagctacagtggttcggttttcccctcgcaagcttgaggggtgaattcctgatgcagaaggaaaaggcatttgttgggccccacacagttttccctttggcaagagggaaatgtgatttaatatgagcatcgtagatttatgcttctgtgtaaacttccacaaccatcccaagcagcattgcctcagcagaccttcccagctgctcagccattgcagccctcggtggtgctcagggagagtgggaaataagtaagttggggatgtttgtcagctttctagtttgattaaagagttgatgacgttcactgtgtggccgctttgaagagagccaattcctttttttttttttttcttctgagacagcgtatcgctctgttgcccaggctggagtgcagtggcgccatcttggctcactgcaagctccgcctcccagcttcacgccattcgcctgcctcagcctccagagtagctgggactacaggcacctgccacgacgcccggctaattttttgtattttcagtagagatggggtttcaccgtgttaaccaggatggtctccatctcctgacctcatgatctgcccacctcggcctcccaaagtgctgggattacaggcgtgagctgccgagccggccgaagagagccaattccaacatttaacaagggagggagatggttttgtttttctgtttgcggaactaacacaacttggatttctctatcaagccatagttagtgtgttttcaagcatctgttggcctgtttttattgtcagagttttcttctagccagttaataacaaggacagagtattttcaaatgaggagataaacttctgtcaggcatcttcaatgtcaagatctagctatattgtctcctttcctattaattatattacgcttgtagaacactcctttaccaccaacagttacctgagtagaattttttctttttgcttttccagcagaggccaaggggaatgttggtattccaccgtgataccaggaatttaatgagatgacaatgtgaataagaaaatctcagtgcacagaatagggaaggaaattaactttgttctcctttattggaaagacttgaatttcatttgcttatttgattgggagaaaagagtactaaaaatattctcttacgctccttatgcttcacctccttgcttgcactctacttttgccaggtactgccctttaatcttaactccttttgcaccgtcttccctgggaacagtggttaatggggtaagggttaatccaaacaaaggaagaaaggagagacagaggagaaaatatccagtcttcttcaaagtacagaatagaagcaaaattcaaagtttctcccctttagaacagtagtatacgtcagcagaataagtgagtatggggtgtgggcacaaactgcctgggttgaactcctggctctaatggtacaacactgggtaagtttatcaatctctgaaagcctctggtttctcatcggtaaaacagggttaataagagcactacataattatgtcaagtactcaatgtggtgctaggcacctaatgagtacctgatatgttaatgcctgttgttttccttctacatattactgttgaacaccatttgtacaactgtcaccaaactaagttcagtgcagagatgtaaggacgtagaacaaaagttcctctttaaaagttctcaaataagttatattcttgtacgggtatcaaagcacatacccagtgaaatattaaatagtgaaaatgtttttaaaaacttgaacaaaatatacgatagaacttggacatgctgagaggattaagtagatggtaagtgctgaagacaaggtaggaagagatcaggactacagaggtgttcgggagaaacttcctagaggagaaatagggggaagtgtaatggatggggacagagtttgacttcgcaagtgcaagggaatgagaagcagcttcctatgcagcagcaagaacagggactatggtgtgacagaggaggtggaatgagctgccatcgttttttccagcaaataagcacatttggatttctttatggggaagagactgtcatgtatcagcatatagtaaacaggaattacttactttcccaaagactgaattaaggaatatctcagggttgtgctagaccctcccaggaactttcctggcagtgtactgtgcaggatgtggtggaaatgggaatgggaatatttaatattattttggttctgaaagtcaaagagaaaagaattatagttagacattatttatgttgcaagaactctcatggtttaaaaatgaaaggaagtagcatcaacaagaagcttcttgacattatttaagctgtagtgtaggcagttcttctttagaaagaaattcagtcacattcaacaaatactaattgagtttttactctggccagctgctgtgttgaccaaagggacactctgggtccctgcctttctaggatccacagctaagcaagaaagttagattttttttccccctttgagatagagtctcactctgttgcccaggctggagtgcagtggcacaatctcggcttactgcaacctccgactctcaggttcaagtgattctcctgcatcagcctcccaagtagctgggattacaggtgtgctaccaccatgcccagctaatttttgtatttttagtagagacggggtttcaccgtattgaccaggcttgtctccaattcctgacctcgtaatcttcctgcctcagcctctcaaagtgctgggattacaggcgtgagctaccatgtccagccaaaagacagatgttttaagcatttacgttaaaaaaaaaatgtgcgttatgggagcaaagtataaaatgctatggaaacataaaattaggagattagtttaaccaaattttacaagtaagggaagcctacctgaaagaagtgattaagttgagactggaaggattaattaatcagtccaagcgttggaagcactaaatgtggagtagctattttgagcatatacaaagtcctgttgaagcataaggaaagttttagaagttcaacacagagagtagagatggagtagaatgtccaaatataagagggaagagatctttattttaatagctgacatttcttaaatgcttattccgtagcaggtgttgttctcatctctttgtgtgtcttgagtctcaggacagacatctaagataagtttcattcttattttcacttcatgtatgagaaaactgacaaataggcaagttccccaaggttttatagcaagtttaagggtggaagtaagctctaaacccagacaatcagactctgaaacctgtattttggttttctttaaataattattgagataaaattcacatacacaatttacccaggtagaatgtacaagtacattttttgtataaagtgcctatacttttaacataaatcatgtaggagggccagccgtggtggctcacacctgtaatcccaacgcttggagagaccaaggcaggtggattacctgaggtcaggattttgagaccagcctgaccaacatggtgaaactttgtctctactaaaaatacaaaaattagtgtggcatggtggtgggcgcctgtaatctcggctacttgagagcctgaggcaggagaatcacttgaacccagaaggcagaggttgcagtgagccgagatggcaccactgcactccagtctgggtgacagggcaagactctgtctaaaaaataataataataataataataataataataataataataataatttagggaaggaaagtcatatcttttcttcaccccttgcaagtctccataacaaagacagattttttttttgtaaaaaagaaaagcattgcaaatttaataaacattttctatgacatgagagccttcagaaatgaacaaccaaagaaatggggaaaaccgtatttttatgtgtaggtttgatgaagagtaggacaatcatgtagaagtatgactggacaaaggggggtgtgagctaatggtaatgaactgggagaaacttagcaagacctgttttttctgattcttcttggcatctctttgtcttcattcctttcctctgggtatagagtaggacgaaacctattacgtgagtgtctctgaggaaagaacggtgggagaagatcagagggtgacttttctaggttttataatcagcttcaggggagaatgacgggagcaagtcagagagtccttcttgcttctgctgttttctcaaatgtcaaggagccatattttggggtagcatgtcctgaagcccgacagtcacatttacatagccacaaatatacatatatatttttgtattgtatgttttatatgtatatagtatacatatatatttgttgtattatatgatatgtgtgtatatatgtgtatacacatgtacattagataaatatatatacatacatggatccttatatacgtgtgtatgtacatgaatctcttttagaaaaccacagtattgcagtgggcactgtgtgtcacgttcaggcgttcggacttttaaggcaatggggatgcattgaagggcttctgactggggaccagcaagatctaatttgtgttttacaggacaccgtgatgaggatcagccagggatgggttggacagatccagaatcatgagcccaaatacatccttgacatctatgttcagtgttttaattcaaaacgagatttcagaaaaagagtcgtgcagcctgctctataagactgtagcactgacaactcagattgttcttttctgactcagcccaaagaaaagaagctgagcatatgaggaagggcaggactcttccagttggaaagagcacaagcatatccaatgagttctgaacacggtgcattgttcttcccactcagttgcttgatgtgagctgatcagaggtcaaagcacatttaaagtacttgtattatatcatgggcttgtggaaaagattgcatttaactaaacaaaggaaagagccgatatgaaatcaatatgcagggtgcctatgagctatgaaggaaggtaatgtgcttttcttctttggctgttaaatgcatctcagctgccaaggaaaatgactttctctcttgacttcctatctgtctagctgactggttattggagagtattcaggccctagtggttcaactgtatgtttaatgagggtgtcccagcacaagagcctaagcaaggtcctctggcctaattcttcctccaaggactctgaagatacatctctctttagcaaattgtgatcaaagattgctggtggagcagagaaagggtccagggccttggtcttgtacggtgcaatctctcccatcattgggaacttaggctgcaatatgatgtctgagaaatgtaccagagagactcacctggaaatatcccagagaattaattgcagacacaggaatttcaaggagaggcctccactgagaagtggaaatttgagttagttcttgaaggatttcagtgggtgaagttggggaagaagctgttcccacttcttccccacttcaataactttgatgttattgaaggaaataacatcaaaaaccactcttgggccaggcgcggtggctcatgcctgtaatcccaggactttgggaggccaaggcgggtggatcacgaggtcaggagattgagaccatcctgactaacacggtgaaaactcatctgtactaaaaatacaaaaaattagccgggcgtgttagcgggcgcctgtagttccagctactcgggaggctgaagcaggagaatggtgcgaacccaggaggcggagtttgcagtgagccgagattgcgccactgcactccagcctgggtgacagaacaagactctgtctcaaaaaataaaaataaaatataaaaataaccactcttactcttgtggtacagccttgtaacaactgaagtttacaaatttagtcctgtcttctgaatgagggataaaaaatgaattctagagtacgagttgaattaactttttttttaaaaaatgatcactttcctcattctctcctcatcctttttctaccctcttttcgtctgtgattcctagacagaaaaatgatgcaagcgagaaaggccaagtttgagtcaagtctgctaccacagattgcaaataggctgataaagcacaagagctgacacatcctagagaactgacatgtgatcacatctgcatggtagcattagttacaaccagatacctgcacatttgcctctgtcatttgatttgattcctaaaaccatccttaaaggtactcaggatatgggttggtggaagataaatgaaaaaacaataaatcaccttcttagagattaagaggatgactcaggctagcgatggcacctatgcctctcagtaatagcagttaggcccctgctaggaacaagccccctccccagcaccataggaatgatgcagaaagttcttagagactggctatgattttaggacattggcagtgtttcttcactttttttttcttgtcatgggtgcctttgtcaagctattggaactacaaatcccttctcaaaattatatttttaacagcattaaacaaaatgtccaggattaccaaagaaagctaattagatacagttgccaacacattaaaaaaaagtcgtgataaaataatgtatgtttgtctttgataactaccatcatttcaaagcagcagagaccataaacacgattttgagatgtatgcaacaacttgactaggataggaaataatctgtgagttctgttggtgacagagttccagagtgatgattattatagattattttctatattctcatcagaggaaatgctagattccagttagaggttaatgaaaagaatgatgtaaaatctgccccttcagtgatcacaaacccactgaattctatctgtaaatctctggggtccattgtcccaggtgaggctccctgtcctaatgtcctaatgtaagtgcttacttagtgagcacctattatgtgcaatcactatgataagctggggattcagctagagtataacaagaataggacatgattgtaagccctgacatatgtctaggttgtttgatgcttaatatcatggaccggatgaaaggaactcctgtttcatgtggagcctatcattaaattctgaggatggggttagtctggagttggaagcgggggtatgttacaacacactagggccaaacagtgattctcaacagtggtgtgttgataggagtgggtggagattttgacccttagagcaatacttgtcagtgttgagaaacatctttggcacaatttggtgggggtggaggtggggggttgctactgacatctaacggatggaggatagggatgctacacagcatcctacagtgcacaagacagccccctacaacaaagaatgatctggccctatgcagtagggctgaggttgagaagccgtgggctagaggaaaagtatgcagagcgctgactgcagcgcccctgtaaataacctttgtgtccctggttttgtgccctgcatccccttggaaatttgtatgtcctcctttctcattctttgaggttgcagattacattctttctccctctgtagtgcccggtgtcaggccatgcacacagcaagtgagcaattaatgttaaccatgggtaagtatggcccagctatctctctagcctgagcctggtcacaaagtattgacagaagcaacaaactcaagatgagagctctccagcagaaagctctttggagtggggaagacagaagtgatgtgcatagaggtttgaatctctgcctcctgttcagagcagtgtgagcacaatgacctatttttgttggtaagacaagtcgacttctacttggtgcagcataacttttgcctttcatataggatggatattcagtttccttatttatgtaatcttatagttgaagtagacttcaaaatggatttatgacaatgctgacatttgttaagcaaccaatatgtaggtagatttgttttatactctacattcaccccattacttagggcttatattttataatccactcccccccaccctgcttttctattgagaaccagagtgatttcttcagctaaaaaggcagctcttcttggggcaaaggataagatggacctattaccccaggcatttaaaatggcaaatgctaagctgtgtgttaagtttgagaagcacaccttgtagaccactacagtaacagaggtgtgatctcatagtttgatgtatttctttaaaattctgaattgtgcagaagttagtgacatttccttctcttcctttaaggctgctttggaccaatcctgaaatgatttttcaagttatgatcaattgccctgtgggagaatgattttagtggggtccctggatctctaaaagttctttgctctaatgaattaggaggaatgtcagcttcatccatttagtgagcttctctgtgagatgtttccatttgtcatgaaaatgtggaaggggtttttgcattgcctgagttagaaggttcagaaaaatgagcctgggcctattgatttgttagtgtccagtgtccctaaaattgggccttggggtagggttttttgagaactataaaaacagagagagagagcacttaacagacctaggtagacatcttacctttaatctcaaattaatcatacttactagcttactcttctgattttaatggaatcttcttataaaatgggcagcttctaaagattaaaagggagtctttatatgatccagagaggatttcctgagtggtgccatttatcactaacatttgtattttgctgtacaggttgaaaagctcactcacctcttatttagtcttcatgataaacctgagccttaggttggtggtggatgatgcccactttataggtacaggaactattcttagaacagttaaaaggctctacattcatatagtaagtttgttgggaaatccaagacaagagcctggatattagaatatataatattaacaacaactatgctacaatgtgtaatttaaaaaaataaacaatgagtttggagacccagattctgatattaatactactataaattaagcctatatcactgcttggtaatgtttataatcaaaatttgtgatatggaaagactgccccatcacctgcaaagatgaagtgtgtgttaggccattcttgaattactataaagaaatacctgagactgggtaatttataaaggaaaaaggtttaattggctcacagttctgtaggatgtatgagaagcatgatcctggcatctgctcagctttggggaagcctcaggaaacttacagtcatggtggaaggcagagggggagcaagcacatcccatggcaaaagcaggggcaagaggagactggggaggtgccacacacttttaaatgaccagatctcacaggaactcactgtcatgaagacagtacagggggaaaatactaaaacatttatgagaaattcaaccccatgatccaggcacctttcaccagaccctacctccaacattgaggattgcaattcaacatgagatttgggtggggacacagatccaaaccatagcaaactggcaagagccaacttggttcacttaccaaaatatggagtctgaaataccttgagaatttaagatgtaaaggaaatgcctttgttcaaattcagtaacccattgaaaacttcttatttagagaatgtttcttaatgtacaggagtccaaatatttatcttccattactaagtataaatcatacttagtttataatgagaacatgggctgggatttgtttttaaagtaagacatagtaaagaagtcactgggatctgccatccttgacatctttgacaagtaaaactgatttacatttcagcagaaagcatcatcatgccagttttgttttctacttctgccattctaatcaccaaacctcagaaaagaaataactagttttacagttgtctactcaataaaggggctgcatgcaggcaccacatttgatttggtagggaggaagtgggaggggatgggtgtctgtgtgactgaaccacaggataccttcctgacctcaaccagattttaatatcaagtcttagtgctcccacttaactagagttgggatcatagcaagtcagtaacctcactgcaccttatgagtgcaatgaagatatcaacactgcattcctagatagtcactgtggaaattaaataagacaacccatgtaaaatttatactcagatatattaagttctcgataagtgtaactatgtttatcatttaaaaaattaactctcaaaacttcagtttcctcatctgcagagggaaatgatgagagtatctaaatgttgttataatgattaaataaaatagtataggtaaagtgattggcattggagtaaatcattgttcttgttagaatcttgaatgttaccattcaaggcaacacttgaatgtatgctcatgcaaaaacaatgttaaaaaaattcttactgcccgatgacatgtcaacacgcacagacttgagcaggattgctgatagtactggggacataataaggtgataataaatgggaagaaagcaggaggaccacagaataatgagttcatgctttggaagaatatttttacaaggttatcttgcctcttgtagagggcaatggaaaaaaatccccccaggaaaatcagtaatgtcaaaaccatgaagtacttttctgcaattagaacatgtcatcagatgtaaacaagttgattggcccatgcaggcaagccatcacctttttatttgttttcaattccaagggatgataaggtagaacagctaagaggatacaaagatgcaataatctaggccagggatcttttacacaaagggccagatagtaaatattttaggtttatggaccacagggtctctgttgcagctactcaacttttccattgcagtgggaaagcagccataaacaataggtaatcaaatgaatatggctgtgttctaataaaactttacttacaaaaacaggtagtgagacaaatttggcccatgggttctagtttgccagtccctggtctaggctctggttttgagactttttcttttttttttttttttttttttttagatggagtttcactcttgttgcccaggctggagtgcaatggcacgatcttggctcactgcaacctctgcatcctgggttcaagtgactgtcctgcctcagcctcctcagtagctgggattacaggcatgtgccaccatgcccagctaattttctgtatttttagtagagatggggtttcaccatgttggccaggatggtctcaaactcctgacctcaggtgatccacccgcctcagcctcccaaaatgctgggattacaggcctgagtcaccacgcctggccctaagaccttttcatcatttagtatgtgaagtctgatagcaaatacaaatgccaaagactggaaatctaaactgtgagaggtataagagcatgggtttattcaacattaaatcttcagcatctcttatagtgcctgacacataacaggtactcaataaatgtttggatggatggatgaatggatggacagatggacaaatggatagatggacaagcaggcaaactgacactagcttatgattccctgtttctaaacaagaacatcgtcacagtcaacaataaattaacatttattgcactcttactgtgtgccatgcactattctaagtgctttgcctgtaatatctcattgatgttttacaataacctatgaggtagatactgtcatagaccattgggttttagtaataacttgttgtcctcaagttgttagttgcttaatcttaaatgacttattaaagcttatcttccctggttccttctattaatagatatttatgagaatttaaagtacatatgaaaatccctataaactctaaagtgacattcaaagattaaataattgttgtttcagccctgctctggtgagcatggacccatgaaacagtgctggatagtaagatttgacattaggtgtttataggcccaaatggctctggacgaattgggagatcttagggcacattgtgggacctaaatattactactattgttcaacattatatccttagaacctaggtgagtgcctaactcacagcaggaattaaatatatatttctttataagaaaacaaaaggagggctaaataaactaacaaacagagaaacaaataaatgagaaaatatacctgccccagccaaggaagggcaatatggtcatagatattctgagtcttaataggtcctcccagaaactgaggtatagatcactatgtaaaataatggaagatgtctaatctacttactgctgccttgaaagctgagtcattttcataatgggtcagaaagacatttttcaggacaacttggtaattcatctttatttccttgtatacacagtacattccacttaaaaagagatgctaatgtatttacattaaagcatgtggatttacagcctgggatgaaatatattcatagatagtataccttaatcctgtttagggaaatcgaagaatcaactggcatcagattagtgttgattaactgtcactcagattgacaaagcagcacaagatacacttagcaaatacccaaatcgagctaaaaagctctgcagatacgggttttgacacttgcttttttttttttttttaaaaaaaagataattggttcaacatctaagaacatactctttggcactgactaattcagtcttcatagacgctatttttttttctgtttgtagggatagaggaaaaaactattaaaggctcacaaaatgtgcttgcctctggattggtaagcaaagattgggagatactagatgcccttaaaagtgtcttataccaattcacgttagaagaacaccttttagcgtacctgtttttacaacttttgcctggtattgaaaattgactagcttctgctatcctgtggatttccatttcctattaagcaggcatttaaaattgagtcatacaggagtaatggtcactcttcaaaatggacttctttgtgagctctagggaacagttcttcctgctttagtgatgtagactgttagggacagacagtcaagacatagaagcctctaccctgtgagaaaaataatgaattatttagggtatgtctaattgcaagtgacacaaagcaaaattattctagttttttaaaaatttatttaaaaatgggaatttgtagacttatcaatcactgagaagtctagatatgaccatccctggtgcttttaacatctttctctcttgtacaggtttcctttaggcagttcttcagcagacattatctcagaaggagagacagaaacaccttcattcaggcagccatagcaatctttgaaaataactgattaaccctgcttgggtcacatgcccctagaccaaacactctttctaaggagtcagatattctgattgggcagcctagatcacattcccttctgtatcctgggggtgggggagggccaagtgagcaccagccccagtaggtttctgcaaagcaataagtgttctagtatccgaaggaaagctaaaggatgttgaataggcagagacattgtaactatcccactttcctcctttgtctcatatgcagataggacaccttattttgaagacctttctttggactttgtttcttgctaagtctggaaggcttgcattggtcagtgagatggttaaatgaagctttattttttattgacctgtcttttcttcatagctatattttctaagcctagttataccaagctagagtttgatgcctgttatgaagcattggagagaaagggaaatgggaactcaagacttacacttgccatggtttgggtttatgtaacaaagccagtgacctgcaaagtctctaccaggtttcagaggccttcattcactgaagaactgccttctgagtggcattttcccttcaaagaggccaagctcggttaaagctactatggcacgtgtacctttagaccccatggagtgtcaaacatgggtatatggagatgggggaggcatatatgatcatggagacatgtgaaatgttcattttttgcaagaaacagaatccaccccagctaggtcatgggaaaacagagtattcattgcaaggttgtgagaagacagtgcaggagcaatttatatacgttcagtcaagcattatgagatcttgcagcttctagaatcaaggtgttccctctgcctctcaggggccatgtgacttcttttttctctgatttgctttctcacattttctcatggagattacacctcttgcacatctttcaacatggctgccagccccaaacctatgtttggaagttaaaagtgtgaagtcagggactaggattctcagtaagtgttagttattattgtcaagtacctgttactcactgacgatgtgcactgtgtttagtttcagttctcaagctagaatctgattggtcaggtgtagacaggtagcaactcaaacaggactacctaggtggccctttaacagaaaagcagttgtgagtaggatgtgcataaccgaactttattattccatggtggtcttttcttgatgaagagattgatggaatctgactcataactcccaaactcatgattgaaaaagtaacatgtttagcggggagttaagaacatggcctctgcagctagatttgcctgtgtttgggtcctggtccccacaatgatgctctgtgaaacctttctgtgcttcagtttctgctataataatatcatgtactagggttgcagtgagcatgaagtatgttaactcacaaagtgctttaaaaaatgtctggcaaatagtaagcactcaatacatgtcagcagttgatatgacttttattacctaaatctggctctgagctcccacagtaatctgctaggaaattccatctccattatcactgggtcgttcaagaattgacaaagcgtacatggtgtcaagaaaacgtgggcaggcctgctgctctttggtcagttaagatcatctctgataatttcatttccctagcctgcagggtcatttaaaatgcacttactctctacttccacaccacagagagggcacagaaatctttgctgaggtgtgggccaagggtactgtcttctaggggcatgacacagccatcctttctgagagatggtcacctccctagtgataactctggtcttccaaggaccccagatctctaaatttttctaagtgttctgattcttctaaatctgtcttctcttcagctttcttccaagtcactcctctctcctctcttccccacaggacaacgagcctactctccactaaggttaggtgtttacagatggcaggaatagctattgctttaaggcagtttctgcttttgacccaatgagtaccttctgttataaaactccaatgcgtcactggggcctgttggggtggggtgggagggtgagcaccaggaagaaaagctagtggatgctgagcttaattcctgggtgatgagttgatctgtgcagcaaatcaccatggcacatgtttgcctgtgtaaccaacctgcacatccttgcacatcctgcatatgtatcctagaaattaaaataaaacttgaagaaaaaacaaaggaaaacagcaacaacaacaacaacaacaacaaacctcagttgcattttgctgagtcagagaagccagacccagaactcttatctactgaatgattctgtttatatgatttgatagaaaacacaaaaccataggagaatggtggaagccaggatttggggctcaggggatggatggaatacaaaacgggtagcatgagggaatttttggagcgataaaattgggctgtatttgcttattgtggtagatacatgacgcatgtatttgtgaaaacccacagatctattaatatgcaccacaaagagtacattttcctttatggaaacaactaaacaaacatcaaggatatgcaaagggccttcccacctgcttgaaatggagaggagaggaaaatacagaaacacaaattgatgttttaaaaaattactaagccgcagacaaagctaaagagatgggttatgtcagattgtcatattaaatagcggaacttcctggctggatgcagtggctcatgcttgtaatcccaatgctttgacggctgaggtgggaggactgcttgagcccagaagttcaagaccagcctgggcaacatggtaaaaccctctctctacaaaaaaattttaaaaattaaccaggaatggtgacatgtcccggtagtcaagctactcaagaggctgaggtgggaggattgcttgagttccagaatttgaggctgcagtcagctgtgatcacaccactgcactcagcctggatgacagaccaagaccttggccctaaaagtttttttaaaaatggggctttctgacatttatgcagccaaaagacacatgaaaaaatgcacatgatcactggccatcagagaaatgcaaatcaaaaccacaatgagataccatctgtcaccagttagaatggcgatcattaaaaagtcagggaacaacagatgctggagaggatgtggagaaatgggatcacttttacactgttggtgggactgtaaactagttcaaccattgtggaagtcagtgtggtgattcctcagggatctagaactagaaataccatttgacccagccatcccattactgggtatatacccaaaggattataaaacatactgctgtaaagacacatgcacacgtatgtttattgcagtactattcacaatagcaaagacttggaaccaagccaaatgtccaacaatgacagactggattaagaaaatgtggcacctatacaccatggaatactatgcagccataaaaaatgatgagttcatgtcctttgtaaggacatggttgaagctggaaaccatcattctcagcaaactatcacaaggacaaaaaaccaaagaccacatgttctcactcatagatgggaattgaacaatgagaacacatggacataggaaggggaacatcacacatgggggcctgttgtggggtggggggaggcgggagggatagcattaggaggtatacctaatgttaaatgacgagttaatgggtgcagcacaccaacatggcacatgtatacatatgtaacaaacctgccggttgtgcacatgtaccctaaaacttaaagtgtaataaaaaaaaaatggggctttctgttgcaggacacagggactcatcaaaggttgtaaacccagccaaaaatctgtcacactgggctttgggcagttgatttgactgcactaaactggagtgattacaggagaaaatgaagctggtagaaagctatttcactgagaccatttaactacaggcttactcgtttacttacttactacttactggaaaagaagttatccagtattgcagtggtatagctgatactaacagctcatatgtctcccctacagaagcttctttttcattcttcagtttttctggcttaagtaaaatagaattcaaaatatctgagttcctgctgcttgtctagaaaagtacaaagactcccataacagggtccttggctttaagtagcttattttgtggagaagtggagaaagcaagacatagtcaatgaagacaataaaatacatgctcatccaagacataagttaggtattatggaagcacaacacagggagcaattggtgataactgaagggaaaccagggaaggcttcatgatggaagtggcatttgacctgggccttataggatttgatgcactatggggaacaaaaggaaaggaaaagtactttctggctgagaacactgtaagcaaaggcaaggacatgggaaaacccagccccactcagcagtcagtgaaaggtacctcagtacatgagagcaaaatgtccagctaaataatcactaaaaagtgatttttaaattttggtcaactggcttactactgcctaaaagctttaagtgaagaacatggccatatggaaatgtcagtttacttctctttccttcatcttggatagaatggtattaaactttaggcagattgagcaacaaaattctcttaaggggtctcaaataaataataagtagggactgttttttctcccataaaagtaaggtgatatggtttggctgtgtccctagccaaatctcatcttgaattgtagttcccataatcaccacctgctgtgggagggacccagggggaggtaattgaatcatgagggcagttaactccatgctattcttgtgatagtgagttctcatgacatctgatggttttttaaggggcttttccccattttgctcagcacttctctctcctgccaccatgtgaagaaggacatatttgcatccccctccaccatgattgtaagtttcctgagtcctcccccaagccatgctgaaccatgagtcaattaaacctctttcctttataaattacccgatcttgggtatgtctttattagcagcatgagaacagactaattacataaggccaatggtagacagttgctggcagcttcatggtatctgagtgaacatatctgaagtccccttggtctttttctcatggtcagaagatgagatgactcaggcagctccagatatcatgctgatattcagataaaaacactgaaactagccacatccttaccctcttgtggacagtaaaactttctcagtgctcctccccagtagacagctacctacatctctttgaacaaagtcatgtcatatgtccacccctagcttcaagggagtctgggaaagtatttagctggacattttgctcccataaataatactaggattttcttggccaggggaaagggggaaatggttgttgacaaggaaatgacatgctggccatactggggatgaagtcagtggacaaggtaaaaaattacataatcaaaattatctataaatcacctataaagcatgctcattttaaagctttcgtaacaggactgtattccgaaattaaatcatttaagtgttttaatgctttgaaaccttcaattctttgtccagatttctacttgctggttcttaattttcaggtcatcatcatcttcatctctcgtaaatgattttgtaagtttctccaattattttttagacagtgtttctctgtggtcctcaattaatgtttcaatttctttcaccataggaaggcatcaccacccacttgcctggccacaggaacagcgtgttctactttttcaaagaccaggaaattcttaaaatcatacactttttttttttttattttacatctcactggtatccattgaccatgtgagtcttgattgctgtcacactgtgagagacacttgagaactgaaatctccactgaggacacagcgtatcatggctcccatctcaccctcactcccaggtggaagggcaggcagaatcaatgttctttttaacttgatcacattgttcatatttattctctccctctccctctacactactggcctgattctggccacctgtcccactgaggtctggaggggagatatggatggagagccacattcacctcattcttaggacacacagtgcatcatctttgagaaccagggggtcacccttgagcacggctctctcatgatgatgtcaagcagccttctcagcttatcgctgatgctttgtttgcctatactatccttacctagaggctgccttgttccagaattttccattagtgttaaacacaaccagtgagttgaaattgtttgttatactgtgcagttttatttactatcaaaaacgatgtactcataagaaactgaaatgaagttgcttgctgcttggatggttccttttgttttttttcaagttttggcttaatgatacactgagcatgagttccggtctattggtttccagagtagagtttgcttaattaaactacttgtctcttcatatcttgccaggatgtttttatacgtgaatcttaaattgccctgcagtttcaaattctacacaatgtttaaaatgtgtactttgatggtattgccagttcagttaaattgttagagttttcaaaagagaatgtcttattttatcattctccattgttaaccttcaaattattgaatgatactcatttatctttctggctttactgtctattcttgtcttcatcactatcttttatcataataaaatatatctaccatctattttgatatgccagacatgtatagcattttatgatatattacactttaatatatatgtaatatatctcatatatacatatgtgtatatgtgtatgtgtatatgtatgtgtgtgtatatacacacatatatagtcactaatcctcacaataggtttatgagagaagtactactattattcccatttcacaaataaggaaactgaagctagaagaagcaaattaacttgtccagtatcatattcctcttcacagtcttcatggagaaccctgaactttaacactctgttttcagcattcacatgtgtcaaaattcccagcctagatgaacccaaacatccacattatgtatgcctgtgttcaggcaactgaacacatgcacctctgtgcagcctgtgccacgcagcaggctggtgcctatataaaagtgtggttactaaccaccgctaggccttcggtatctggtacccaatatccaatacccagctacctcatggtatttctcttgtcaaaaggttgtaactcttgctatattcatttcttcaccttttgcctattcttgtgcccacaacagtctgccttcagcttttgatagaatgtctcttgagatgtgtcttccatgttgccaaattcagtagacttttctattcctctccttaatttccagcactgtttaacacagataaactgttccctccttcttgaaatacatacttctttctcttggcttctgtgttaccccattcctggtcttctttctacctctattctcatgttttttttttcattttcctttgatggctcatccttccatactcaaaatttaaatgttggagtcccttaaaattctgacattggctctccttttacttttacattactctaaccattgcttggatcatatcacccttctcttagtgtccacacttatctacctgccagtgactcccagtaatagcacttccccagcaaagccttcgcaggtcctctgatgctaggctagcccctctgctcagtgttccatcagcttcttgtactacttcatagcatttacaacagtttctcagtcctttttccaatagtgctcttctgaggaatttttcttcaggcttttttctttttcttaatcacacccctcccatgaaatcttactatcatagatatactagatatccgtttatgtactatgtgaagtgtgcatttatatagctgtttatatatctatatattgctatacatctctagatatatatatacatttgtgctttatacataaatacagtaagatttcttttgcttcccaagaaccagtttttgcccccttgaagataacatcacccccattgaaaatgcatgatttacaatatctgttatttttaaaaatggatttaaatattttttgcaatatccacctgtgttgctacaataaaacttattaagagcaaagattatcttcttactgaacattgcctcagcattgtgccattcacataataggtacttgttaactatttatagacaacaaatattacaacaggcagaatggctgtagattttatgtgcatttttaaatttttttcttaacttgcaattcctaaataagaaagccagagcctattttcccccacaaaatcatgtctgacgtaggctctacataaatatttgttgaatgaattaattttatctgtactttttggataagaagaatctgtcctgattcctaaaaagaaaatatttggtatgtatcctagaaactatttgtaatgactacagatgttttgcattagaagtttattaaatgccagcagcagcctggggagacacaatgggattaaatcacctcaagtgactatttctactgaaagttactttctagcatctgtgtattgttcatgtctgggaagattttcagaagctgacagccaccttccctgtgcttaatcctgacacttgtggaaactctgcatcctcgttgatcactcagttcattttaaatctttggttaaacataacgcaactcatttccttaaaaagaatttttcactgcctattacttttaggagaaggccacaaattcatgttaggaattaaatacaaaaatctctgtttctaaggcatttcctgtggttagttgtcccataactcactcttctacaactaacatatgtgctgtagagaagactggtttgtaggaaaatgggtctcagatattaaagagtatttaaatatcagattgtagccatgtttactagcctggacttacagagacaaaaactatatctcacatatgttggaaatctttaaacagtgggagctacatgaagatacctttagctaaaactttggagtaaccagaaaattatcttgcacagaagatagtgttcattactcaaagaattattagtttattcataatttttcaaaaatattcctggtaaatatcatgggagattaaactttcattgtcatggttcttgctccttcctaagaaaaatatagttggattcagagcagcttcctttattaagtaaaggcaatttctattgtgacttaaatatcaaatactaaaaaagctggatattatttgtggagtataaagttttaatgggcatggctggctttgagcattaatcacttggctttgactgtctatttcatctcctcccgtgggccctgtgatcatccttcagtctgcttgtccagcacatcaccagatcccattagtttttctcttaaatatttcctcagccatccactcttctctatgcttactaccaatcatatgatcccatctaccaccatctctctcctggcttctctttattcacccttgccttccttaagtgtcttttccatgacataatgtctcagtcattctgggctgctatagcagatactacagactggatgccttaaaaaacagaaatttattttttacagttctggaggctggggagtctgagatcagggtgtcagcatggtcaggtttggtggggtccttcatgttggcttgcagacatccatcatcttactgtatcttcacatggtggagaaagagcactagtctttttctcttcttctgaggatgctaatcccatcatgggcactctaccctgatgacctcatctaaacctaattatttcccaaacgccccacctcctaataccatcacattgatggctagggtttcaacatctgaattttggggggacacaaacaagtaatccataacatgcagctacagtgatctttggaaaatgccaggttgatcaagtcagatcccctgcttaaaaccttcactgtggcctctgaggctctgcaatccctgagccaaactttctctctagtctcaccacatgatattcatcttttgctaagaatggcctagcagcatcagtcttttttttttttttttttttttttccaagacggagtcttgttctgtctcccaggctagagggcagtgatgggatctcgactccctgcaattccaactcccgggttcaagcaattctcctgcctcagcctcccaagtagttgagattacaggctcatgccaccacacctggctaatttttgtatttttagtagcgacaaggtttcatcatgttggccagggtggtctcaaactcctgacgtcatgatccgcctgcctcagcctcccaaagtaatgggattacaggtgtgagccactgcgcctggcccagtcttctttattaatgggaatttcccaactgtgaagcgtttccatagtcttttctactgctacattcagctcttgactacttcagttctaattatttttcaaatatcagcaaaacttcacttctttaggaaacttatctgccaaaccaggttgtgacttcaagttttatactttcaaagacatgtttcttttctttatcactactatatattttcatttctgagattaattactaggttttttggggggttttttgtttttttttttgtttgtttttttttgaaacggagtttcacccttgttgcccaggctggagtgcaaaggtgtgatcttggctcactgcaacctccacctcccgagttcaagggattctcctgcctcagcctcccgagtagctgggattacaggaatgcaccaccacgcccggctaattttgtattttcagtagagatgggatttctccatgttggtcaggctggtttcgaactcctgacctcaggtgatccgcccaccttggccttccaaaatgctgggattacaggtgtgagccacctcgcccagccaattactagttgtttaaaccaattagtgtacactagtggaggatactatattataccgtgagcttcttacctctttgcttcaccactacagcctcctgcttgatacagatttattaagttaattgaactttgggttcaccaacatactgtgctcctcttctggtacacagagtttatctgatcagttatatctagaaaataataaaataacaggagcggaagaaaccttaaagattatgtaatccacccaaatggagaaataatactaaagggaaaattgtcaaaggccatgcaatgcatctgcaaaattagaaccgaaaatcaggtttttggtttctcagtatttgggtgtttcaagaaacaaaattatttttcttccattttcttatcaccattctctagattgacttcctttctccattttataatctaatatgggtataaaactatatccttatcttgtcaagtaaaatatcattgttattaaagttatcattcaggttatatatacccaagcaatgtgaagtagaaaactgacgtttttacctcaaaccttattcatcagatattttaactctgccttttgaatctattgaacattttgccccaaggtttaaacccaacgatgatttttagttcatattcattaatacaaaagcactaatcataattatatcaatattaatcatgttcatcaggaaaaaatttaccaaagcaaactctgttaagctagtttaaattcttaaacaattttctaaagagtacacttaagtaatttctgatttttaaaagaacgcttcttgaaattcttacttttgagatcagttcttcatgtacaagaagtgattcatcataaattttctttatcaaatttcacggatgctatttgctgtcctagtaatttttgtgtctagtgtttctcccaaatccaatttttgtgtgtcacattttgcaaatctgtatttttctttcagtatttagtccacagcaattttaacatgtatatagttttaggtaattagtcatttttcataaaatttaattttctcaggtcagtctttggagttttaaagaattacgcgtttttagggctttgatgttttagttaagtttcatttttgctctctgccattttatctattacgagatttattttctggttattatttctacctattaaatgcagtttaaattggataaaagtctgttcctttttttttttccttaaacactgagaaaatgtttcgcaatttcctttcatagtacaggattattttttcttctcattagaaaaaagaggttgctaaaggcagttatctgcttagataagattgtacacctcataaaattttagatttggggttaacagtttaactctgatgcttatccctcatttaataattggggaaatccaaaaccagagatttttatctgacttgcctaagagcatagagataggactagatttcaggtctcttgacatctgggacactttgagtcaaaagtatgacaaaactgagatctggacttgaatatcctttctggagaggagaagctggttttttattacttatggcagtggagtgcatttgagattttttttttttttttacaagtttactccctacctgtgctaggagggaaaagagcccttgagctcatctttatggtgattcagaacactttagatagatcctgtcacatgctttataagttcctgattgattctatggaattaagttattgggcagagaaccagctaatggaaacacattgatgaaatcatttttgagagacattaaattgaacttaaaataaagctgaaatggctttatggatttttcactcaaactgtttatgaacatttattgccagtaaattatattgtgtcaaaagagggaatcagtaggtatggttttaatagaaacctttttgaaataataaaattgagaataattcattatctgagaaaacagagagaggatgggatggggaaattcatcctgaaggatgtttgtctactctggagcttctgggaaagtaaacaatggtgtgaaaatcagaaacctgatagcacttggaaagaaatggcctttttgaagagtattaatatctcatctcattatagatgtgaattgttttgagaagaaaggtgattgaggatttagcaagcattacttgatggtataaacattgatatttgctcatagctcataaaaagatgagcatgtaaaggagggacttaatctgctaagggagatagtctagaggagtgatcaaaggcatcagttttagaacagaaagattagagttcaaatcccacccctccgaccccttactcagtcacccctcccacttccacctagttgtgtgaccataggaaaaatttcctgacttccctgagcctcaaagatactaatagtctccacttcatagggttattctggtgatcaaatgaaaaactagaatatccagtactgtttctagttcatagaaaatgctttaaaaatgttatttttgaaaaagtcatggaagatctggataagaaggatgaataagaatcataaacattatataatattactgctggttgctttgtgccagagatctcattcagccttccaagattcctgggagataaaggtactatcaacacactttcttttgagagagggaaactgaatatcacagaagttgaacttcatgcccaaggtcactcagctaatgagtggctttgaaatcttcccctaagaagtcttatcaatgagtttgtcctccagtatgtggaacatatggacccccactggccaaagcccagcaagaacataatcaaagggtatttggttggacaatgggagctgagtgagtgggagttgagggagcatgagcatcttgttcttcacttcctttctacatccaaagcctgtcaatcatttgccaccgctgcctgtcagaacctatctccctagattttgctggcttgccattcagtgggcaccagcttagcctggcattgagaaagcaataatttaatactcccatagaagcatcagtaccatttggaaatgagtctagtagaagccttcggaacctaaagtcaacctggctatatcccatataagaccttgtccctgcctacacagagcttaagatctggatgacagaacaccacaccattcaaaagcatgttctttgttgaatataatggagcatttctagatgttataacaatgtaagaggattacaaaaattcacacatggaagtaagatattctcccctccttacagcatcaaagtgcaccaaatgtataaaaaagaaacacctttacttcaaagtacaggatactgcctcagctaagtttaattgaaaaactaatatcttgtgcaattgtctgtgaaaaactgaggcttaaatgatttgaaaacactttgggagcagacaaatcagataattgctatctttatggctgcaaatttcgactggtgttgacaagttgtaaagataaaagcttatagcacagtcaagagctaaatgtctagattgggtttgggatcaatgttaatactcaaagtgtaaaagctctgaacttcaaatgatctcttatagtgttctattttgcttaacttttcaagataataatgtagaactttatttactgaaaaacttttgctagtcattaggcaaatacttcactgttctaccatctaacccactgcgtagatgtcatatgtgttatgtgatttgtgccatgcattgcaataagagagctttggttgctgtttttcaaaacatttccggttgggtgactattaatagtttctgagagacaagagtcagaccttaccatttctaggcatcttttcctttctgaagccgagatggaatttgcctcatggcctcactctgatctcagcaagaatgctttcaaaagaagttccttgtttttcaaaggctgtttgcatgagtgattcaatgctttcctatcatggagctctaaagccagtggaaaaatatgtgggtatggggttgtgtaatggattcgctgcatttagctccaatcagtgtgctgattgtgcctacaggtgactccagtatctccaatctctgtttgcttttctgttttgtttacaggagcggagggcacagtgttccctaaatctatagaaacacctaatgtcagggcagaccccttcaaagaactaaggtaaacttctgactttggtttgcattgattaatggctattgccttgctctgtgcaactggccagtgattcattctgaataaataataagtgtcacagcgtgaatacataaattgaaagaggttggagagaaccagaagataagctacaaccaaaagaaaattttctatgagaacttaaaattgaggatctggatggggtaaaaggttgcccactttgtgaaatctagattcattcatttggaatgtttgttatgtgctgtattttgtggtacccaaaacctatccagttagagaactagttggtaattggtgctgatcagcccaaagaaaaatgatatctaaaagaagatgaagtctaaatacaatacgatgtcttattatgcaacaagctctctattacttggggtggtatggtactagaaagaacccccttctgcagatgttccaggtgctgatgttaatcttcaaatattcataaatgtgctgccttagcagaggatgactctgagatgctatgtactcaccaccagcaactaaggaaaacacaaaagaacagacagatggataaacagacagagagcctgaaaaccattccagccaccaaacaaccatgcccctgtccctcccgccaaaatgtatttaaaatggtacgttgaaacaaatagaactattctttctattgcttcaagttattcatcataactgtgatgaattcagtgaatactggcttttttttttcatttctggtagttcttttacctaaaagcaatcataaatcgccatatatggcactgaataactgtttcatgatagacaccaaccataggcacatgtacttgcattgcacaaatcatatctactctttcctgatgcaatctgaagatctatgctttgcttaaaaagcaagagccatattggacctagtgtttcttttaacagaagcacattctcagtaagtggaaaatgtatcacctcattataaaacccatagcattttttgcaaagcctataagtctggatggctgtaaggaaataaattgggccaaaggaagaggatagttggtggagaatgagaatcttttcataacaaaatcccacatagagtgggctgtatttttaagattacacatcacaccacaaggttctactttttactagcataactatcttcagcagagcttccacatgcctgaacttacctgattttctgttagctagttcctatgtttcatataaggtactgaagctagaatcttttaagcaaatacgtctgagaaaacctgctttttaggactctatgagaaagagttattgcctgagagtgcagtgaaccttcgtgtctgtgatggaagaggtcttttgagacaagctaatcagtggcctggttcccattcttttcacagtcctctgtagaagcacgtttcttacagaactagtcagtaattagtgatgattagccccaagaaaaagtgctgtctaaaagaagcaggactcccatcaacaaatgggcgaaggatatgaacagataattctcaaaagaagacatttatgcagccagaagacacatgaaaaagtgctcatcatcactggccatcagagaaatgcaaatcaaaaccacaatgagataccatctcacaccagttagagtggcgatcattaaaaagtcagggaacaacagatgctggagaggatgtggagaaataggaacacttttacagtgttggtgggattgtaagctatttcaaccattgtggaagtcagtgtggcgattcctcagggatctagaactggaaataccatttgacccagccatcccattactgggtatatacccaaaggattataaatcatgctgctataaagacacatgcacacatatatttattgcagcactattcataatagcaaagacttggaaccaagccaaatgtccaacaatgatagactggattaagaaaatgtggtacatatacaccatggaatactatgcagccataaaaaatgatgagttcatgtcctttgtagggacatggatgaaactggaaaccatcattctcagcaaactatcacaaggtcaaaaaaccaaacaccgcatgttctcactcataggtgggaattgaacaatgagatcacatggacacaggaaggggaacatcacacacgggggcctgttgtggggtggggggagaggggagggatagcattaggagatatacctaatgttaaatgacgagttaatgggtgcagcacaccaacatggcacatgtatacatatgtaacaaacctgcacgttgtgcacatgtaccctaaaatttgaagtataataataattttttttttaaaaagcaggactctaaatacagtacagatattttttctatggaacaaagcttttcattacctgggagatttgggaaatataagaggaaaggagataggctgtcttggctttaagcggtaaagtaaatcttctgtacttaaaaacaaacccaacccaaaccaatgaaacaaaaagacaactctccaagcattagcccactctagagatgcatagcctgaagaacatggagcagagtatttgcacatgttatgctgagacataatcgtagtgtttgttacacaacttataaacaaccctgaaacttacctttaaaaagttaaacctccacaatttacaagtaaatctcctaagtccagtgcaacaaaataaataaatactttgtgtagttggtttatttactgtgcttcttcaaaagttataggtatgtcccacagaggctagaaagcatgaattttttttaataatttcaactttcattttagattcagggatacacacgcaggtttgttacatgagtatgttgcatgatgctgaggtttggagtacgaatgatccgtcacccaggtagtaagagtaatacccaataggtagtttttcagccctttgtcttttctctctcctcatctactagtccctcagtgtcttttgttcccatcttcatattcatgtgtatccagtgctcagctcccacttattagtgaaaatgtgcagtatttggttttctgttcctgtgttaacttaagataatggccttcagttatattcatgttgctgcagaggacatgattttgttagttttttatggctttgtagtgttctatggtatatatgtaccacattttctttctccaatccatcattgacagatacctaggttgatttttgtgtcttagtgttgtatattgcaatgaatatacaagtgcctatgtcattttgatagaacaatttatttccctttgggtatatacccagtaatgggattgctcggtcagttagtaattgcgttgtcagttctttgagacatctccaaataatggctgaactaatttacattcccaccagcggtgtataagtgttcctttactccacagtctcaccaacatctgttgtttcttgactttttaataatagtcattctgactgatgtgagatagtatctcattgtgattttgatttgtggtgtgcagcatttttcatgttttttggccatgtgtatgccttcttttgagaagtgtccttttatttcttttgcccactttttaatggggttgttttttgcttgttgaattaagttccttatagataacatatctttgtcagatattagacctttgttgggtgcatagtttgataatattttcttccattttgtagactgtttatcctgttgatagtttcttttgctgtgcagaacctctttagtttaaggaggtccctcttgtcaattttggttttgatgcaattgcttttgaggacttagtcataaactctttcccaaggcctatgtccagaatagtatttctgaggttttcatctagaattcttatagtttgaggtcttctatttaaatatttaatccatctttagttaattcttaaatatagggaaaggtaggagtccagttttattcttctgcatgtgattagccagatatcccagcaccatttattgaatagggaatcctttccacatgcttatttttgttgactttgtcaaagattaaatagctataggtatgagactatttctggtttctctattctgttccattggtctacatgtctatttctctatgaatcccatgctgttttagttactgtagccttaaagtacactttgaagctgagtaatgtgatagctctggagtttttctttttgcttaggattgctttgggctcttttttggttccatatgaattttagaattttttttttctaattctgtgaaaaaataacattggtagtttttagattacattgggcagtaagaccattttaacaatattgattctttcattgattgattccatgagcatggaatgttttcccatttgttgtgtcaactatgatttgtttcagttgtgttttatagttctccttgtagagatcttcttcttccttggttagatgtattcctagttattttattttttgtgtggggttgctttcttgatttgggctctcagcatgaatattactcgtgtatagaaatgctattgatttttgtacaatgattttatttatctttattgaagtcatttcagtcctaggagccttttggtagagtctttagggttttctagctatagaatcatattgttggactgggtgtggtggcttacacctgtaatcccaatgttttgggaggccaaggctggaggatcacttgagcccaggagtctgagacaagcctggacaacatagtgaaaccctgtctctaccaaaagaaaaaaaaagttaatagccagatgtggtagtgatgcatgtctacagtcccagctgcttgggatgctaaggcatgaggatggcttgagcccaggaatttgaggttgcagttagctgtgatcacaccactgctctctagcctggtggcagagcaggaccctatctttctctctctcatatacacacatacacacacacatacacagaatcatattgttaaccaagagagataatttgacttcttttctttttatttatttctcttgcctgattgctgcggcaaagacttcagtactgtgttgaatagaagtgataaaagtaggcatccttgcctcattccacttcttgaggggaatgtttccagcttttgcccattcagtatgatgttggctgtgtgtttgtcacagatggctcttatatttggggggtatgttcttttgatgcctagttttttgggttttttttgagggtttttctcatacagggatgttggattttattgaatgctttttctatatctcttgagatgatcatatggtttttgtttttcattctgtttatacgatggatcacatttattgatttgcatatgttgaactatccttgcatcccaggaataaaggctatttaatcatggtaaattaactttttgatgtgctgtgggattttgtctgctagtatttttttgaggatttttgcatgtgtgttcatcagggatattaacctgcagatttcttttttgttttgtctttgtgaggttttgatattcgggtgatgctggcttcctagaacaaattaaggaggagtccttcctcctcggttttttggaataatttcagtagaattggtaacagctcttctttgtacatctggtagaatttggctgtgaatccatctggcctggggctttttttgttaataggtttttattactgattcagtttcagaacttgatattcattcttttcggggtttcaacttcttcctgattcaaccttgggaggttgtgtatttccatgaatttatccatttcctctagatttcctagtttgtgtgcatagaggtgttcataatagtctttgaggatcttttgtatttctgtggggtagcttgtaatgtcacctttgtcatgaaaacataaaaatattttcttacgtaattctaaagcttgctttttttttttttttgcccctgttgttcaaactgtggtagcccggactgagtcagggacctagaatgtcataatctacctccttcatccttttgaaattttttaaaatggtgttttataggagtatctctgaccaattgaaaagatgaccaattattgatagattagcccagaccagtgtgtctgtgaatgttttatatttgtcatttcatggtgccacatattactccatgctattgattgctattgaccttggatattgtgtaaattgttaatgaacttggtgactgactcttctggtctctgactttagcactgggccagtcttacttggccacattcacactgctatgtcttctagatttaagaaaatagagtaatttaagtgaggttcctggacttgtactagcaaacagagctagacagactcttgaggtgaagcaaaagtggtccattcttcagtggtagcaaaatggagggaaaagagcactgtgctaagagttgggcgcctaatgccaacccactgtaggggccaagggaaagcttccctttcactatctgcagattcactaaaaatcaactgacagcaggcagattgatggcagaaaaggcataataaaaattttactttaatatgtatagcacaaggggattataggagaacaattacccaataacccaatgaggtacagatgcttatatgcctttcttcacaggggaggggagatgaggaaaatgtagcacttgtggagtagtaaatgattttagggcaaaataaatggacctggggaacatagaatggtctgggagaaagtttgttgggcctgcagagcagataatgtctgccaaatgattctctttggaatactgaatgggactgaaacagaaaacagtggtttgtgacagaaattggtccaggtgtgttgccatacttaggtctttcttccttcagtatgagtcattaataaaaactcagggaaggaaccaatggtaattgtttttttctttcctttgggggggtccaaactttaggcagataagggaacttcagaaaatagcttcttccagactctctgctggtctccaaaggccttaaatttaaaatagcaagccagggtgtcatattttgaggtattagtttctgagtcctaatatccctatgtggccttgagctaattgtggagccctgctgtctgtgaaaaggcagggcacttctagctctaaacagctaatcctgttatattattttgactcttggtttcaaaataattttaaagttaaaaaagagttataaaatttatacagataattctcatctgccttcacctaattttctccaaagttaacatcttacatatctgtggtatagttaccacaactaagaaattaacattgtagtcctgtaatatcatgctttacatgagatttatttcaaggaatgaaatcacctgaataacttatagatttaaaaatatgtaaaaaggactttaacagaaaagctatttgttaagaggtgaatttatagatctttaaaattctcactgcagttaagttggaatgttatttttgagggttttttttctttaatattctatacccagattttcttggtcttacttgtcaataatggaaaacaaatggattcaaaagaccacaacttatttagacacagactgtcttttaaaatagacaagcagaaacttaaatatacatgttccttacctaatcaaacatgagaaaattacatctatttcaaaacgcttctccattgagtaacatttgttttcctcaaacctctgtcttggctgctagaggttttctgtttgttcttattttgttgttgtttgcttgtttgttaacgaaaaccagatttaaggcctctggcatttcttcctagaagatgtcagttaaaggagaggtagcttcctctttgctacagttttggttcattgcctttttttggtttgttttcagagttactatatttactgtatttgcagtctttggttaagatgcttgtaaataatccagagttgagctcaaattttcaaaaaaacaaaatgcttttctccagacaaataatgagtgttacaaaggtctatgccaaatatccatctcaagtaatgtttattgactttattcttgcaaggtaattctgaagtaaagatactttgttctggattccagactatacttgaaattataccaggcactgtaaccatcccttgaaataagaaaaattcatcttgaattgaaatcgtattttaataaattcatgatcttaaactatgaatatcttaaatgttcacttattcactgtttttttttccctcctgaagtctatataaagacaaatggaaaaatcactgatctcaggctgttcatgatctgaaacaggaaataggccattcagttttgcatatgtattttccataggaacagaggcttcctttgaatgccttccttgctctaaagattcctttcaactgtaaagtttccttgtaggattctgatcctacgagaataggaagtagacggtaaaatcttctttctcaggtacatgccacggcaaatgttaaaaaagagagaaagttatatagactacccaaagcttggagggaaccatgaaatatcaagtcaaaatgtctttataaaagaattcttcatgttcacagtcagctaatatgctgatgtgctcttacgttacataaaattatttaaataaagtaatttttaaaaacccacttggaatgcagagataaaatgaaaactcaaataattgatagttaaagggaatacaacagaaatgtcaccgcccaatacaataccgtgtgataattaatatggagatatgaaccaagccagagaataatggagaattacaaaatctacttagaagcgtttaggtaaagttgcccaaaggagatggcgttttgattgaaagaagagagaagagagaaaaggtaaaaaccaacaaataggtcttataattcaaaaggaatggttctctggggccatttagcatgggagcaaacagcccaacatatttctgtaactcctcaaaatgttactgggtatttacaaaaattgatttttgtaatgtaattttcctcataacaattgtattctttaaaaaattgtatgatggcaatttcagatatggttgcaggaaactttaaagattgttacaaattttaaaaatcagtgcactacttaatttagaactaaaaatttcactaatctcaaatctattgaaaagagcttgaaataaataaggtattactctgttactgtttatttttccccataatgctaccaggttttaatgacaaagcagaaagattctacgatacatctattactcccactattatgcacttgaacatcctgtagggtttctttttgttgttgttgttttgttttgttttaatagaaacatagtaaatctgaactcctttgggaatgtgtgagatttaaagtctgtgtgtatcattgggaaacaaggattagacaaggcttgcacaagttgacaaaaatgaatttatttctttaattttatgttaggatgtctataaccaactaaatatttataggctttctgtgatttataaatttaaactatcaaaacagtctattagagccttaggggtgaattaattagaggcttggtaattctccgcacaccactgacagttacagtaccaaaatattggataaatagtctgactttttttttttcctctctcttttattttattttattattattatacattaagttttagggtacatgtgcacaatgtgcaggtttgttacatatgtatacatgtgccatgttggtgtgctgcacccattaactggtcatttagcattaggtatatctcctaatgctatccctcccccctccccccaccccacagtagtccccggagtgtgatgttccccttcctgtgtccatgtgttctcattaaaaacatacaggttgaggccaggtgtggggtggctcatgcctatgatcccagcactttgggaggctgaggcaggaggatcacctgagctcaggagttccagatcagcctggccaccatggtgaaaccccatctctactaaaaatacaaaaattagctgggtgtggtggtgcatgccggtaatcccagctagttgggaggctgaggcaggagaatcacttgaactaggaggcggaggttgcagttgtaggggtgggttgcccctacacacctgtgggtgtttctcgtaaggtgggacgagagatttggaaaagaaaaagacacagagacaaagtatagagaaagaaataaggggacccggggaaccagcgttcagcatatggaggatcccgccagcctctgagttcccttagtatttattgatcatctgtgggtgtttctcaaagagggggatgtgtcagggtcacaagacaattgtggggagagggtcagcagacaaacacgtgaacaaaggtcttggcatcatagacaatgtaaaggattaagtgctgtgcttttggatatgcatacacataaacatctcaatgctttacaaagcagtattgctgcccgcaggtcccacctccagccctaaggcggtttttccctatctcagtagatggagcatacaatcgggttttataccgagacattccattgcccagggacaggcaggagacagatgccttcctcttgtctcaactgcaagaggcattccttcctcttttactaatcctcctcagcacagaccctttacaggtgtcgggctgggggacggtcaggtctttcccttcccacgaggccatatttcagactatcacatggggagaaaccttggacaatacctggctttcctaggcagaggtccctgcggccttccgcagtttttgtgtccctgggtacttgagattagggagtggtgatgactcttaaggagcatgctgccttcaagcatctgtttaacaaagcacatcctgcaccgcccttaatccattcaaccctgagttgacacagcacacgtttcagagagcacggggtttggggtaaggtcatagattaacagaatctcaaggcagaagaatttttcttagcacataacaaaatggagtctcctatgtctacttctttctacacagacacagtaacaatttgatctctcttgcttttccccacatttcccccttttcttttcgacaaaaccgccatcatcatcatggcccgttctcgatggtcgctgtctcttcggagctgttgggtacacctgcagactaacaacagacaaaacaggcacacaaggattaatatgagatttataatcgtagtacttccaatggtcttaacccaagtgacagggttaagatttgcgaggccatcagcaactcctgcaattgcctcagttcctggcaccaaatttaaatgggcttttgatgcttcgaaaatttgttcttttaatttggaaatgtctaaagtgagattatcttctcttccctgtagatggcgtctaaccatgtcccagtgatgctcagactcattataaatttggggtgtaatacaaaaatctgacgtattccagtcacattgtaactggaaacgatgttctaagctcatgagtctgtctcccatccaaatgacagtttgtctaagatcattaatttgatttgccaatttttgatcaatactagattgtgaattccacaatcttgtagaattcttttgccaatcattaacaaagtttactgactgaacagaagagtgcaatgcaactcctgctacagcagccgtagctgtgactgcaattaatcccataatcactgcaattaaagtaaaaatgaatcttttggatctatttaaaacaccttttaatacttcagtcaaaatatggacggatggtgaggcctcccacggtcggtccatggacacagggatccacacgccctctcttgctctcaccagcagaatacggtgttgccaattaaaagttgaatcaatgcaagtaagcaatctacaattttcacaggttatagtctgggagtctggtttaataactatatttcctacaactagcatataagggggctttacgcaactttgtaaaggaactgttagactggaatttaggtcgacagtataaaatggcttacaatctcttgtttctaaagtttgatttccagaccaaattctaatgtggtgtgaggccacagtaagcctccataattctggatgttcaggaccagaaacaggacttactatttttggtcttggggtagagattcctttttctccccattcccaagggtagaaagactgcaattttttatgcttatgtttgtctaaactttctgttaagtcgctatcaacagctggactcacttgtgcacttggacacgactgagtttgtcctgagcaattgtggtagaattgacctcgaggtgcccaatctataatagttccaaattcattgttttataatatcaccgcactattggccacacattcttcccaaactaaaacttctgtattttttgattctttgggaatttccttggggcaaggtttccctttaggtctaaattttaatgatctttgataagaaaagtcttgtaaataatttacccgtggcctgagtgacatcccgcttaccatgtgataagtgaatctactgatgggactgacagtaggtacttctaccaaccaattttggactgcaggcattaaacatcctggtgctctccctaggcaaataggaggataacgatacccaatggaaatatttatcatcatcccttcttcctcaggtttggcagggcagcgatcatctatggggccaggtacccatacactatcattaacatatacttctataggattatccatccatgtgactggtgttaccatctccgtggaggcccttttctttgcatctccgatgggttcattgtagaacttcaaatgtctagtgggtaaccaaacaggaagctgattttctcctggtgaaacacaagcaaaacctctcccccacgttatcaccttccctatttcccatgtcttatttttattatctttccaccaaattagttttccttcatgtgggctgttctttttaccagtaagatgttgttctgcagaagtagtagtctgatttctataaatgtttaaaaaatttaaagtatagagtgctagattaagttgcatctgaggagtggtacactccttactgtctcccccttctttttgtttaactaattgagttttgagtgttctattagttctttcaactatggcctgtccttgggaattataaggaattcctgttgtatgtgaaattttccactgacttaagaatttttggaaagctttactacaatatcctggtccattgtcagttttgattttttctggaactcccattacagcaaaacaagacaataaatgttttttaacatgggaagtactttctcctgtttggcaagttgcccatatgaaatgtgaataagtatcaactgttacatgaacatatgataatcttccaaatgaaggtacatgcgtgacatccatttgccataatgcattaggacacagacctctgggattaactcctgcctcttgagtgggcaggtgtaagacttgacactgggtgcaatgttgtacaatatcttttgcctgtttccatgtgacatcaaatttgttttttaatcctgctgcatttacatgagtcaaagcatgaagttcttgtgcttttatgagtgcagatgataccagtaagtcagcttgttcatttgctttagtcaaaggccctggtaaattagtgtgtgctcgaatatgagtaatataaaatgggaaatttctttttcttacagtttgttgtaataaattgaatagctggtttaactgatcatccatgctatatttaattagagctgtctcaacatcccttgtagcctgtactacatatgcagaatctgatataatattgataggttggtcaaaatcttgtaacactgtaatgactgcaaccaactctgctctttgagccgattgatatggagttttgattactcgttctttcggccctgtgtaagctgcttttccattgctggaaccatcagtaaatactgttagagcattttctaaaggttcacgtctggtaattttaggtagaatccaagtagtcaattttaagaactggaagatctttgtttttgggtaatgattatcaataagtcccacaaaattagcaagaccaatctgccatgcaccagaattgataaaggcttgtctaacttgttccttggttaaagggacaactattttgtctgggtcatttccacataattttgttattcgtaatcttgtctgaccgattaatgtagctatttgatccaagtacaatgtaaaagtcttaactgtactgtgaggaaggaatgaccactccacaagatcagtattttgaataatgatgcctgttggagaatgtgcagtggcaaaaataaaaagttggagtggggctaagggatctattctatttatttgcgctgactgaattttttcttccactaatttaatttcttttgttgcctctggggttaatattctttgactatttaagtctgagtctcctcttaagatagagaacaaatttgacatggcataagtaggaatgcctagagttggccgaatccaattaatatctcctagtaatttttgaaaatcatttagtgtttttaatgtgtcttttcttatttctattttttgtggcttaatttttctattttctatctgcatccctaaataatgaaaaggagtagaggtttggatcttatcagatgctattgccagtccagcattggcaacctctgcttgcagaaatgtataacagtcaattaatttatctttcgtttctgcagcacataaaatatcatcaatataatgaataatataacagtctgaaaacttttctctcactggttgaagagctcgacctacaaaagtctgacaaatagttggactattaagcattccctgaggtaacactttccactgaaacctggtggctggttctttattatttatggctggtatagtaaaggcaaatttttcacaatcctgctctgccagagggatggtaaaaaagcaatcctttagatcaattataattaaaggccaatcttttgggatcatggccggagagggcaacccgggttggagaggccccatgggttgaattacggcgtttacagcccttaagtcagttaacatacgccatttgcctgatttcttctgaattacaaacacaggagaattccaaggtgagaacgaaggctcaatgtgacccttttctaactgttcatttgctaataaatgtaaagcctccagtttttgttttggtagcggccactgatttacccacaccggtttttctgttttccaagttagtggtatgggtttaggaggctctacagtgaccgcccctaaaaaggataccctattccttctctttcttgatttattttagcctcaactggaactttaatgccatcttcatttttccctagtccctttcctggtatatatcccatcttggtcatgattttttgactcgtggggctatataatggagcgggcatggtgatttccgcaccccattgttgtaataaatctcgaccccacagattaagaggaattgaagtaatcattggctgaacagtactttcttgattatctggccctaagcaatgtaaaatctccatactttgatacacttctgaggctgtgcctatgccgacaagtcctgtaacagccttttgtttaggccaattttttggccactgatttaaagcaatgatagagacatctgctccagtgtctaccaacccttcaaactgttttccttgaataatggccttacacacaggtctgttctctgagacctgacttgcccaatatgcagcctttcctgttggatcagtgcttacaagccctcctattctttttatttcactatttccacccttaatatatggcaggagtaataattgagcaatcctgtctcttggactggcactccaaggaattgaagagctaataaccaattgaatttcgcctttatagtctgaatcaaccacactagtatgaatttgaactccttttagatttagacttgatcttcccaagattagtcctacagtcccctcaggcagtgggccatatacccctgtagggattttttgtgggggctcccctggaagcagagagactgcttgtatagtacataaatctactgctgcactgccgcttgtggtgagggacaattgttgtattgtggtaactggcttattccctgaaacacttgggacagtaggggttgttgtccctgaaaaccctgaggaacaaatggctgaattgggaatgccccagtttgttgtggggcctgaggctggcccctttgctcgtttcccgacaatggttgcccatttttatcaaatttagaacgacattgactagcccaatgttttccttttttacatcttggacataagtcaggtggctctctacctgttgtagttgcttgaatagttatattctgtttgtttaagactgggcaattcttttttaagtgaccaatttgaccacaattataacattttcctccaaatgttctaacttgtcctcctaaaacaactcctgttattgcttgagccataagcatagctttatgcatagctcctccgattccatcacaggcttttacatattctgagattacatctgatcctgcaggaacctttccttttaatggcttaatggctgattgacactcaggattggcgttttcatatgccatcaactccactatgaccttaccggctttttcatcggcaattgacttttgagcaacatcttggagccttgccacaaaatcagggtagggctcttttgaaccttgtcttactgtattaaatgaggggcaggtacttcctgggtcttggattttttcccaggctctaaggcagatagctctaacttgctcaatggcctcattttgcattaatgcttgttgactaatagtactccaattttgacctattcctaatagttgatctgcatctatgttaactggaggattggcagccctatttcttcggacctgttcttgtaccccatcaatccaccaagtcttaaattgtaaaaattgagagggtgagagagacgattttgccagaatctcccaatcataaggaatgagtctatgtccataagcaatggaatctaataatgtcctcatataaggggagttgggtccatactgttttactccctctttcatatcttttagcatttttatcgaaaaagacttgtatctggcctcaactgtgggaggctctccctcttgggctccttctccaggtggcatcggttctaacgttactgggaattgccatgcctcagtatctccttcctttcttgatttatcaataatttcatgtaattcactaccctgtctactaggtggtgccataggattaagtctcctagtgggcggctgatggtatggcgccctgccctgtggtgctgggggcattcctggatatccatactgactttctgggggtggccgatactgaagttcagccggcggccagtattgataggctactggcggttgggtcttattttctttaacctgcttttgaggttgtaatcttacgggcacctgacctgctggaagaggacttgtgcctcgtggtttagactctgatggccccattaattctggaccttttccttctaattttaacgtttcaggatatatcacctcctgtaattgattatagtcaacattttgcgttgactgagccattaccggctctgctacatattcgcaatgtaaactttcggtttctttctgggattttttccttgtgttttcattacaatctattaaacagcttccaggggcatcagaaactgaaatgctatcttcttctgtttgaaatggttctaaagctgctttaataatggcccaatcattccatactgtaagtggaatgatattacccttcctacctgcttgttttagttccttaccaattcttttccaatcttttagatctaaagttccttgttctggaaaccatgggcaaaattgttctattatttgaaatagcttgattagattttttgtagatactttaactccccctctttttaaaagaattttaataaagctgagataagaggcatatttacttttaattttacttttagtttgccccattatcaccctagcttcttccgagcgcgcaagcttaccgtaaggctgactgtagatgtactcgggatctctcgtcgacttgtcctcaatgaccacgctcgagcgtaccttcaccctagagaaaagcctccacgttgggcaccagatgtaggggtgggttgcccctacacacctgtgggtgtttctcgtaaggtgggacgagagatttggaaaagaaaaagacacagagacaaagtatagagaaagaaataaggggacccggggaaccagcgttcagcatatggaggatcccgccagcctctgagttcccttagtatttattgatcatctgtgggtgtttctcaaagagggggatgtgtcagggtcacaagacaattgtagggagagggtcagcagacaaacacgtgaacaaaggtcttggcatcatagacaatgtaaaggattaagtgctgtgcttttggatatgcatacacataaacatctcaatgctttacaaagcagtattgctgcccgcaggtcccacctccagccctaaggcggtttttccctatctcagtagatggagcatacaatcgggttttataccgagacattccattgcccagggacaggcaggagacagatgccttcctcttgtctcaactgcaagaggcattccttcctcttttactaatcctcctcagcacagaccctttacaggtgtcgggctgggggacggtcaggtctttcccttcccacgaggccatatttcagactatcacatggggagaaaccttggacaatacctggctttcctaggcagaggtccctgcggccttccgcagtttttgtgtccctgggtacttgagattagggagtggtgatgactcttaaggagcatgctgccttcaagcatctgtttaacaaagcacatcctgcaccgcccttaatccattcaaccctgagttgacacagcacacgtttcagagagcacggggttgggggtaaggtcatagattaacagaatctcaaggcagaagaatttttcttagcacataacaaaatggagtctcctatgtctacttctttctacacagacacagtaacaatttgatctctcttgcttttccccacagcagtgagttgagatcatgccactgcaccccagcctgggtgacagagtgactttgtctcaaaaactaataataaataaaaattaaaattaaaaaaccatgcaggttgggtgtcccaaatccaaaaatccaaaatccaaaatgctctaaaattgaaaactttttgaggactgacataaagctcaaaggaaatactcattggagcatttcaaatttcagattttcagatttggggtgctcaacctgtaatgcaggtatttcaaaatctggaaaaatccataattcaaaacacttctggtcccttatttcagataaaggatcctcattctgtataaacatatatattgaaagtgagaaagacacatacaaagagacagagagacagacagacacaaggaggagtgtatattgagcttcttagctgtaggtacttggtatgtggggcagtatgactgataccattgtggaagaaatccgtaaattttctcccttttgaacagtttgcaaacatgttctgtaattgtcttcctctctacttctctccctttccccacacaccccagcaatccatgtacttaaagtttttagctttgttttgcatttataggattaataattatttggtcataagcacaaatactgaagtgattacaggagaagtagaaaactatagcggaccaaataacagcatagttattcaagggccttacaaagtagaattgtgaacagcatccatgttggtcagtagtctgtactctgaaggcatcctgccctgggtttgaatttggcctaaatgcctatccgctttgtgaatttgggcaagtctcttaagctctcctagtcctaatgcctagaacacaggacgagttctgaacataacctcaacaaatattagttttttggaggaaaaggcaaacagctgtctttcatcagggctcaagaactcagacaggaattctgagagcttaaaatgtcatcaaccagtacaaagtttgtatcaaatcatggtaaccaaaaattctctttcaattaagaacaaaataactactgtgcttacatttactattaacaacatgcacataggaaaggatatttcaactaacagagttcacgtaaccttagaataacacacagttccataaatcagatccattgaactatgtgaacatattaacgtgtcattatgttgcctctattttttcattttgcccaaaacccaagtgacttcatcacaactgtcctcactgcatgttgtgtagtacctgcccagaaaacaggagggtccaagagccacagactaaggcatgatatgatcctcttgattttaaggtcatcctgtttgaattcctcaaactgacatgcagttgtctctctttcaagactagttaacccaaatatttatgtagcttttctccttttctttcctttcctcttgtatcccaacattcttccttccccttttccctattagtatcgtactatagtttgaatttaactacatatttcatttttctcccttatccccagtatttctccaggatgccttttcgttctggagttctcttagagtgtagaaggcaaaaaaatggagcaaaataacagtgatgcttcaatatttgagccatttccatcttctcccttgatatatttatctaaaactcttttacaaatgtgacagaaattatattttgaacaaattaaacctatgtgttgtatattcatcttctctatacattatagctcttccattagagaccagggaaggatacacagcaaataacatcaaaggggaaaatgaggcaaggatatagggaagttcattcagaaagcaggaagaagttgaaagcccatctcttctgttatctggtggagtgtaggaagaagatgggacatataggaaaagcaaggggtgaaatgtatgccctgatgatgtctctcctctgagtcatggaggagggaagccagttagatagggcttaaggaaagtcgaaagcaaagggtcattgcatattttcaattgagactctaagaggaggccaattgcaaggtggtcccataccagctggattgttaagtggctggagcggaaaaaagggcctgggtcagcactcttgaatctccttcaactcctagaggaagggtgaatggtttgtcaaatggcccacatggggtcctgtcaaggaatgctaatggacaactggtggtgaaggcctctagagagacatcctgcaatacggccgaaagttcaaagtagatagtccagcttgtgggtggagtgggaggcatacccagacctcatggtctacccacaccattcgcagctgatcgtcagtgggcactgagtgggtccagagatcccaccaccaaatccaccgcagacttcagcacagcctgttagccagacactagatgctgattaaacgtacatttcctggaatctgaattttccttattcttgtcatcaggaggtcacataagccccctcccctctatcttgataatgatatccttaagaaggaaaggaaatttgaaagactggttatttatcttaaagaataaatgtaaacttttggatcacagagaggttgacaaaataaactcaatttaatttttccccacaatccataaggataagcagtttgaaagaaaaagtaattcaggtaagcacaataaggaaatgctgtttgctttgcatggataaagatgatttgtcaaatgaccagccttcaagacagggtattatgccagtcataaagtatcttatgtgacttcattgagctttaaaggccataattcttctcctcagtatcatgtaggaagcacaaatatgatcaaaggaaaaatgaaacactttcagaatccattgttaggcacctgctattcatgatttccatttctctgtaggccttgaaccaggattgattgtaactgtgatccataactgatgctctaaacatcctccccaaaagcagtcctagattttttttaatcttttaaatttaagtaggtattgggggaaatgtcttgagtaccaaaacgtttcacaagccactctcaaaatcatgactagacattactagaccatctatgaaagctggagctattagcgatgtgcagtgattgtccccatcacgaccagcccgttttcacctgaatttgagaggggcaatgtgactacatcattctcatcattcccagacaagtggattttacttaaaaattaaaattatatcatctagattaattttaatgtaaaggattaaaatatgaaaaaacccaaaaagataaaaatcataatgagagggtataaaattgtgcttttatccatgtggtcaggacggacatgacattttaaaaataaatgataatctctcagctttttagagcagaatgggcaagcgtgtttatttcccgaaattcctaagttgtggccattttcttcctcaaatagagtaatgtgattttattattgtttttaacttgattaaaatgtcagccactgtcatttattatggaaagtgtgtggggtatattctgttattcttcaccaatacgcaattgctttcgactcttcctttttttcccctcagtgggatgcccctgctgggtgtatagacagaaaatcttgcttaattacccctttcatgatcctggcttgaagccagccttgttttattccacttataaccttttcaaaacaaagagtaatgggagtttagaggaacaagcttacaacagtttttacctgaaataagttgagaaccagaaagtacattttttaaaaatatcagccaaaggggttcttattttttcctcaatccagaactttccatggtttattagactataatatgaatgagagtaagacgatcagatctcagggaaaactagataagcctgtctaatttcctggccatgggctatgtgccatgttgggctagatgtccttccttgtttgctgtccttcagtggctgtcactaacttgaaggtaaaatttcaaagcaatagcattcatatacaatcttagccattggtcgagtcatctcccattaccctttccccctcctttcaccttttcttagttgtatttcttcctctgccctttccctattttccattccttccactaagcatgtaattcctgctgtcatattttaatttccaatgttctttacactatggtggtttccttttatagcatcctgtattaatttcatagagatactgtcttcttttttctttttgagtctattaataatagtttctctcaagtttcttctgttttccacattaaaaaaaaaagaaagaaagaaagaaaaattcaggtctctggctttccaattggagctttatcaaatggttggtgattcatggatatctattgattcttttttttttttttttttgagacagagtctcgctctgtcacccaggctggagtgcagtggctcaattttggctcactgcaacctctgcctcctgggttcaagtgattctcccgcctcagcctcctgagtagctgtgattacaagctcacaccactacacctggctaatttttgtattttttaggagagaaggggtttcaccatgttggtcaggctggtctcgaactctggacctcaggtgatccacccacctcggcctcccaaagtgctgggattacaggcatgagccactgtgcctggccctattcatttttaagaatgaagcagtaagagtctgctggaaagttttgtgtacatagatgggacttattgggtggcaggcttctaggtagaagcatgagctgggatttttaggtggatgctttgtgtcagtgcattttgcattgtcataaaggaatacctgagattgagtaatttataaagaaaagagggtcatttggctcacagttccacatgctgtgtaagaagcatggcactggcatctgctaggcttcttgtgaagcctcaggaagcttttacctgtggcagaagacaagaggagccagcatgtcacatggcaagagaaagggaataagaaagagacaccgggctctttaaaacaaccagctcccatgtgaaataatagagtgagaactccactgtgaaggcacagtagagtttatttattagggacctgcccccatgacccaaacacctcctctaggccctgcctccatcactgggagccacattttaatataaatttgaaaaggataaatatccaaagtatatcagaccccaaatgtcagaatctgtaggtattttctcttgggctggtcattttccccagagagaaatcctaatcccttgcttgggatacatctggttgtcaatattgttcatattggagtgttggaggtttcactcttaaatatgtaagttttcatataattccatttttagtccagcactgttaccctcagctgtcctggtatcacagattccagagttaacctcaagtcttaaacagtaagggtggtctggttgccaggatgtacatagtgaagaaacagtctctaggggtcttatggtttctcacagagacctaaacaaatcttcctgagtgcagccccaccagatgctcccagccacagaggtgcctggtagctctgattcctgggcctggccatgaatttacagcttgaatcaacccacagctctgtcttcaccaaacccacaggctcttagcttttagcttcccgtcatctgccaaggaaattactatttgttgcttgcttttcaacttccaaagcattgttgacatgtttcttctgttcttacttcttctctctcccttcgtcccttcatccttatgggtttgggtcattttagggtccatttatagccattgtatgagtgtttcaggaaagagcagaggtagacaaaggtgttcagttcagcgtttaatcagaagtcctctgtcccctgtccgtaggctttagatatcctgcccttctcttgtttgctgtagagtgccttagagcctttatgttgccgttctcttttcttgaagcactcgtctctacatttttctagataattctatttatttttcaagtctcagctttaatgtcttttcctaacctaaggacatctttcttggtacaccctaggctcactgtacttcccctattacacacatacgcagtgccctacacgtcttcatttttggattcattgactgaaatgtcttccacctttgccattgtctgcaaggggtttcaagttagatgaatcattacaaatccattcccctcaaaagtgtgtgttcagccagcataaagataagtaactgtctgcaacacattgtttatgaaggagggctgtcaaagctttcctggggtctgtagttatgcctaagcacatatttatctcatgcctttcttttttctattcataatatatcatttccgaaagagaataatccattcctctttcatttactgaaagcagttttaaaacttcacattccttttttgttcatgggctgtgcaatagtcacgcttcagcagaactgtgcttaatttgaagcccctggcctacggttcctattcatcttctcaagcatggttgtcgtaattcacagaggaaggccaagtcctcttttacccagttatacctttcattgccgcttcctattcacaacggaagatgagtttccagttctttgagcttttttcacaaatataacctgactcgttaatgataattttccttgcctggcatctgggctcaaacacactcactccagaataacaaagcacagaggaatttgaatcccttgacaatccaagcaccatatccctaaccttgaatagaaaatagatgctaataaattcagggtcttaaaaatgtgaattatagtcacttcacacttcgtggcagcttcatgctgaagaaatagcttaaaacttaattacaatgcttgtcccttccttaagtgcagatgacattcttcagatagatttttgccatgacatgtgaggaacagagtttagaagctaataagttattcatgatggagaatattgactgtgtactgattaaagtgttgacaccttcctaacataatgcatctgtctattagtgtatggttctccctctggccctcatagaatgctctttgggaaatgatgaaaatgccattcagcctttgaatgcagatgtatgtattaatagcaaatgtgcctgatgagtgggattaaaatggagagcagaaggcgttaggcttcttctgattgcctacccctgcaaatgactaggctgctctttgatagccatttgtgagacacacaaacataatggattggacatggcccacttttggcatttgaaaagctatgacaacacattcaatactttcatggctaattgtaaagcaagaagtcaactggaaaaggatgatgtatgaaggattctcttccccgttacatataatcccatagcgtgagccatgcagcaactaagttaagaacaggtaaaggcataatcccccgtctttgtgcaaggtgtgatactgttacaaaaagagaattttcttctttattcttatgccttaggatggctcaggagtgagaggggcagagacaaaagtgaaacaacttgatataagaaagcagtttctaatggactgaagtggtaaacgatctcccatagtcacggacatcccatcactgagagactcaaggcaaggggagactatcataggaagactatcatagagatgtgtcaagcatcagaaggagagaggattttaactaaataatactcaggtctgctctcatatgaagattctaagactcaggcttcaagtgctgctcaaaaatacagttagaccaggaacctcgcattaagttaaaattccttgcaaaacactattccttgagtagttgaaggacagaatctgtgaccagcatcgactcctttttgtgccttatactatgggtgtttagaaaacagttcagatttttatagtggtttataaatttcaagagggcgttttcagaagtactcctctaagaatttcctaaagcagaatgggacgcagtgacttcattcccattgtattgatgagaaaactgagaggttaatgtgaaatgcctcttgtttgccataatgaaaagtatatcctttctcacagctccataagactttaaagtgttggtgggcgactcagaatctccgtgatggcagcacttggtaaagatgagcagaactgtggagtctgactgctggacaccagatcctgcctttgtcacctcccagagtgtgactctggcaaaatttaaaatcctctttctgtctcagttccctcatttgtgaaatgggacaagaacagcaccaacctcagaacaaatttttgagaattaaatgacataatacatatgaactacttcaaacattacctagaatgtggagcttaataaatgttaatttcaggggcttcatttttgaagcaacagattgttacttattcttgagaaaggccaaggaactggtcccagtgaccaataatgtgcctgtatcttcttccttatagataatggtcagcaacaggttaatagcctattttgtaccagtccagataatcaggacagcaataagacaaggatggaccaattaatttgccaggctggtcccaaaattaaaactgaactttaaccctgcttgtgaaatgttctcatagcaaaggtatttgcctttatatgaaggcatgagagagccaaactgttgctaaggagagacaaactcagaaacttaagcactacatagacaggatgaagtggtaagcactgtggctatgaataaaaaggtgagttttgtaagcattcctactgcaaagagtttttgaactttttctgaatttaattgcagtatggtgagagacagggtggcagcattgtctaagaatgaaaaagaatagaatttaaatattaatgttcaaaaatctaactctaatactatagtgtgatagtgaccaaaatactttacttcctgactccttcagccatttgtaagaaggatatgactgattaaatcaagctccttagagaatcagaccaagcagaaaatctcagaaacaagacgccttgtctggctacgttttattcctgttgccagctgctgccaggaatcaatagctctctcttaaccatagcatggaaatgaaattacacattaaactctaatgagatttatttaatttaatttttcaaatggaatattttgtattatccaagagagtgtccatttattcttcaatacgttcatacagtttttgatcctccattaagttgtgcccccttatgagttatattgtgttctttaccctgaaagccaattgagtacctatttttcatgtggcttgggtagacttttgtctcataaccccaggttgttgccacagaactcctggttcctgcctgcaacctgttgctggcccagactaacctataagataaagtgactgctgtgttttcttccaggaatattaattatttttggtaataacaggtagacaccctctgtggccattaaaagcaaatcccagcagtatttttcaaagggctggtgtcacttgaacagacactgcgaatgagttctgctggataaatagcacgtagtcaaaatgctggtttcaggggctttctggggcggctcttgaaacagggttgagggctttagcttgggacctcaagacaaggtaagcaatgctggccttgcggttcacgaacaactcccacatcccacccaaaaaccttgatgagccctggggatacagcctaggaagaaggaaaagggacagcagcctcagaatgtcatttcacaaggtgaacccattcagaaggctttgagatgacatctgatgccaaaatctgtacatttcagctgaatgggtgaactctagctgaacttgccatgctaaacacataaataccacccaactgaatgcattccttacacagatatttgaatgcttgctatgtgtctgcctatatgtgctagggaatcaatgatgagcaagacagatgtggtccctgccctcatggagtctgtgttctagccagggagaccttaaatacctaggcaaggtgatcagcatttattgagcacattcctgggcctaccatcagtctatttcctttgtaaatattatctatttaaacttctcattaggagaacctcctttgggagaaggctctgtaatcatctccattttccagatgaggagtcaaagacttatagagcttcaggggcatgcaggaagatgttgaaagagccatcccattactgggtatatacccaaaggattataaatcatgctgctataaagacacatgcacacgtatgtttattgcggcactattcacaatagcaaagacttagaaccaacccaaaggtccatcaatgatagactggatgaagaaaatgtggcacatatacactatggaatactatgcagccataagaaagaatgggttcatgtcctttgcagggacatggatgcagctggaaaccatcattctgagaaaactatcgcaaggacagaaaaccaaactatcgcaaggacagaaaaccaaacaccacatgttctcactcataggtgggaattgaacaatgagaacacttggacacagggtggggaacatcacataccagggcctgttgtagggttgggggagggggagggatagcattaggaggactacctaatgtaaatgacgagttaatgggtgcagcacaccaacatggcacatgtacacatatgtaacaaacctgcacattgtgcacatgtaccctagaacttaaagtatatagataaaaaaaaaagagtctggtggagaaaattttatatttgcctgacattagcccatattcttcttgctaaaccctaccactatgcaaaaggagtctgctctcagctaggggacagtaggaatctcagtgtcacattgcatttcttattatttctattgcattcatttaggaaggttttcagacttcctgattaactagaaatagccagaaagagtgaaacacctatctccatggccttttgcatcatgtaattattatttatttccttgctttattgttcatcttatttattgggttgtaaatgctaagccagtgattcccaatgtttgtttcatttggggaccagctggggagtttaaaaataatcctgattcctggtccacatcccagaataattaagtcagaatctttaggagtgtgacctagacatcagtagtatttagaacaggcctgtggtgccagatgataccaggctgtggctgaggttgagaactgggttctaacagcacagatcctgtgtcaagtgctctcgtcaccaaacacactaatattgtaagctgtgaaacagtgcccagtctataattgtagtaaagtttgttgaataaatgggtaggtagagagacacaggggtgggtgagtgagtgaacaaagaaaccaatgattgcagcagttattggaggtaaagttttagaataactattagataattgtttacagttgaccttataacagttcagattctgtatactactgcaccaaaaaaatcatggaaggttttagataaatacataagtgtatgaaaagtacacagcaaactgcagggtgctcacatcatccagaagtgaaattctcttcaccttctttaatatgcattaatctctgatcttggcacactcccatctcgacagtgcaggcagccattacatcaaaggtgatggttcattattatttcttcagtgaatcattgtttgtctgaaggaagcaaagataacaaagaggaaattatagtttgtgtggaatgatatgattgcttgtaaaccaagccataaaaaggaagtatacgtgagcaattgagaattccctctctgtcctctaactgcagaaactgagcaaagtgagcagtgtatgccctattaacattttaattagggtgggagacagacaccgaagcattttccacacctgagaaacccacaattttcttgttatagtgttgattacacccctggataactctgtggaataccaatgccatgttgggcaaatcaatgttttttttctagttctgattcacataaaagttcagatgagtctgtgaatatgggagggagcagcagaaagaccagtggagaatgcagcatttgtatggatttctgctgatgtccctagtactgctttgtccatatattacttggatgtcagctgagattatcctctcctgtaatatttacctaaaagtgattgatgcaaaatgcttttgacagattgtggcaaatctaacgtctttctaaggacctccttctagtttcatgatcacctctgactttgaactcctgttctgtcaatgtattcagtttaagaccaagcaccaccactagaccatatattacctgtgtttaaattagaaaaggataccgcctctgaggtcagtttacttccatctgtcagaaaattgtcataacatggtgattttggtagaacaagacactgccatataatggaaaattctgagaaatgcacagatctgccatacctagaatttgaattgcctgtctacacatacatacatgcacatgccacccttgggcaatgcacagctgtatggagccctggaagagcatctccccatcttgctctaggggccatttcataacacattgggcaggatttggaactcagcatttttcatttaatttccaccaaaaagactacttacatatggctctgatgtgcacagattttactaaaattttaaaaaagcaaaacaagctaaaattttacaacaaatattctgttccaaaaaatcctgcggctacgttacttagaactctatcttctctagtggactttccttctttcttgcttttcttctccacttttcttctccgctttttactcctaaccccctagatttctagattctttctcatatgtatcactttagttatcttcttagttactcaagtgactatagactaatgcctcaggattttaccttttcttccagctgcctatcaaagtattttctcaaacaaagagaattccttccctaagagaaattctggggcaagcaatcagaattttactttgaattttattgcaaatattcaaagtgtaattaggattagttcagtatagcagcttgtttctatttacttaaaattctgtaagctgcaaataggaaggaaactttaagggaaaataattattaataataggagttgaagatgcaaatggcctttggatattagctggttcaattctgtcatactacaaatggggaaaccgaggcctagagaggtggagtgacctgcctcaagtcacatagctaagtagggtgttcagcattggaaccaaagtttcctgacccccgggactgggtactttctggtatttgacttcctcaaacaccatttaatctctgctttgtgttctgatcacatgccagcctgatctcatgattactagaatcttgacattagagtcagacagtccttaccctaccacttattaccagggacttaacctctctgagcttaggtcttcccatttgcaaaatggggatgctaatatcattacgtaagaaaatccaggctgaaatgcactcactgggttttggaaggcttgtcagaatttttagagtcctgtatttcatccactcaactaataagcacatcttacacacgtttagatattagaaatgcagagacgaacaagctatggtcccacctcagtgaacacatcacctaatacatgtgaaagtcagtcttataataggcctatgtgaaaggggaaaactgagaagaaaagatgtgtgtgctgtgtctcaaggcagagtcaaaattcaccaagaaaatgacaaggtagaagcacttcagcagggagaggtaacattatatggtattgcatggagacatgaaagcacatgcataatgctgagacaggatagtttccttgacccccttcatgggcaggaactggagtgactcgtttcactcagcctgccactggccactcctcatgggagggagtgtgccagcgagtgagtgcaggaaccagagtgaaggaacactggaaccagccggtcgctcctctctggcagaagcaggctctctgtgggccctgcagcagtgtccaagcatggtatagccaaaggtcattcaactctgccatctgcggagggccaagtgccaatcagatcagtaggggatcagggtggcagccactgtcctctcggcacccaggttcttgtccggcgttcaggaagaatcaggtcacacgaactgtttgaaaggtattgaatgccgaagactttactgagcggtagtggctctcagcagaaaggctggaaaggggatgggaaggtgatctctcccagaagcccagccatctccatccaggcccctctctgaagccacattgtctgaagttagccacaactgtccttagtctccaaggctcagttgcttctctgctcactgctcagttgcttgtatcctctccacgcagccactggtgttgctctgccagctgaagtcttttatgggcacaggataggggtgggccaggccaaaagcagtatttggatgaaaaatggggtcagctgtttttacttagtgctgcggttccaggcttaagggtggagtttagctgggagaatagcccttctgtatcaatatgttggaagtatgatgaaaatgtcaacagggtatttggggcagagagtgatagatgattatgtttgacgctggagaggaacattaggtctggatgataaagagtctagaatgtcatgccaataagtttggatttcaacctatagatgatgggggagaacaaacacaattgcaaattaaaagaaactctaccatagtcatcattagaatggtttttaaaggtttcattattcatattcttgatttattctcaatttgaggttactttactgatgaaaaagttctaagttgtccatctaaaaatggtttatgtcaaatgacgttgccaaagcaaatgctattatgaaagtgaaaatataatctcagcaggcgtttatttaattgagggccagcataatgaaggagtttactgtacctaaaataacatgttctcagccactggatttaatgaaaacctgcttagaatctatataaaaagggtaaaaattgagttgcattttctctctggtatatttctcaggaactgacttggtaaggatcaaacatggtacatgttactgacttattcaaggatttgtaacttaaaaagagagaaaagataacgtagaatgtcactgtaaataaaaatacatagctgtggccaattatagctgtttccacaactataatagcataaaatacacaagtagtaaatgtataggtttattctcgttgagaaataaaatgctgttttcacataggatgttatgggcatctgaatatttaaaaataagattctggaaggcatgagcagaagtgtacaagttaaataggttctaatgtggacaagtagcaagagtaaaattatgtggaaaaaaacttttaggctaagagaagtaataaaacacaaatctgttgactttcacttgacccctgttctacaaaatcaaactgtataaatgcaaaagtctgttcagcttctgccgaaaaggcagtatacttcagacttgccttagggttaacacagtgaccaagacaaaaagaatgtagtatggacaaggaacattaaagttctaagtagaaagctgattggaaatgtaggaagaaaccagcacgtctaactgtgaagagagatggaggatatcatttgatcagcaggggctgggttcttcaggcctttgtggtattaggggtcaaggaccaggggaggcttagtttacatttgagaacacttaataatgactttggaagcaacattagtaccgtaccgaaggtctccaaagtattgacatagaatgtacacatgcacacagtagaataatgggcattaagcaaagctgatgccagcatttcccattcccgtgcatcctcttctttgcacacattcacacgggaagtttaacttacaatccccaagaaagcaaaggatattaaaacagttgacacattacagtgaaacaggtaagttatggaagggaaaggcatgatttcactaatgtttctctgacagaatggagtggggtgatctgagtgagtgatagccaagccttaaaggaaacagatgtccgagatatatagatgtttagttccatcaaatgaaccacattagattgcaggaaacacctgagtgtaggattgttcatgctgtaagattttattgagttgataaactacataagctttgaaacagacacaagcccatttacttctgcttttgttgcacattcacttttaggtgtatttccttcatctttgtatccataattagccaaaagcatcatgcggacagggtaacttttctttcctctctattttatccccagtatcaaacacagtgccgaatgcatggaagctagtaaatatttgttgaaggagagataaataagattaaatccaaatcagccgacatggttaatcctaagagaagggatgagcaattctgtagacaacattatattttgctgagttatagaaattcttctatttctctggcctgacacaggtccaaatgtctttatcagacaaaaacaaaaaaccttcctggtaagttaattaagaagaatgacaaagccagcagttacaaagcatctaaacccctattcaataccttgaactttgcatttgcatagacctgagtgaaatccctggctttgtcactacacagtcacgtgatcttgagcaactctccttaactcttggatgctcagttgttccatctgaaaagacaaatcataattgattcatctcataaggcctctatgatatttggtagacaaagtgccagcacacagagacatctaatggaatgacatagctattctaattcaagggaaactttcaggagtttaagattaatttagtgagactccacaaaaagttgagaccaaactacaaaaatgacagcccaacaaattttaactcatatgttcactagttgattgtctcgtgtacaaaactgtagattcataagccagggacgaggtttgtcttgtttattcccatgtggtactaagtacagggccctgcacatagtaggtcattaacaaacatttgaataatgaatgaatgaataagtaaatttccacataagatgttatgaattaccaaactagttagtgctctgtggtctacactagagttgatgtcactgagagttaggaaactgtagaaaggtggatggcattctgggtggtggaggtggggaagatgatgaagtgaggatgctatgacaagaaagaaagtgtaacactgctgtagtcagcagcatgagctcctcccaggaggtcatggtcatggatgcttttgatgagggttgaatagtctttcacaccttgacctctgttttgctcctctgcgctatagattccagctatggtgaattatttccagaatctcaaatgctttctcttcctggatggcctttgaacagtcctctgtttggaacacttccgtatcccttttatctataactgcttcttactctttgggtctcagtttagatatcatctccttttgtaaggcttctgtgaacccccaaactgatttcaggctttaatacaatcacagcaattattcatctgtattgtatttccatgctgagttgtttctttcccccagcaggctgggaaaagaccaggacagtctacatttaccagcctctaatacatcacagtcagtatccactgaatgaataacaccattctgagatgtcaagcctcaaagaattaggaatgcttctaaagaaataggaaggttatgggggatggttggggcttaaaactggataatttccggttttagttttctttgaagtagcagaaaacccagtgagtagaaatatctagtaatcaataaagcaggagtactagggagaaaagacagggctgcagtggatatcatctgcagaagagaaagaaaaacaaagggtgaaaaagatatactcgcatttagggaatagaaggaagaagcagagctgacaaagaagtcagatatagaagcttaatgggaaagaaacgtttctcaaaggggtagttgtcattcaccttgaaagcagaagattaaaaaccccttaaaggaaaggggcagatgctgaaaggaaatgggtggtagagtggagtcagctgctccagaatccaggggagatgcgtcgcagggtaagaactcaagtgggctactcggccaagggcagctcttatccaaagaagtcaggcttaggcttgtgttaagacaatggaaagggagagatggaagatggtagaaaaaaaagctcatggaggctgatatgagctagaaagttgtcggtgttgctctattttgtcctggatccttttagtttcttatgcttctttcctgcagggaaatggagttaggcatatgctgtctagaatgctttagaagtttcccaaacattagacgaagcaagctgcagagtgccatagagtagaaagggccatcagcaatcctgatgagcatctttttgccttagtttgtagctcctagggatgtagggtatttcactatccacagaacctccagcttgcttatgtgctgccttggaacccttcctaagcttacctcatgcatgcatgccttgtcaagaagcttacagtacagttggggagataatggggatattgtcatttactttagtgtcttggcagtaaccagtatctacagtacctacttaacaaatgtttagtgaagtgaagtcaagctgggctgatgttcttttatgccatgaggcctgacatacacattctttcttctaagtgaataaaaaacactttagtgggagctaaatgatgaaaacacatagacacaaagaagggaacaacagacactggggctttcctgagggtggagggtgggaggagggagaggggcagaaaaagtaaccactgggtactagacttatcgtgagtttacttaaataacaaacttgcacatatacctctgaacctaaaataaaagtttttaaaaaacacttttgaaagaattttactcttccatgaattactaagaatagcagctactatgtattgaacaatgtgtaaaacactttacatctatttaatcttcaaaacagttctatgaggtaggttctgtttttatccccatttcattgatgaggaaacgaaggcctagaggggttatagaatttattaatccaaggtcatattgcatgtaaatggctcagctgccattcgaattcaggtttgcataaatctaaagacccctaggttagcctgctcctcacatggtcatttcgtctctgggcctctccataaggcatgtacccagaaaatgtcaggactatggtaatctgcaaagccactgttctcctacctttttcctcctttgccctccagccctggtagaagccaaggttgctttgtgattagcacaaacactgtctcatttagcagtagaaccctgatggatagtctctctaggcaggctagtatcttgcacaccatgggtcccagctgtcttcatccttgaacagaatccctgctgaacacagaacagccatagtacttgatacaaagcttactcagatgctgacaggtttgtaagtgtctaggggacaaagcagcagctgattattaaatttcctttagatccatcaaatgatttaagcaaggtgcttcgaggtaaccaatttgagtaactcctttgagtaaccggggacagctctgcttgaatctctgatcagctttgttttagaaattctataggcaaagccaaagctacaagagaatttgatctttaaggacttcacagggccagtccttaaaactgaccatttcttttcccgttgtcagccactgtcagaatttaacaaccgtggctgtgatttattaacgtgtctgattccctctgggggcagtcccatttttcaaggatatccaatgctccaagcagctctttgcacagtgaccatccatcagaggcacctgcttcagtaatcagcagctccagatatgctcatgccgcaccagacaatgctacaatctcctgggaactggcatgcagagaaataatggatttatagaaatacaccactgtgacaaagtgggaagacagattaagcagaaaaggcagggcaggctagaggctgaggaacatagggacagaattacaggaaaccaagccacacaacagtagctcttaacaggactgtagaatcttaatgcattcttcccacccagcacaaatgtggggggctcagattgggatggaggcggtctaaaaatcagcagaattaaaaagacacattcaagtgaaacaggctttccttgcttcccatcttttcattccatgttattttcttttcctctctgaaaaccacttggcaaggatcatgagacagaacaaaaagaaaaggggaggtgagctatttactgaaggcataaaattcaacttgtgttggcattatgtcactgaactgaatagctatcggagactctctttcctcaactttgaatgggcccaaaatgttactgttatcaaagccgcacattgaagaagacagcagataatgtacttggtaaaacaggcagcctccgccaggaaaatgtgtaacgcttccattcactgaccctcctttccctccgcatcaacttgtgtcataaattgctatttgctgacaagctgtgctgatatgaacccaatgctggttgcagcacaagaaaaacatgccatttacttagtgccagggaacaacagccttgcttctcccaagctgatcaccatgttgctggctggtagagggagaatggatggtaaccatcgttcgttaccagcctaattcccaggtatgcactaccgtagcattagtgaccagaggaaagacattcagctattctaggaagcatgagaaatttttctgacacctaccccagcccttcccaatgtccccaacagatgtactcacaccactatctcactgcacagccaggtgtactacagaacacttcagctttgagttgtcttgataattgtttttaacttctaatttcaggggtacatgtgcaggtttgttattaggtaaactcgtgtcgcgggggtttgttgtactgattatttgatcacccaggtaataagcctaatatcctttagttatttttcctgatcctctccctcctcccaataattattctaaaccagttgctatttttggcatagtggctgacacctataaatatttggaatttaaatattcgttgaatgaaagagtgaccaaatggattttatctgaatgcatttatccactaggttattcacagcaagtactgtttataatgatgggctttcatagatattagctcatttgatcttcataataaccaagcagcagctactccacctgccctcttacttaagggtctttgatagtaaacaacagaaactcattctgattaattacctaaaaggggatttttttaaaggatgtcagaaactccccaaattaacaggaggctggaaagggtcctagagacaggagagaagtaagatggcttcagaaggctcgcaggtagaaatcctgggaaccagcagagtctgatcacagtgaagaaactctggtttctgcctctttgtcatggtagagtcatatcccaggcagggctgccaggctatttcagattgggttccttccccaccccttgactcgatggctctgttggatggtattcagtgaggagaaaatccccaaaggaaatctgcaaagaaggggatagatgctggacagccaaaaacctaccagggctatcatatctcttgtgcaaataggaacattgaggctcagagcttagctgatttcttcagtgttatgcacatggtgcttcaaaaactgattcaaacctgggttttctcacaaattccgtattctttccttttgtatgccacagtcatataatgtgtccatttacacctgaaaacaagttactacacacagtgtactatcctagattggatcctgcattttaaaaagacaaaaagacatagaagactggtaaaatccaaataaagtctgtagtttagttaatagtatgggattgtaccagtgttaatttcttagttttgacaaacgtaccttggttatataagatggtgatattaaaggaggctgggcaaagggtatagaggaactccctgcactatttttacaacttttctcgaaatccaaaattaatccaagtataaaatgttgtttaaaaaacagattgatagctctccttgggcttctttgggacaaagtgacacacatttttggatagccttctgatgcaaggcacatggaattcccgaagatctcaaaatgtcagcctttatacaaaaggaagccatagtctagaaagggcagtaccataccaaaaaggaatatgagggataggcatcatatcccgaaatcttggatgaggcaaaggagatcaagggggaaagtggtacttgagtttatcatttaaaaaatgacgaaatttggatctccaaggaaagggaagtaggaagcataatccctggatcacagaagaatgagaatgaaattaccagtggtgtaggcacatgaaagaccccaccatccaaattgagaatttgggatttcgtgtttgttggcaattggttgaggtcatcagggctgttctgacttgacaggtaggaggctctgaacaggaaagcaaaagacagaaaggatggtaagaagattattcaagattaaagataagagagaattcaaatcagttctgtgtcttaagccctggaaatagtcattatgtgttcatccaaatatccagaactatttgataaagacacgaaacacttgctgttatttatagcagcctagagaagcaaactaaatgtagaatacagcttatgtcttgtagtgtctgtgatatcttggtaaataattctcaaaatattaccccttttagtgtatgaaatggctattttcaaaacataatttttatgttcaaaatatgccgttgctatttaaacacatatttaaaagtgactgtcttccagacactgtcctaaatgctttacaaatattaattcacttaatcttcatattgtacacccttagaaggtaagtactatactagccctgttctacagatgagagagcagaggaaccagggaggaaggaaacttgcctagaattatggagttaggaaagaatagagctgagattcaaacccaggcagcctactgagcccatgctcttgatcaaggtgtattattattgttattatttaaaatttgtggttaaaacagatgatgttaaaacaacagtgggactccaagctaatgagtcttgaaactggaagtttttctggaaaatttggggaaaagtgagcactcaagggaatagaaagaggtggtataagctaagctttggtttgtatgctggtgagttgtttttgagtagagatgtacagcaagaagtcagacttacagaaactctgcccaggagttacagatagcacaaactctcacatctaagcagaagctcatctgcttagatgtgagagttgatgccataataataaaagttattgtcaggaaaacaattataaatagaagacatagccaggtcattagtaaatgtctacttttaagaggaagaaaaggagtatacaataaacagagttagaaggcaatttcagaagcacagaaaggagaaaatcattggtttaatgtagcagagatgccaaggaaaatgaaatccaagaatagtatattggatttagtaacatgaaagtcagttgtatgggaaaaaataggatgactgttaaagtcagatggttaaggagatggcaaggatactgtagtctttgaaagtcaaaatgagatccagagccgggtgcaatggcttactcctgtaatcccagcactatgggagtccaaggtgggtggattgcttgaggtcaggagttcaagaccaacctggccaacatggtgaaaccctgtctctactaaaaatacaaaaattagccaagagtggtggtgggtgcctgtaattccagctacttgggaggctggggcaggacaatcgcttgaacctaggaagtggaggttgcagtgagccgagattgtgccactgcactccagtctgggcaacagagcgagactctgtctcaaaaaaaaaaaaaaaaaaaagagagagacccaaacttccattatagacaaactagaactgcattgtctactaggtacatgtggctatttaaattaattacaattaataaaaattcagttcctcaggcatgctggccatagtgcgagactcaatagctatgtggctgctatactggaccacacaaatgtagagcacttgcattgcaaaaagctcccttgtgcagaggtgaactaaaataagggtcaataaattttttctgtaatagtaatattttaggttcagtggaccatacagtttgtgacataattactcaaccctgccattgtagttcaaaagcagccacagaaaatacctaaaaaagtggatgtggctgtgttccaataaaactgtatttatggacagtgataatcagaatttcaaaattttcatgtcatgaagtattcttttaattttaaccattaaaaaatgtaaagcccatgcttagtttgcatgccatgcaaaaacagatgacagatcagatttggccgatgggccatagtttaccaacccctagattggaatattatggaccccagcaaccgaattagcatgtgctgaatatctgcatatgctagatttgctgaacatgaataaaagtataaaatgtatgtatattagcaccaagtttcatctgttcttcattatccaaatcaataatgcaaatcagagaaaaatacacatcaaaattatatgaactgttagaatgtaaaaggagaagctcttaatatatcatgatgaaaaggaaattttgatgtgtggaactgatattaatatgctagactttcaacttgtgactaggtaactttcattttcacataaaaatcaaattagaagttcacagtaaaaaacaaattcccacataaatcccaatttcctgaaataacagtatttacaatcctaagcattaatcatctcaagactctacaaagtacttaaagaaaatgcagttaagtacaataatgaccttcctcatttataagacaatgagaatgaagagttttcttctcatctaacaattcctatcaattgacagtagttgcctgaagtcctgagatgaggagtatcgtgattgactattaatgtctgccatgggtgacagcgtggggagatatggcacaagtgctagatatctgccattcctgcatcagcagcatgatggagtggggagaaacaaattagattttgcgccagctgaagatctaactctgctatacatgaggctgtttatttttaaccttttattatagaaaattttaaacatatacaaaagagacaatggtataatgaacctctatgtacctatcacccagcttcaacaattatcaactcacagccaattgttatttcatttttccatctctatattgtttagaagcaaatcacagacatcatagcattcacaaactgtttttctgaccagtggctaactgcctaacgtgccttggttgttataaaataaatgcttttaaattgctaagtgttttttagtgtgtaatattaagaggaaatcagactgagataggttatattttagaaagggtctaaaaattaatgatttgttttagaaatcaactgcattgtaacctaattagcctgcaatttgtatgtacaagtttgtagacaaaatttagtgtatgtacttggaagtatgcaaaatcctcaggctcagcttgcaattattatgcactaaccgtgtgccagacactatacacagcacagtcacctccttttatcctcctcagagccctgtaagacactgctatcacaagacaaactgaggcacatgtactaagcagtgaatctgaggtcactcagcccgaaagaggaaaaatcacagaataatgtactgttttaataaaacatggcttccaatacacctaaacttccttagccatattcaaccagaacttataactttctgatgttccatttggtagattttactttttctactcaagctgtgtttgaaactagagtccaatagctacacaaagttcagatatgtctgacaaaaaccttgaagagagacatggagggaaacaagtaagtttagagctaatatttgtttttcattaatcatttgcttttctcactgaccctgtcagagagatagggcacatgctctgactgcctatagagaaggagaccagtgcctccttcatccccagacttcagaaaagaactacatgaactgacctctataccttctttatgctctttcacaatcgtttaatttttatcttgagaaatagttgagaaggtgaaaatgaatatgagaaaatactctttaggaatattagggtgcagatacccattttatgttaaatatttaaaatgttggggacatcaatacatctgttcaacatagtgtagtgatgaaaaggaaattgtttagaggcagaaggaactgacctctaattgtctggttgctcctgagctagtcacttttctatggtcttgttttctcagtaaaatcagaagggtagattgtatcacaaattgcagttgacagtctgtaggtgtttaacatatggattgtagtttggttttggttttctaattggaattagctgccaatacttagaaattgaaggattttctatctttcctggaccctccttttacatggtaagaatcggggatcttctaatagagcttctaccctcagagaggatgggtagcctattattctccccattcttcattacttcttattgtttccctgacacaggctgacagtcaggtgccctttatcattgtacttgcaatgacttgtgatgtatttcactcttacattccctgcctgggccctggagacatctgcaattgcaacctggattttttgaactctaagaggttctatggttgtctggtaaaatataacatctccagtagctaaggctgcaatacattgtctaattaaagttttccagcagtgggagctttggcgtctaaactgcagaactcaccttctcacccaggtcactgtaatttccagaggaagtgctgactcctggatctgggagttgaggtgagcttgttggattctgtttaagtacatctcctctgccttctctttgccttggtattcagcattcactgacagttcctttaaacttcttgggcattgacattcaaatctgaacaatagccaactcgattattctggccacttgctttatcattgtctgtctgtatagtgctttacaatttttaatttttttttctaaatattgtttgcttttcacactaaccctgtcagagaaatagagcagaaattgcacccactgtatacaagtaaggggaaacaagatattattaacagaagtttttattcttcagcctttcctcttaaaaccagaccctggtactttgtttttaaagctatttcctaaatacaaaaataaaaatgtgtttatttaattaaaacatcattctccaagacctaaagacttttagactacattattctcctccccactgcgacataattgaagattgatatgatacatttttttaattaggcccgtctggttttcccactgagaaaaaaggaatgtgtcatctttatgccagctgacttaaataaaaatccacttggatttagccttttcatgctggtgctacaccaaaacaaccagaatgtgaaatgtgaaatatttacctttatctcatcctagagagaaactgtgaattattatagtgaaatatattctttcttggagcactgagtaaatgaatattactgcagaatttttgtgtttccttccttcttaactgcaaaccaatcaaaatgagttcagagaaatctttaggaggaaaacagaggggagagtgccatgttcttaatttcaaaggtactgtgtttgtgtgtgtgtgtgtgtgtgtgtgtttgtgtgtgtgtgtgtgtgtgttggttaattttatgtgttaacttggctaagccacagtaccccaataatttgtcaaacatgggtctagatgtgtgtgtgaaggtattttttagatgagactaacattttaaatggtagactttgagtaaagcagattaggcaccataatgtgagtgggcatcatccaatcaattgaaggccttaatagaaaaagactgaagagcaaattctgccaaaaactgccttccaaattgcatggcaactcttctccagtcctgctgagtttggacttgccagcctccataattgcataagccaactccttaaaataaatcaacctctctcgatagatagatagatagatagatagatggatagatagatagatagatagatagatagatagatagatagatagatagatagatagatatcctactggttctgtttccctgaagaacactgattattaaagcgtatgcatgtggtgtgggtgtgttatatcctataacaattaaggctctacaccagaaattgacaaattgcaaatttctgtaaacagcaagaaagtaagtatcttaggctttgaaggacatataatttttgcatctactcagttctgtcatctttgttgctccaaagcagtcatagacagtggctgtaacaaacagcatagctgtgttccaataaaactttatttataaacataggggctaagaagaatcccatgtcttcctgacttggaggaagatgtctggtttgtgttcatcagacttgtccattctcttgagatgagccactggttttaagtatcagtacctgttttgtcaacatgaaacacttgtgctttctttttctcaaccatgaggcctctcaaggcctaccagccaattcttagccatttacaacctgttctgggtacttgggaaattctaggatgcccctcaccttgagactctggaactgttcatgtggggtcaggagattcgggaattatctccctagttatgccactcagtcgttgctactcagacaccaagaaagacctgagatttgtcattgagacttagtttccaactgtgaagctaagcagtgattcattgttttctaggaacttttcccatgaattaggagaagttccagttgatgctgcacttctccatccagcatcccagagtcctgggccataggcaggatctacattttgaatatgttcttcctcttattcttctcctaagaactgttttggctataggaaaactgttcttacataaatatgtatgcttggagtttcaaaactcttttgctctgactataccatgtttgagggcttaacagaaaacaaaatcttctctcaatgcttgcaatttaaatatttttgctttttttgagggtaagtctcactctgttgcccaggctggagtgcagtggcacaatcttggctcacagcagaggttgcctcccagcttcaagcgattctcctgcctcagcctcctgagtagctgggattacaggcatgtaagaccacacctggctaatttttgtattttcagtagagatggggttttgccatgttgaccaagctggtctggaactcctggcctcaagtgatcttcctgccttggcctcccaaagtgctgggattacaggtgtgagccacagcaaccagcccaacttctgctttcaaaagcatattttagagttaaaattgaagaatctgatctattattctaagatctcttagaaccctcttctctccccatcatccttacacacaacacacacacacacacacacacacacacacacacacacacacacacacttcaccatagaaagacatcctggtttccagacgcttgagtgtctggctattctctggacctattaaacagcacttaacactgacatcttttttttttaacatctgaaggtcacttgcatgtgtaaaacatattgccttagggggtagcagctaaagattgtggggtttcctttaggggtgatgaaaatgttctaaaagtgattatcgtaatgtttgtacaacttcataaatataatgagtcactgaattgcacactttacatgggcaaattatatgctatataaattatatctcaatatagttgcttcagaaacagtatttagcatttggttgttgttgctttaatggcgcagctcccttggacccctgactgtgtgtctgaggagatggacaagaactacttagagacattctgctccccacatgtgtacttttttgttcttctcacatatttcctatacttcaaaaccctccctagttcactccttgcccctctcccccaaatctcatacatttgtgcttaatctagagaatcctgactcctcctttgggaaacagtttaaacatgagctatttctgtgaagttctccttcagcagccaaatgtgagttaaggagccctgccatgtgctcatatactaccttggagtttctctatctctgcctgtttcacactctatcataattgcctccttactggtctgtgagctttgtgaaagcaggaatcacattcattatgtccactagtatatacccagttcctggaagatagtattggatggacggacggatggatggatggatggatggatggatggatggatggatggatgagtgggtgggtggaagggtgggcagacagactgacggatacatgcatgacccactctctaatatatagtttaggattttatttccatgggataaaaactgatggaagcaacaaagaagatgtttctctctctcaagtcaggagaaagaggggaggaagtcacaactcagattagtcattttgtgttttcagaatcttaatttttttgagtagtgtgtaatgaaggttttctctgggcatagtggctcatccacatttgctattataattgacctagctctgctgtcctgctgctttccctgcttgtttataaattggagaacaactttcaacttggtgggagagctgtagtctaataggaacagtaaaatggcagtatgtgtaggacaatttagaaacctcatttcagctcagatggaatgacccacactttctaggcatgaaatcactcataagaacagaaccaaacagaataagaacttatttacaggaccagcagtctctaagcaggctaggggcagatatgacatgttgaaaaagtaaagatttctctggcaactgcctcttctctttctgttttctccctcatggttctcacaatgatctcaccttgctactaactcagtatctcaagcccagctttaaaatattccaaccctttagcaaagtgtagcaatcagctggaaggaacctcggaggccacatggcccaacctgctgctaatgcagaacaggagtcccttccacgggtattctgaacagatggtattcggcttgtgctctgtgcatctctagcaatgattatgccttactgcaggagacaactgatttccctgttggaggatgacttggaaagtttgcttcagagaagcagagtcttaaagtgcacagctctggagacataccagccctggagtcctggttctgctcctaacccattgtgtgtccttgggcaaggtacttagcctaggtaagcctcatttctctgtctgtacaagagaagtcagtaatatccggcttattatattttgaaaactaaattaaaatacacacacacacacacacacacacacacacacacacacacagcatttagtatgttgcctggaacataggaaatatccaaaaagtagtagcttaaaaattaaacaaaccaaagagttctaaaaacattgctaagattgacatgacatttgcagacagaggttaagaacagaataagctccagctaccatgactgttaaagtcatcccagtatcttattctgctctgtgtggcatcccgtgactctacctggatttgaaattaaacattctgaacactttcttagtgaaagagagttaaggatcaagacttactcagcagagacacttttgtatgagaaattgcttgatggctgtctagacacagacaggatttttcttttttaatgggaatcaggtatagagtggggtatctatttttttaagggaaaagtggagtagaagaaggtaaaaactcctgaggtcctgtctgtgcctctgagtcatcttgctttggcaagcctgtggttagtaccaccactgctagtgaatactacttaacaacacaaaatcaaacaaattagtttagaaggaaaggctgttcctttactatcagtacctgcatgcggagtttgatgactacaattgtgatttcagttcatttttttttttctatttctaaagcttgaaattacctagccagtcaaggtgataattggaatctctgcccaatctctaaaagaaattgacttgttcttctcaaacaaaggactattgtttttgatttttctaaatttccttgaattataatcaagaggtatatttacaagtaagaagaccatgcatgacttaggacctagctgtcagttcaggaaaccaaaaaagaaataaggtttataatgacgacaagatccacaatcactcacttgtacttcctgaaaggtgagacagcaccagaccctgttctttagagtagctctgagatatagaggagagagctcttgagaaatattcaagtgtactttgatgggtgcaggggacaaacccttttcaatgtttactgtagtggcattgatcaagatcccaggcactccctacaaaagtggcatttaagagaagtagtagctaagtgaacagtgggggaaagtgtttagtgggagcagaggaggatcagagacaaaagaaggcatgaagaaagaagtccaatctggttggaatgtggagggtggtcttgactattgcctgtccctactccatcattcccgcccaactaaactccatcctcagtcaatctaattctttgtctaccctctgtcttcactggggcagtagacaatggccaaagaacaacatacactcatactaactagtctctctttaacgtcatgattcctaacctcaagtgggttgacagtacagtccagagatcctccaacatgtcttcggtctgttctctgttgtaccctccaagaaagctactgcatacctctcctttctcttcaaaccttcaatattttcttgctatacctccttctcttcttggtagctttgtttcctttttcatggggaaaatataggtgtggtcaaaagatagcttccatacattccaaccacaacatctacctgtgtgactaccatctactttcctccagttaccaggataaactggccatgttcctctctaaaacatcttctcaactcctgcaatgaatctcattcctttgcacctattcaaggatgttatttcaacaggcacctactgtcccctcacctgtatctttgacttttcccccagatcattaccatcagttgtaaaatatattctcatcccctataaaaaaaataatgctgggcatggtggctcacacctgtaatcccagaactttgggatactgaggcaagaagattgcttgaggctaggacttagagaccagcttgaacaacctagggagactccatctctacaaaaaatagaaaattagccaggtgtagtggcacacccctgtggtcccagcttctcaagaggctgaggcagaaagatcgcttgagcttaggaggtcgagcctgcagtgagccatggttgtgccactgcactccagcctgggcaatggagtgagaccttgtctcaaaaaaaaaaaaaaaaagagagagagagaaagaagaaaccttccttaacttgcatatctccccttgcaatcacctcatttatctgtacagattaattatctcatctgctttcatggttttaaataccatccctctgctgatgactcttcattacttacctgtagcccaggacttctcctgtggactgcagatttgtatgtgtggagtccatgggaattggatttccaacaggtaaatcaaatgctaacttagaacttctgttttttctaccaagcctgatttgctactgtctttgctgtctcagtaaatggcaattatgttcttccagttgctcagacatgcataaataaataaataaataatattcttttcatgctttacatttttttggtcagaaaatcctgttatttccatcttgaaaataatatccagcatctgaccacctctcatcattgtcactactactctactgttcaagctgtcattatctcttgcctggattattgtattgtaaatcatcttccttcttccacaattgactgtttatgctttttgtgtttcagtcaaagtcagatcttatcagttccttgctcaaaagtatctaattggggatgggggacactggtgatagagaagggaagagaggcaggggagggaagaccagaggcaaagagactaagtgtttttaaagaattagaccatcattctcagtaaaacagaaagcctctgaagagatttaacaagagactcacctagattttcattttacaagggtgttttgataatatgcgcagacctcaaaaaacagtgtgaggatttttagtaccctttaagatttgagaacttgaagattcccaataaccaatattataatgtatgtttacaaaaaaaagctaaaagtgatagcatctgcatgaattgactatggtttttcttgaggacattaaatagattcaatcctcaattcttaatgcttttatgagaagatataacacacaaaaaatcagataggtagactcagaaaatccatagaaccaactcagtcttatattgtcagattatattagggttgcttctgtgatttgaatctcacagacttaaatgatgttgctcccctgtttgccttgtatgtaagaatgaggcttatgcaggtaaagttcttatcaatcagttgaaattgcctcatccttctctgggtctatatgcatttatgctggtattacaggatgcaattgataataaaatgttgacttagtactttaactattgtttacaacagtgtttaagggctgggtgactaaaatttgcttcattcatgccactgtgccctctgcttggggttaattttctactcctaaacatggaggcctacatttctagtcttccttaacaagtccttattgctcagtttaatattcttctctttatgaactcttttacccttttattataaattctacctgggcatcaagttaatggtacagccaaaatgtggatacttttcctcccaagccatcctcaaacatactcagggcggggaagcgtactgaaactcatcctaataaaaccaaaaccaaaagaatctaactttctttggaaaatgaatctcaataaaaagcagtatgatttttgctttttattcatcaggaagctgccaagtcaaatggctttatacagcttctttttcttatgtggcaatagttatatttgaggggaaattaaatatccaagttttaataaaatgagactttaatattttaatttatattttttgttacccttcttactatgagtgggagacaattctcatgggcctcttgtatttctgcatgtcttttgagtgaggcattagctgtcctttgttttaaactatcttctcaatgatgttgaaatggtgaacagctttaaaatatatagtgtttccctccagagcaaagtgcagccatgcttattgcccagtgtaatgaaaattactatctccctccagagcaaaagccagtaaagttactgcccattaaaaaagatttggtctccctaagctctgggttctgctcctataatataagccactgcatttttaggcatccatctgggcacatttgtgtttacccccacccatgggattggggcaagggaaattgactctgacatgatgttgcttgcaatgcttgctatgccgccagtaataaagtcccttgtttctgacctggaagtctcatgtctcctgctagcatccatgaaactgtgtcaggctaccttgttagcttgcaaggaggatgaaatcttagattcttcacagttattgctaactatgaaaaacatacttttaaataccgttaaaacaagagaaaataaaacagatttagaatctatagtgggtgcttctggaacatgaaacatatgcctcagagtttgcccatacttttcttttatttatttctttttttttttttcttttttacttaagctatccctctgcctggaatttccttcctaccacacgtttatctaagtcattcaacactggcatttggaaagctttttgaatagcattacttttaacatgcatttaaaagatcaatggctcatgatgtgaaaactgattgaaataaagggatttatccttagttacaattttataccatgctaggcaacgcttttactaagaaatgaatcatttattcttttacttgaacatttattatgtacctagcttgtgccaggtagtgtgttgaaccttgaggatacagagataagaaattctccatttgatgaagcccaggagcaaatgaatataaaataacaatataattatgtgaaaagttctgtgacaatatagatcttataattttctcccaccatgtattaatgccttccagagagcaagaggtggagccccacaaaccatggctttgagctgcttttgtggctcagtgtgtaatgttgtggtaccctatgacttttaacctgccataccttcttgtttcattgtcatataccactgagggaggaatgaaccaccatatagacacttatcagtgagaactctggttgcaagtgaaggaacactgaaatcaagtggactcttaaaagggtggtggaaggtaacatttggctcacatcactgaaatatgatgtgagaagcaaatattttgatattgaatgtccagacacttttggatccaggcatttaaatgatgtcattgaaattccactttactctttcctttcccaagttccgttttccctcctgtggcttccattctcaggaaggctcttgcatagttctgtccagatatccgccaggcttctatcctatcatttcattcatctctgaaagaaagagaaataatctcaacaattccaataaaaattctggtcataagtcccagtcacgtgacttggatcacatgcttattcctaaataaaaatgcctagctaagggagtctagtgcttagatttgccaaggaaaggtcatatgactcttcctggagtttgagggaaaagtggatccactccaaccatgtaagctgaacatgtggaagaggtggagccccacagaaattcagtttgctatagctagatgaatgggaaatgaatactgggcaggtaaaaacaacagatgcctatttgcctaaagatactttttattcaaaatgttcaaatatagaaattatatataaaaatatcttgaaatcacaaaatagaaaagtggtttattcgaatattttagtaaagcaggtatcaagcaatgacaagatacaaaatggtatcttcgttttatattgctttaaattttggtctaaactgtataatattaaaatacagtgaaatattagctgcacattttccctcattttattattttttaaattcagctaataatacctataggatgcctatgtggttatgctcaaaatactgccattcacctggtggtagcttgcctagattaaaaaaaaaaaagaaagactttctaaagtactaaccaacctcaaaaccctacccaactatttttttccctattaacatcaacccaaataaccaaatctgatgtgaaagtttgagatagtatggaagaagagaaatgacatcttagctcttccttgaaggtctgtaatttacaacaattcatgcataataatgattcagcaaattttattaaaaacttctctatataatatactgttataggtatccttaatataaagtaggtactttctcagatattaaagttctaatttataaatcgagacatctttttattacaattttataagtaaattgctaaagaaattcacttgtgataatagaaataaggatatctttggcaaattgtactgttgcaaaatatatttgctacattttctgggaggaaatttatactgtcctgtccatgtcagggaatcacgtgatttgctttgactgatcaagtatgagctaaagtggcacatgcaacttctaaccagaaactttaacagccgttggttggttttgccattttctctcttctcctctgctggaatatcagcaattgtcttcatatgtcattgaaatactgggtccttgttattatgacataacaacctaaactgactgatacaaatccaaagattttagaagatactatatcatcttaaatgtgattacccttttgatctgcaaatggagagcccttttgccactctcacctgaaggtcagagagatatagtctgtactgattaagaagaactcaatatcttggatattggtgataagctgtgtgtgattagcttgcactgattctgcctagacattgcatatatcttaaagaagatgagtttctttgtcaggactctgagatcaaaggaattgaatagtcccttactaatttacttcagagaacgctaatatttgactttgtgtcttggccagtcctttagtagtgatgtgacttacatcttgtccttcgctactattttgtagtttcgtgttttcattcatggtgagttcaaatatgtttactaaaatacttcaatcaaccacctggtataatcatattcaattttgtaagaaattctaaggtaaaagtcacttgaaagataaatttaaacccttactattttcttgctcatctctatgaacgatagagaagtttagcatattatctaccttctggatatataatttcaaattatgtgtatcaatagcaggtacaaattccaacccataaggattattatttttaaggacttaaaaaaaattcatgtagatcacccattcttctagatagcataaacttattatcagttaattcaagacatcactgtcttgtcatctcactctgattgtttatctcaattacagtgggattactaatgtcatgaaaggcttttggacagtaaaagttgggtccttgtcattctccacatacactgttatctgccacaatgcttgtatttcccctgatttttgatcattggtctttgatcatgatcagtgtgtagctgtatctccttaaccccgccttaagaccccacactacatccattttcaatgtcacatttctgccacccttaggtggtgggaaacattttgctccttcctgtgtcatactcagaggcacactgaaacgtactccatcagttctctcttccagggagccatttcttcttgaaatcttgacactttgctggcctttcctgggaagagggtagagaatatatgttccctcagcaatcagagtccccagaattacctggaggaatcaatagtctgctcctccctgcactgggaattttcagggaaattggaaatagggactaaggcccattctcaggaactccttattctctaaactttcctctgctgttctaaggtatcctttatctgcagattgttgattcagtctggtatgttactctgactcttccactgatctttcagaacccattgtttataccctaatccagcctttttgagatgcaaaagccaagaacttgaagtcttactgacttcatccttctgtcatttcttacttaaagtaatttgcatagaatatagtatttgttacctgaacaggggaaagaacagaataacagaaagtgacatgtattccaaaaaacacaaccacttttatatcaaaatattattctatcacagatgcatacataaaaatgcatagtcatagattaaacaaaactcacaaactttgggctcttggcatagcatgttttcataaaaggccagacatttttatatataaattaatatttgttttcattggcctttccatctattcctgtctgtataccagggtggcattttagtacatattagaaatctatgccaaccagcatgtcatggaacacattaactggattcatgcctattctattcaataaagttatctctttagactgacatcttcttcatctattataattattactctcagtaaagagtgctagaatgtgcttcaattttacacattttaatgcactatcagatcttactaccagacccagtcttttctcttttaataagggaagttttatggtgattctagacagtaactaacatgaaagagccaaaatgaacaaaatcaaatgaaggatacaagaaaatagaaataaatttgaaataatgtgttccttgtttatgaaaactagtctgtatatttttaataaacaatgaattattcctttccttttaggggtaattttgagaaaaatgttggagtagatcactggacaagccattaataatgtaaattgaatcaataatgatagacactcattacagggaaactgaaaaataacttttaaacgccatttttcttttttcccaaatgagaattctgtgtacctgagaaagcacttgattaagggtttaaaagaggtactaagtttggctctgctagtaataagtaattcactttatttctgtgagctgtattttcttcaacaataacagaagagattggactatgtcagtgtttcccaaagtgtggagagcataccactggtgtcactcaggataattttaggttgtatatcaaataacagagtgagagagccattcttttttgaattctaccatcctgatcctgattaagccaaagattaagtcttgtggtgctagttttggggttacttggtgttacttgttctgctttttgaggataagaacggactttgaaatcagagccttttggtatgtaatagcttctagataaagcattgtgtgtttattgtattaattttttggttatcttctttgggacaagggatgttgatttcccatgtatgataatagaacaaagttgccttttagttttaagaaaagcattctattaaaaaaaaaaaaaaaaggaaatgaaaatgcaggtagaatgtccatgactaaatttttgatactgctggagaggtgatctataaggacatttcatagagttcaatatcattttgttttattttggttttggtcaaggtgaaagacagcatggtataagttaaattgtcctccctttgacttattaagcagagtgcatagtggtaaaatgaagttcagaatgtaaattcagaatataaataatacacatcttctggagcatcagtcttacttgaagacttcaacagctgaattcacagacacataacgaacatacaaacagatgtattgaggaatagatgctaaatttgtttgaatttgcaggataaagcactactcttcaaatacattgtaaattctgcttattgcagaattgagcaaagagaaagtgcactattttgaaggagggaatgtaaatacgtgtgtgtgcgtgtgtgagagagggacctcacagaaatgaagtgaaaaccccaaagagacagtcagatccagaggtttatataccatttttaaaaacagcaataaattcttagagaagtgacaagacaaaggaagacaaaggaaagggttttgagcctctagggcagtgaattctaggaaagtaaacatatggggaacctaatggaaggcaggggttattttagcagggcttgttacatatattcctctcctctcggtaccatctatcagctaataagagcctagagtcttgctgagagcaggtagggggaacacattcacaaagggaaatttatacccctcttttagacaaaaaaggtgaagatagagagctgctttctgtgtctgatgtttctcagttgccttcaactcaaaataatccttatggcagagtgacgttttggatggcatactctgatccccttcaaggacaatatgcagaggtcatgaagaccatctggtgccaaaaatagagaccctgaaattacagagtatttccactgtgagcacagaagtgatccagtcatgaatatatcttggagtttgactaaaaggagcagggtctgaatgaggtcaaattgctcccactcccttccttgttcacctcctctccatactaacactgttgtaatgagagtaactacatgcaagtgaagtacttgcacagagtcacaatggcttgaggcctagccagctccaccttgggagaaaatctgggaagaaaatcaggaaaaaagggtttgtgctgaagacaaaaactgaagagaataagggctggagggaagaattcagagtgatatgaaaaggattaaaataatcctatatacttgagagtgtctggggaactgcttttatatccctgcaagccaccacttgtataaacaatgaattatactcttgcacacttgctttttctcctttctttgacccattagtaatattgccaggaaagaaacgtgggtttgaaaagagcagaaattcattctccaggtgatctgtattgtgtgcttagaatggggcagttgaaacttcttggtacttatgttcctgccgccccctcccccccgacgccgccaccctcccgccccctactctggggaaatgggaagggaatcaacaagaaaagcatactgcatctctaaactccaacttcacagtcttctagccataaaggacttttgatagaagagtttgaaaagcaccgagaaagagaccaggcttagaaagtcttgaagcccttgtttagcattgcagctgtgggatcttgggagagttttcttgcgtcctgagcctcctttccttattagtcttatccaccaaaggttgcaggaggtattccatgcctgatagaatagtggtagacaaaaaggaaactaggagctttttaaaaattcagaaaatgcatatatttatacataaaccaaggcttgatggagaagaggtgctcagtaaatacttagtgaatgattggatgccagtgccaattctgacactctcagaaaaaccagccaaaatgtgcctctttgagaaaacaatatttttataccctgtggcagtattacttggttacaccaggtactttgaaaaatacttccatttttcaaatccagagcaacattctgaggtgtgctatgaaaaagccaaactctgcaaaatattcgaagagatttatgttgagccaaatgtgaggactatgacccataacgcagccccaggcggtcctgagaacacgtgcccaaggtggttgggttatggcttggttttacacattttagggagacatgagacattaatacatgtaagatgtgcaattggtttgatctggaaaggcaggacaactcaaagcaggtaaaggtggattcaaagatattctgattggcagttggttaaaagagttaagttattatctaaagatctggagtcaatagagtgtctcggtttagataagggattgtgaagaccaaagttcttacaatgtagatgaagtctcataggtggtcatctttagaggcaatagatggcaaatgttttctatgcagaccttcaaaaggtgctggactctcagctaatctcttcaggatcaaaaaagacctggaaagggaagaagattctctacagaatgtaaatttactccataagagatagccttgtcaaagagatatattttggtgtaaaatacttttctttctttcaggacctgctatttgtcatgtgatactatactagagtcaggttagaatttggtatcttattgccacaaagggtctgtttggtcagtcttaagatctctgttttaatgttaatactggtcagttgtccctgaattaccaagggagaagcatataatgaggcaagtttgatgcccccttcccatcatggcctgaaccagtgtttcagggttttttggaatccccttggtcaagagggggggtccattcagttctttggggggcttagaattttatttttggtttgcaggtgctttacagtgttttccccatagaggcagagttctagaatttcctactttagtaacatttagtaaacattgtgtgtccacatggccaccattgatgtagcttcgatggcttactactaagttcctgcaaatgtatctctcaatatattccttagagagcaagcacagataagaaggaaagtgaagatgggtaaaaactaactttttgatgcaagcatccctggcacccttcagtatcaacgtaagtactttttaatcaattgtattttgccagaggatgggcctctgttaggagcagtaattgctgcacttcacttcttgccgtgacttcagggaaaggttgaccccaggcactgacctgagtttacttggcaagagatccctgagggctttcatctagtacaatttttgaaatcagcttttatattttgttgactttctgaaattctccaaagcaaaataaatctctctgtagaggtgttataggaaaagggtcctgatccagaccccaagagagggttcttggatctcatgcaagaaagaactcagggcaagtccataggctaaagtgaaagcaagtttattaagaaagtagagagacaaaagaatggctactccatagacggagcagccctgaggactgctggtttttatggttatttcttgatcatatgcttaacaaggggtggattattcatgcctcccctttttagaccacataggctaacttcctgatgttgccatggcatttgtaaactatcatagtttggtgggagtgtagcagtgatgccaaccagaggtcactttccttgccatcttggttttggtgggttttggctggcttctttactgcaacctgttttattagcaagggctttgtgacctctatcttgtgctgacctcccatctcatcctgtgacttagaatgccttacccatctgggaacaggtctcagccttattttatccagcccctattcagaatgaagttgctctggtttaaatgcctcagacagagtcatgacagccttatgtatttctctggccagtggttccaggatggggtaaggtatgccgcaagcttggcagatctttggaaaacttgttcaaatgagctgttggtatagagagtgttgtggcagtcacaaaacactgtcttcatcttatgaagtcatattcaaaaaattaaagtttattttcccaaacaaggtaatgtttccatttaactataccaatcgacttctgtattaggtaggaaccgttgtttgcaaatattagagactagacagatgtgtgttaagaaaaggtagagataaatgtatcagcttgccaggtttctcacagaatccaaggaccaacatccagtttctcaggaaacactagaggcaaggtctgggcttgactccatctcctctttttgctccccagttcacgcagcggagcaaacccaggtctttgtggtacacaccaagcccttgtgctccaccctcggacttgtgtgccattccacaggcccctcttccttcagagcagcattccccaaccccttttccaggacagcctggcttcccacccactgtctatcaatcaatcacctcacttttcctttcattgcacttaaaccagtgggaaactgatgagtttacttgttatctatcccccatacttgaatgtaagcttcatgagaagcttattcatgtctctcttgccatcatctagagagacaaatgcttcccacatggtagggtctgaataaatattgactgaattaatatataaatacaggttcagctgtgagggacccaacaatcaactttcctctcaggtagaaatcccctatgattaggggtagccgggcaggtacaggagactattatgagtgaggagatactccccaaaatgtccactacgacttggctaggtaggacagacaagaatttccttccctacccatcagtgaatgtttgataatttgagtttataaaataaactggcaatagaccagttaacaggaaagaaggtatacatatttattaacacatgtatggacatgggagttagttatacacgaagagtgagactcagaagaggggctaagatgactgaagtttttatattatcctggggggacaggaagaatatggactttgaacatgtcggggggggcgttataggagggagagaggaggaaaggcctgggagtgaaggggtcctgttaggcagatgaaacctctcaggtagcagctctcagaaggaacagacaggagcttgtggtaaacgcttctctgtcagaaccttatattgtcagacttcagcctccttttcctgtgagttaatctttcctagatccagataagaggtcctcagagaaagtctgtttgcatctgttgtttacttcattttactaatgtggatttcctctccagatgcaaatctcccgaacaaaagggcagcttttcaaggctagttttgtgatctgcagcccctcagaacaggcatctcaaaatatgccaaaggagttgagatattctggtttctttcagctaggttagccaacttctagtattttcccaactaaacaaggagttacgtattacacagtggccttgcctttgagctgcttaatcctaatcccttcaccaatccagtgatttcaccagctcaaagagctaattgtggcattcacagaggatcctggtatgagtcccaattgtgtcaactaaatgctctagtttcctattcactccagcatacgtgaaaggaattgcaaattataagcttgggattcatatttataattgaccttcattattcacaaattccatacttgtgaatttgcctgtttctaaactttatttgtaacccagaatccacattcactgtgtttacacatttatttatggacatgtgtagagcagtaagaaattggagtcatccaacatacacactcccagctgaggtggaaccaggtgatgttctgccactttgtttcagctcttcttgtaaacaagcatctttcttcatggtctattgattgccacattttttgcacttttgtcctttgattttgctgtttaaaatggcccccaactatagtcctgaagtgctgtctagtgtttttaagcacaagaaggctgacatgtgccttatagagaaaaatatgtgttagataagcttcatcaaacatgaggtacagtcctgttggctatgagatcaatattaataaatcaatactatttattaaataaggtatctttaaacagaaacacacataaaacaaagttatgtattgatcagttgacaaaaatgtcatgaccagaggctcacagaaacctaagcctatgtttcccctaggagcagtggctcaaaggaaaaaggacttagtacccgtgattccagcattcgaagtgccttgataaaacataactgttgtgattaatgagaattgatcggacgtgttaatccagtgaaatttagttcaagggattttcatacctgtttttatttgctacatcatgtagatctcagttgaagcatatctttttctcaaaacaagccattcagaacacaaatcttttattttttttaatatgcatcctttcagagaatcattctgtttttctttaccacttgtctacattgatcccaggccattggtgtcaggtttgtgagaattgtataaatatatccataaatatcgggagtgcaagcactgttctaccgttgactggagaaacagagattgtatttctttagttcactgttgacaggctcaggaaagggctcattgagccatagaagttgacatttggcacaattcattccacctccagagtagcgaagcttcaggaaaccatcttccattctttctaatgtttctggtcagtcatcatatggcttgccacttgtcttggtcctgaaattaattaagaaataataacggaaaggggaaagtaggaaataggtaagatgaataatgattaaattcaatgcaattattatgaattgactctagagtaaatggaaaggacaggagatgatagcctttaagactggtggaaactcatcagcaaagggtaatttggttgctgaagtcagacttcaaactcagtgaggattatgcagggcacaactgaaaagaaaggtggacttgttacacttgcacaattagggcttgcaaatggtctttttcggtcagctttggcttgctcattatgttggctttcccccatcctgagtgactaatccatgccgccatttcatcatcatcaatctttccttcattcattgtgcatttacttggagctgctatgagtttctagacaagatgagactgagagatgctatattgtgtaaagtttaactgtttggactgtaattcaagagtgcctggatttgaattgcagcttgccacttattaactatgtcatttcagtctggttaattaacctgcctgggcctcaatttccacaactgtgaagtacagataaacaccaggccccataaggctgttatgaggattaaaagagatcatcctcatattgatgctctgtgcagtgcctggcatagagcaagtacttttctgagaaacagaagagtgaccactgtgccaaggtgttcttagaaaggaagagtggtgcaagacaaggtaagcaggtcagaatcctgcggggcctcacagggagccaaggcaaagatgtttaaacaaattcttaaatgtctttgcatggtttgaagcagggcactgacagcattgtttgcaagaaaagaacgtgtattgccgaaactatatttagtataaatgatttttttaactagaaaaatttgcaagacagccttactactccacttttgttcagcctgatcagcctctgagctaccccacagtgctcctaaataccctgacataaaattctgctaggatgcactaactttgatgttgatgataaaagcactggtgaaagaagcattaagatctgatatccatgatgtgcttacccttgtcagtttaacaggcattattttactcaaacctcaccacttcctgccactgtcttattatcccattttatggatgaggaactgaggctagaaatctcacagttaggaagcacctggatttccactgcacattttctgctccagggctcactggtttctcactgatttccagaggggacttgaatgtgatggagacacagccctgtggtcagacaagctgtcttagctctgcctcttgcctctgtgccctcagttttcctatttgaaaaatgtgcgtaataccacctacttcagagtggttgtgaggaatcactgtatacaaagcagtcagcatagtgctaggcatatagtaaccacttcttaaatgttctactatggtcattattttgctgcattgccagttcactatggtgttttccggatctaatgcacagaaggattagaatgctttgtttccttaaaaggcttctccttcccattaaccagctcccttgtctctgagacagcgtgtcatgcatgatagaaacacagcccatcccctgtaaaggactgctatgtcatttacacatctgttcctcctccctcgataggggtggaacagagaagctctttaggcacacattcaggaagctaagccccaattctttctaaactagttttctccatattatgctttttaattaaacctttcaaggtttaattaggaaacaacatgagtcatctttgtttctgaaaatgtatttgtggtttggctaattatgtagtgagatttaatatgatttctcctcatgtgtgaaattaatacattgaatatttttaaaaggaaaacatctaaagcatttacctgggcaccagatggtgagcaaataatcagttcaaaggaattcctcttaaagtaatgctaagaaaagctgtgctggctttaactgggtcactttacataggatgcctcaaagagagagaaacactgtctcttaaccaatacatccattcctgcagcctttagtgtcactccattgcttggagataagatctagctttctttacaaggtgcttcactctaatactgactcccacccaactcgtgaatgctcttctccaactacatcctacactgtcattcttcaaaaccatgacgctccctcatgccttggtggtcttgtacatggtgtggttctccctgcagtgccttgtctcattgtttttggataaacttatctgcatttgagttaacaatatctttattttctgtattctgatgctttgacatcatgggggaattgctgacgctggaggaactgcctcttgcagggttggtgaattcctagacacagcaaacagctgcctacctgcaaacctccttatttcatatgcaaaccatctaatctagggaacatatccaaccacctccatgatcaggctctcactttctggaccactgtctccctcccctaatcactccagggtcaggtgccagacaactggggacagcccctccacccaacaccactgaaaaattcctcaaactagcccatcctaagcttgctatgtctttgcttggtctctccatggaacccacaatagaggctcctgcccacattttcccttcactccctgtgcctcctgaccaacccccaaggctttcctatgtgacccctcttgagtggcatgatatgcctctgcctctagggatctgtaggcataaggttcttccatcctgacagtactttctatgtctgcttgttttaactgtaaccaagatttgtcataattggttatagtaaaacatctttccaagtgcagctcaaaagctactttctctgtgttggcctctccatttctcttccaaagatgcttactgttcacaagctgcattgtaatacaaacatgtctgtcttcctcattaggctaagctttcctaaattccatgccatgttcttctctgaattcccaacctttagcatgaggcctgacataagtactatgcagtacacatgaggagtacgtgaatgaaatgaaaataatacaccctttcaagctgaatccattagtagcagatgagtcagaaaatagtagggtatgaatgtttccctaattctcccaatatgaatgggcactgtaacttgttggttcaaagtacaagtccctcaatttcaactatgccatgtcccaagtatgtggctttggaaaaggtgtttcttctcaatgtgctttggtttttttatcttaaatatagggataataggccaggctcagtggctcacacctgtaatcccagtactttgggaggccgaggtgggtggatcactggagcccaggagtttgagaccagcctgggcaacatagcaagacccagtctcataaaaagaaaaaaatataaattattttatatagggataatagtagtatctatctccaagtgctttaaagatgaaatgggcatggtggctcacatctataataccagcactttgggaggttgaggcaggaggatcgcttgaagccatgagttcaagaccagcctggcaacaaagtgagaccctatttctaccaaaaaaaaaaaaaaaatgaaagaaaaaaattagccaggtatgttggtacatgcctgtagtcccagctacgtattatattatatatatataaagatgaaaagaaataaggccacaggtcttttgacaaactctttgctctacctgtaatactcttttcttctcctcctctactgcctaacccctccttacccttgatgtcacagccccagggccactttattagagaaaccttctcttatgtttatgtatacaaatatgcacacacacatacagagagagagaagtggaaggtggggaaaatagaaaaagatttattttaaggaattgggtcacacacttgtagaggcttggcacacaaaattttcagggtaggccagcaggtggagacccaagaaaaggttgcagtttttttgccaaaagactgccttttgatacaactgttgttcttccagggaagtcagtcttgttctattgagactttcaactgattggatgaggcccacccacattctggagcctaatctgctttactcgaagtccactgatataaatgttaatctcatcatatattatagatatatatatgatgtatatatacacacacacacacagagaaacatctagaataatgtttgaccaaatatctggacaccgtgtcctagccaagtttacacatataattaaccattagagattgtaacctgaatgagggcaagattcagtttaatatgcctaactgctgtatctagcacattaataattatttttcgagtggacatacagtactgcagagtacatacctaaatgcatagtctgtggtggatggtgttgcactatacaatagaaacttaggaaacagccaggacccagcaatttaaacggctgtcatatgatgaaaggaaagttcccagaacatccactagtgaaggtctgtaagaggggtgataggtagagggaaccaacaagatgaccctttagcctaggccctaagcacagagggtgacggcagtcaaagaaacttttttttttttttttggctatctgtcagtttttgtttccaaaccccaatgtagactttaataagcagagctggatcacacttgggtcacaaggattacacagttctccttaatctccttttaccaaagactgacccagagagaaacactctctaacagaggcccacctcaaatgccttactgctccttccaggtacttagctcctaccctggtagtcccagaagctctacccctgccttctctgcaggagggaatgaggactggcagaactttcagatgccacaaggagccaaaagagaccacgtttgtgtacatcactttttatctaagtgtttcaatgaacagtcaccgagcatcaattcaacaaatggatattgagcaccaattatggggaaaggagatgcaacaggccatataactaataagcaaaggtcaggcaggaataaatattagggagaaaaaagaaagtaggaccagtaggaaggtgagcatctggggaggattctgttataaatgggtggtcaggaacgacctttctaatcagctgacatttaagcatacacctgaagggactgagccaagtatatatttggggaaatgtgtttgtgcaaaggtcctgaggatgtatcatgctttgttcggggaagagcacagtaactgatgtatctagaacagggtgaaaaaggggaagaatattcagacaggaggatggagaagcagcacggagccagatgcaatgaagcattctggatgatgtaaagactggacctctctccctgtctgaggtggctaccacctgtgggttttgagcaaaggcctgaaatcagggtcatgaagaatcaatgggtgcccagcagagggcctgtactctgaaacaaaaggcaatctcccaaagaaatctttattttctaattcactcaaagttaccttttgctcataaagtttgctttctaaggattactactttggtccagatgtgccacctttattacattctggcttctgtgaggagaaatgactgtgggggcagggaggaaagccaggagatcagttaaagaggcttttgcaaaacccagggaagataggatggtgccttggactaggatggcagcagtagacatttcgaaaagtgcttagattttgaatatatattgaatgcagagataatgggatttcctggcatgttagtgtgtggatgtgagagaaaaggatcagtgatagcctcaatgattgtagcctgagcaactggaaaatgaggctgcacacagcggaaacggggaaggctctggtggggcctaggcctggagagttggggaggggaagaaatcagaagtttagtgtacatgtgttaagtttgagatgttttaagttggatatacaagtatggagttcaaggcagaagatgtcagtataggagtaatctgtgtagagatggtaaccaggccaggatactggttaagatcacctaggaggtaagtattgattaaggtcaggaagatgaggaggaaccagtatataagtctaataaagaactgccagtgagataagaggataattgaaagagatgttccagaaggccagtgttgatagtttcaagaaggaaggaacaatgaatggtgtcacatgctgctggaagattgactaatgaaactggcactggaccgttcagttttttctcatcatggaaatggagagagctaaaatcaccaaatatttaaaggagttttgatatcaaagggagagaaattaggcagtagttgaaggggaatttgggatcaatggatctaatggagcacatctgcatgcagattagagtgaagcaagagagaaagaaaaattgatgatacagaagagaggctagcaagatggtatgctcaagtggggaagagaagacccagagtgtgagcaagggctgaaccctagcagcatggagagtccatgtagagcaacagggtgggagacaaggtgaggactgatgcagagtgagtgggtgttgggaatatatggaagtcctcttctgatggttgtctttttcttagtgaaataggaagcaaggtcattagaaaagaaaaggaagactgtcacatctatatcaccttctcttttgattccagtgtctcccaattggaatcccaaagaaccagagcaattgattacaaaagtacttggcaactgaaaagcatgatcagtcgcagaaataatgattatttcttgaatgactgtgatctctataagccttgagtgccctatagtttattcctagagcgaaatcatatttcactggcgaagtaatttaggaaggaacgccattctgctgactaactcagaagcccacagtgtagtcgattctccttttgcctcccccttgtctcttttttattaagtagatcaaattagcctctcctctcaaattgcatctcccaatactgaaagctctaaagaaaaacaacacacaaacagagtagcaaagacaaattctgcaaatgaagggaacagaacagagaagataatctgagcaggcaagaccaagtttgattcttggcagacataggaggaaagaaagctgtgaatactcacacattaatgatttttatattgtcacaactacaatcaaagccctgatgacagtgttgtcataaagtctatacagccactactcttggcttgggtttactgtgtatcctgggctacaggttcagaattcaccatgataaattattccaagactgttcaagctccccttatcacactgtgttttagtatctcttcccaagcctaaaatacaatgtgtacttttacaccaaatatagaatctcagagaaagaagcttggagtttatcttatccaatgcttcttccagttccagaattattcttatacattccctggcagccagccatttgtactttataaacagcctcagttataggtcgaccattccacttatgggatgttttgtattataacaagctgaaatctctcccttctacttctaacttttgaatctttgactactctctggggccacacaagacaacacacatcctatcacctttttgtggggacccagccaccatctttcctccatcttgcccaataaaggtgcaatcactttctgaatcacaaatatgtcttcatttagggtaaaagctttttgtataatctttgcttgctagtaaattagacatttaaaaaacgaatatgcctactggaagtgaagttctgagtagtcctttgcctagagagggttaaaagcttctgtaatgccagcactaccaaatttaacggaaaggacagaactggatgaaattatattttaaatgatatatctgccaggattactacaaggaatgaaagggaaggagcaccaagttatctgagattgaaaggtaaaatgagggagagttgctcaccctgcatcccactgaactgtcacctccatcctgctcctgaacatctttcctctgtcacacattcattcagtggctgcaggctccaatctttgagctaggtgccagagtttcaacggtgagcattctttcacttactcattcaacacctatttattatagacttaaacgttgccagcatcatcctaccaatgggattagcagtgaacaaaacaataggaaaaaacattcctctctttgtgcagttaatattctagtgaggagaataaatgaatccagcaataccgtaaatatatgcaaaattgcagcagttaaccatgctatgaagggaagattcaggatgctacaaaagcatgtaatagaaggaacctgagctagttcaaatgaggaggaaagcctcccctgagggggtgatgcttgacttgcgctcttgaggatgagcaggagaaggactggcacgggagtggcatgtatgagaggtgaaaggaaggcatgatcaaggttagagatcagaggtaaggaaaatccagacaacgcagggcttgtgggccatgttaagttttttcacttgttagctgatgagcagtgagagtccactgaagtgttttaagccaagtgtgtgtgtgtgtgtgtgtgtgtgtgtatgcatgcatgcataatatgagcaaatttgtatttataagagatcactctttctgcaatgtacagaatggatgggaagggagcacggtgaaaatagagttaggaaattattctcatgttccagaggagagatggcagtgacttggatcaaggtgatgacagtgggtgtaaaaacacagtgacagattaacaagagtttgaggaggtaaacccaaattgtgatgatttgaatctgggaggcaagggagagcacgaagactgtagaaatctctggccaggcctgtcatgtgcacagttcagttatctggcatggaagataatgcactgcaccagggtaggcactggacattgttggtttaatatgatgttcacataggacacctagttactgttatgtaaccaatggagcaagatgtaactgtggcataagaaaatataactagatacccgggcgtggtggctcacgcctgtaatcccagcactttgggaggccgaggcaggcagatcacgaggtcaggagatagagaccatcctggctaacacggtgaaaccccgcctctattaaaaatacaaaaaaacattagctaggcatggtggcgggcacctgcagtcccagctactcaggaggctgaagcaggagaatggggtgaacccaggaggtggagcttgcagtgagccaagatctcgcctctgcactccagcctgggtgacagagcgagactccatctccaaaaaaaaaaaagaaagaaaatataactagatattattctagtggttcagctttctaaagacttattatggtggttgtttacaagtatgtgagttaattgtgctagagtttcagaatgatatgtttaaggggtataaatatctataagcccccagttaggtcttcctgcaaactggcaagactacacactgaagagacagaatcccatagccatcaatccatgccaatctggagagacttgagaaatttctcctcttatatatcctccagcttgagatctcttactttgctaagaatgtgtttgtttttttgtacttatggcagtaaaatataatgtaagatgattgaaattccagcatgctcatttttctgaggtttcacatagtgctctgttggacttccacagcatcagaaatggaatcctaggtagtgactaagggtggcgatgccactcactgggaaaggaagttctgtaagagggtcagacttggggaggaaatgccccagttaatttggggcatattgagtttgggtgtctaagatgaaacacagtcatggagacgttgatcaacaatatgagtctggagttccaaggagttgtctagaatgatggctctaagaatgacttacactgtctcaggggagaaccatgcttgatcaagaagcgttgcatatcagaaatgctgtagagagccatttctgcaaggaaggttgggccagggcctccttactctgaggttctatgatttattaatagatattattaaaaccacttgagcatctgagtaaagctgtgttagccctggatgaactggttagaaagaaacaagactacttcagccagcttatggaaatgtatgaggaggaaacaggaatgtgagatggagtccagagccagctgggtctgatgggttccataaataagaactggactccatctgtaagacagatgatccctttctctggagggaaaggtccttgcttttgctggtgataaaacaaaatagccaccccaaccctagccagagtggccaacagagattggccaattccacactcttgccccaggtaaaatatcctgccagcccatttccaagtatctcagtccagggagtctgcccactgcctgctcagcaggggttatgggaacagagtttctcagaaagggcattggcaggcttgataaattgactaacgtgtctgcacacaatataatgaatgatcttcccatctttgaagaaaaaaacaaactttctgctttccaatcaacaactcttaattatctttatggttattaattcgtacatccatatttctccttgatagtttattactcttatgctttctgtcaactattttctatctgtcactttccagtactggatattaacgtttcctttctcaaattctagtcatctccaaagcattttgcacttctcaattgtatttatgtcactgtttgatcttgttttgtgtctaagtaagtggttatcttcttgtaatccatcttgaagatggccgtactgaaacattctgaaattcctgaaatattttagaactatttgcatcttgttttcttttcagagaccttgcctattacaataattatgaggagggtcagcctcagaccctaaataaaactgccccctaagaatgtttgtctctcctgaaaatagcacgggcatctggacatgtccaaaacctaaccccttagcttcttccctgttccttgtgctgtgttgtcagacttaagatataaatctggttgtcatccctctgcgcattaacctctatcctacataattactttctaacttgtgtaccacactctgcaatcttctctatcctgaagccagatggtctctctaaacacagttttaccatgcctaccatgaaattcactgtttaactgcctttaaaggaaagaccccatactcctttcttcagccaacaaggttctaatggcctattcacccctctccaactccctgggctttaacaaactctttatgctccttcagcctgacgaagtcttttttccatctcctgtttctttctccttaaggtcccctcctcaagcatgggttagccgcgccaggcccagctcagattctccatctcattctaattctcttacaataactgctttttgttatatttcaatggtcaggtttgtcttccacaggagaggaagtgtaatcagtgctgatgttagggccagaatggttgggttcaaaaccaagttttgctgctacatatctgtatgattgtggtcaagttacttaacctctctgtgcctcagttttctggatgcaaaacagggatagtaatagaatctgttaaacagtacattgtcctattctctacatttagtactatggtaacacataaccaagcctcaaatatctataggatagtgttcaaaatgaaggtaatgtttattcaggaccattgcaataggttcagggaccactgcacctgcggttttgcagccagggagagaaattgggctcaactctaaacactgcaagttgggaatgtacagccaagtagcagggtgagggtcaatggatagaaaataactaagaggaagcatcaggggtgagggagatcctgactcaactgacccaacaggattcttgcagagaaagaccaggtgatcagacccagggggatggtggaggatgaggaactcaaactgataacaagggtagcagggggagttatttctaaagctggattttacaaggagtggggaaaagaggcataaggagaaagttcagaagcccaactaaaatttggtcaagcaaagaatctttgtcaatggacagccagtgttcaatatttgattggagatagaccaagtactaccttctggtcaattgttaaaaacatatagaactgaagaatacctaggttcttaaaatgattcaaaatattagcaaaaactcagcagaagttggcaaaaataatgttagaatagcagtgtttccaagtatatgctagaaactaaattcttaagcactctggaaataatacaaaactgtgaagttagatctgggtttttttctgtctatcttggtttcttcataaatgagaataataatgccaatattacatgagtcatgaactaaataagattatatgcataaattacctatcataggacttaatagagaaggtaattaatacactgggtttcccttgataaatcaccttccatctttcatacaaatttattttcaatgtaaagtacaaaaggcagttggaagagataagaacaggtaaaactttcctgtttaccctgtgaatgttaaatagttcaatccataaacaatacaacagctaacattttgaaatagcaaagtgtgctggacactgttctaagtatcttacattaaatacctcaattatcctccccacaatcctgtgaggtcactactagtgttatcctcttgtaacagttgggtaaactgaagcttggagaagttttcaaagaagaccaaaagataatcagaaacagagaagaataacttcgtgacaaatctcagagtccattctgaaacccatggtagcattgaacagggaaggaagcaatctcaaaatgatagattttcctttgctcagaaactggaattctcatagtaatggtaccttcttcctctctctcctcccatgttcagaaaaaagttactgcatgaggtagagcaacctggccaacatggcaaaatcccgtctctaccaaatttccaaaactagccgagtgtggtggcaatgcctgtaatcccagctacctgagaggctgaggcaggagaattacttgaacccaggaggtggaggttgcagtgagccgagtttgcgccactgcactccagcctgggtgacagagcgagactctgtcaaaaaaaaaaaaaaaaaaaaaaaaaaaaggtagagtcactgcacatgcttagaactgatagaagcttgattcttttttatcagcagtgcccccccaccaccaccccaagataagactttttaaaatagtggctaacatttttctgtcataattatttatttcttagccaaaagataagccaacagttgcttagagtagcatttttttcaacttcaccgtgcacaatggtctgtgtgactttttccctcactaccccaggattcaaacacattcataaacatgctccaaaatcacctgagttgcaaaaacatcacttgtataaaagagttgcaccataactgatgattgatgttgtctaacccagagaactatattgcaatgaagttgaggattaatcgttaaatgtgataataatcctctatctttgtttacatctgtaattaatgcagttcaggaagaagcccttgaaaccttatgtaaacaaggtctatccttactggaatagattacagccatatgtcaccgttcaaaaggtaattggtacatttcattagaaagtaattgaaaaaaattattttaatgcctcataataaataatcctgataaacattattagcagagatatctgtaccatgtagagaatttgctttgcatcaaaagatggcatatgctatatatcattcttggatttttctgaggagcttttacttgccttgtgattgaataaagactagtacacaattacatgcgaagctttcctttgagaacaagtccttcttatagccacatgcctttaccatccccctgactggcattgacagtaaggccttagtttactctctatctctccggtgaaaatctcccacgtgtattaacagaaatacttctaacagtggcttaacgcaaaggcctcagaggcagtgagactaggctgtgagctctcatgctttagctacgtggaattgatgatgggatctatctctcagggttgtagcaagcatgaaatgggatgatacacataaaggatttaagtaattcttggaatacaagaagcactcaatgaatattactaaatgatatcatcattatcttttctatcagtgtcttactgcctgatcttttaagattagccatcccaggctgaccttttatttaaattacattataaaatcaaggttagtatatataagtaatttttctccattcagtaaaatgtgcaatattctcgttaccagccataggcagaactaaaaataacttctaacatcccatgtccccctctcctcagcaaggccctgaagtgaaaacagaacaattctttttagagtttcataactttgtgagctactatgtagattaaagccattccatttagttcttcaacaaaggaagtgcaaaaatcccaagaggccaagtaaaatgaaattatacttctgacagggaaccacctgaaatatcaaaacaatggccaaaaagaggcaagttaaaaatttttcattgtgcatctccaatacttcagcagcatttgagaggttttctccacctcctttcacaattgtaccacaatatagtccagacctacactaaagacaatatacacatttattacaagtatataattagaatttttattacctttaagattcagataagtgaacacttatccaaaatcacaggtctactaagtaaaatgtcagaccctagattctgtgcagttttttttagcttttatgtgaagttcaggagtacaagtacaggtttgttacataggtaaacttgtgacatgggtgtttgttatacagattatttcatcacccagatattaagcttagtaaccattcgttattttccctgatcctctctatcctctcaccctgccaaaatgccccagtgcatgttgttcccctgtatgtatccatgtgttctcataatttagctcccatttataagtgagaacatgcaatatttggttttctgttttgtgtttgttagtttgttaaggataatgacctccagctccatccatattcctgcaaaggatatgatttcatttttttatggctgcatagtattccatggtgtatatgttccacgttttctttatccatgctatcattaatgggcatttaggttgattccatgtctttgttatggtgaataatgctgtaatgaacatatgcatccatgtgtctttataatagaataatttatattcctgtgggtatataccctgtaatgggattcctgggtcaaatggtagttctgtctttaggtctttaagttctgtctttaggtctttaaggaattgccgcactgtcttccacagtgactaaacttatttacactcccaccaacagtgtataagcattcctttttctccacaacctcaccagtatctattatttattttttgactttttagtaatagccattccgactggtgtgaggtatctcattgtggtttggatttgcatttctctgatgattactgattttgagctttttttcatgtgtttcttggccacatgtatgtcttctttttgaaaagtatctgttcatgtcctttgcctacttttaacgaggtttttttgcatctgacaaaggtctataatatctagcttctagaaggaacttaaacaaatttacaagaaaaaaacaagcaaattttgcaaaaatgttctcccattctgtaggttgtctatttactctgttgatagtttgtttctttggctgtgcagaagctctttaattagatctcatttgtcaatttttgcttttggtgtttcatcattaaatctttgcccatgcctatgtcctgaatagcatgtcctaggttgttttccagggttttcagagttttgggtttcacatttaagtctttaatccatcttgagtgaatttttgtgtatgatgtaaggaacaggttcggtgtcagtcttctgcatatggctagccagttatctgagcaccatttattgaatagggagtcctttttccattgcttgtttttgtcaggtttatcaaagatcagatagttgtaggtgtgtggtcttatttctgggttttctattttgttccattggtctgtgtctgctcttctaccagtagcatgctgcctccagctttgttctttttgtttaggctattcgggctcttttttggttccacatgatttttaaaatagttctctaggtctgtgaagaatgtcaatggtagtttaataggcatagcattgaatctataaattgctttgggcagtatggctattttcacaatattgattcttccatgagcatggaatgtttttccatttgtgccatctcattgagcagtggtttgtagttctttagagacatttcacttccctggttagctgtattcctgggtattttattatttttgtggcagttgtgtatgggagttcactcttgatttggctctgggcttgactgttgttggtacataggaatcctagtgatttttgcacactgattttgtattctgaagttgcttctcagcttaagaagcttttgggctaagaccatggggttttctagctatagagtcatgtcatttgtaaacagggatagtttgacttcctgtcttcctatttgaatgccctttatttctttctcacctgaatacccaggtgagaacttccaatactgtgttgaataggagtggtgagagaaggcatccttgtcttgtactggttttcaaggggaaatacttccagcttttgcccattcagtatgatactggctatgggtctaatacttagtttatcgtgtttttaacatgaatggatgttgaattttatcaaaagccttttctgcatctattgagataatcatgttgtttttgtctttagttctgtttatgtgatgaatcacatttgatttgtatatgttgaaccagccttgcatcctgggattaagcctacttatttgtggtggataagctttttgatgtgctgctggattcagtttgccagtattttattgaggatttttgcatcaatgttcatcaaagatattggcctgaaggtttctgtttttttctatctttgccaggttttggtatcaggatgatgcctcatagaatgagttagggcagagtccctcccttctcaattttttgtcacagtttcagtaggaatggtagctcttcttcatacatttggtagaattcagctgtgaatctgtctggtcctgggctctttttggttggtaggctatttattactgcctcaatttcagaactcgttattggtctattcagggagtcagtgtcttcctggttctgtctagggaaggtgtatgtgtctacaaatttatctattctagttcatgagcacagaggtgttcataatattctgtgatggttgtatttctttggggtcagtggtaacatctcccttgtcgtttctgattgtgtttatttgaatcttctcttttcttctttgtctgcctagcagtctacctatgttattaattctttcaaaaaaccagctcctggattcatttatttttttgaagggtttttcatgtctctctttcagttcagctctgatcttgctttgagatttgctagctttgaggtttgtttgctcttggttctctacttctttttggtgttggattgttaactagagagctttctaacttgtccatgtgagcatttagcgctatcaatttccctcttaacacttccttagctgtgtccccgagattctgatacattgttcttaataatttcaaagaacttattgatttttgccttaatttcattatttacccaagagtcattcaggagtatgttgttcaatttccatgtagttgtgtggttttgagtgattgtgctttggtttgagagactgttattatttcagtcattttgcgtctgctgaggagtgttttacttctgcttgtgtgatcaattttagagtaactgccatgtggcaatgagaagaatgtatattctgttgttttggggtggagagatctgtagataactatcaggtccgtgtaatttagagctgagttcatgtcttgaatatctgtctcaatgatctaatattgtcagtggggtgttaaagtctcccactaatatagtataggagtctgagtctctttgaaggtctctaagaacttgctttatgaatctgggtgcatatttatttaggagagttagctcttcttgttaagttgaaccttttaccattatgtaatgcccttctttgtattttttaatctttattggcttaaagtctgttttggcagaaactaagattacaacccctgctttttaatgttttccatttccttagtagactttcctccatccctttattttgagcctatgtgtgtcactacatgtgcgagggtctcttgaagatagcatacaaatggatcttggttctgtattcatacatgtgtatttgatcctctcatcatgatcttagcgggttattttggagactttatgtggttgctttatattgtcatcagtgtgtttttgtagtggctggtaatgatctttcttttccatatttagtgcttctttcagagctcttgtaaggcagattgatggtaacaaattctctcagcatttgtttgtctgaaaatgatcttatttctccttgtcttatgaagaattctaggttggaatttattttaaagaatgttgaatactgtcccccaatctcttctggctcatagggtttctgctgaaaggtcttctgttagtctgatgggtttccttttgtaggtgacctgtcctttccctccagctgcctttaactttttttttttcctttccaccttgtagaatctgatgattatgtgtcttagggatgattttctcatggaaaatcttactggagttctctgcatttcctgaatttgaatgttggcctctctacctaggttggggaagttctcatggatgatatcctggaacatgttttctaaattggctccattctcctcatctttttcaggtacaacaatcagtcgtagatttggtctctttacattatcccatatttctcagaggttttcatcattccatttcattattttttctctagtcagaaaggcagttttcaagctctgaaattctttcctctgcttggtcttttctgctgttaatacttgttattgcattataaaattcttgtagtctgttttttacctctatcagtttggttgcattcctctctatactggctattttggctgtcagttcctgcaatgttttatcatgatttttagcttccttgcattgggttacaatgtactcttttatttagctcagtcaactttgttctgatccatattctgaattctacttctgtcatttcaaacccttgctggtgaggtagtatggtcatttgataggaatagggcactttagctttttgagttttcagtggttttgcactgattctttctcattttggtaggcttatctaccttcagtctttgaggttgctgacctctggatggtttttttgttttgttttaaacagtctggccacttttcttaaggcctgctgcagtttgctggggatccactccagtccctaatcacctcagattttccagtacctggaggtatcaccagtgaaggctgtgaacagcaaagatggcagcctccttctttctctgggagctccatcccagagaggcctgaaacctctgtcagccagagaccctggttgggaggctccacccagtgatgaggaatggggtcagggaccttctgtgctggggtactactttcacccgcagtcagcttggactctccaaagcccaaaggctggaactactaagccacccaaacagcacagatggcagcctgccccccactgcctctgggagctctgtcccagggagttttcaaatctctgtcagctggagagcactggcaggggtggctggaggccccagttgtgaggttcttccctgtgaagaggaacaggatcaggcatctgcttaaagaaacagtcttgctatgtttttgtagagcagctgtgttgtgctagggggtatcccttctgccccagtcagattggactctccaaacagtaaagatgacagcctgcccctcccctcaggagctctgtcccgggtaggtgcaacactgctactggtggctggctggaattccaacccagtgggtcttatcctgtgaggtgccataaaagcagggcccgcagaccatcgctgctttgccccctggattcagccactttcctaggggtatctatggtggtctaacctcctgctttgccagagttgcagctacttgtgctgggaagcctggaaaaccagagtatctaaagttcccaggtctcctgtgtgcctgagaagctgctgtgccaagactccatgtagctctgtgtgtcagactgaaggccctggtggagtgggtttatgaagggatctactgatctgagggttgcaaagatccatgggagaagagttttcctgggatcacacaatcactcgctgcttaccttggcaagggaggttcccttggctccacattctgctcccagatgggccgtcgtcctgccttgctcttctccattctctgtgggtcgagttgtttccttgattagtcccagtgttgactgtctggatgtgtcagttggcagtgctgtatttacttgccccttccttcctttcctctctgtgagagccacgcatcctatctgcttttagttggccatcttggccactctttgtgtttacttactctgctttattgcagttttgttcatcctgaattagagcacagaaagccataggataaacttgacacatcttcctggagaatattttacccaaagatttggatacaaatcaaataactcacaaatgataaactattatttttcattaaatagggatattgtatatggtacaacaccaaatttgtataacttttgaagctgaacagaagagatttccataaaaaacacttaccttttagtgagtctgtgtgtctgtgtcccagacccccagaggaatgcactaatcctctatgagagctggcaattcaatggaaagttttaagaaggctactttgaagccagatagtcctggttacctgagccccatctccaagtgaatgacagggtggacttgggcaagtcattccaccttactgagcctcatctgttcaatagggattctaccacatactgcataggatgtattgagaactcgcgggaccatatgaaagtctgaaagcatcgttggtgttcactacatagtgattattattattgaatgtaatcactttaatcactttccaaatatgccttctgacttgttcagccctcagctttcacataatcccccagctaaccctactgagaccaacaccagaacgacctccatatcgcttttaaataccatttcaggcttctcatgttaccattttcactaacagaggatcctgaaatgggtaatataaaattgcaaagtaggtaagctagttactaaccaaaatatttatttaatggctggaccaaagatagaagtttttcaatttgtatccaatagataaccatttaaaatgatatatattattttaaatgtatacattcacatcacccagagtctcttgacacaaattaagtacttcctcaattttagctgattacaatgtactttttcccagagccctaaaactcagtctattactgtagcatttgttcattccagtaaatagtggcagttttcaggtaacatttaaaagcatgggttctagtgatagagttgcagtgggaacatctactctgctgctagctgagttaccttaggcttaacttcccccaactaactgtaaggtggggataataatattaatgtgacttcttcctacaatgttttatttagcacattgcctactgtatagtaagtatgcaataatttttaggtataaattttagtaagtggcttttaaaaaattaagcttgagtgaggtatagttatttacatataagacactaatattgttttcagccttcctagagctatgtggatcacctactttgctccccacagagagggattcctgtacaatatatcagtaagtggacacagaatactcttgaggatgtctactgaaggctagcatgggggatgaagagagcacagggtgaccacttgactcagtgcaggagatctcttacattataatcatatggcaggcagtatacttacattgactattaatcttccagaatctatttgctgctaagaaacatgaagtgtgtttcagggctgagagatggaccctttcaattgctagtccaaccctctcattgtatacaggagaatgggtccccatcgcgagttagtggctaactcaatgacaggcatctcctcctaatccagagctccttctatgatgcactgccccataggctgaaccgattttcaatcctgatcaaagctagagatttcatttaaatgaaaaatccaaataacatttgtgaatgtattacttttaattgctaattaaaataatcaacagcctagctgtctgttacacatggagtcaagttagttgcatgggtcattagatgttctgagagcattaggtcttattgggaagacttgaaaaatcagtactctaatgaaaattgagaagatggaaatgtacatcttttctttgatattcaaatcaattatttagtttctatctcactttagaaagaatcacagtgtaaagaatgtaatagtttggggatggagggtatggggaggaccataaagagagtccctctggaaactgctattgtgatgtttgtagtttcatatgcagtcaccttggaaacctcgagttctgaggaacaccatttgctacaaaatcccagcttctattcacagttcagaagccatgttaggctactaaggcacagtatttatgatcagttttgacctctggcaaaagtagttgacaaattctacagagaatctgtcaagcttttcctctctcatagttgttaaagttttagcatggaagaagaatggactatttttagccacttacctttgaacattttggattaaaattactctgcgttccagttctttgcagtctgttatgtggccactacatacaacaggatgcctcttgtggataaggaacaccagagaggggattagagttaggaacaaaagaaatcatcagttctaaccagtttgaggggggaatgactacactaacaccaatcactgccatatcgtaaggcttcacctacatttccacatttcgtctttataacagtgctacaaagaagacaccaatatctcttttgaacatgagaaatagctcagcctcaaaaagccttctccaaggtgaaacatccagcagacatccagcagatgaggtgcttgggctcaaaatcctgagtctgaagctcaagctttaaagaaatatcctacattcccttctaagaaatttggaataaaaaattgtaggtggcatgaaattgctaataagttagaagtaagaataaggtatttaagatatattaagagggggaaacatctaaaaggtaacataacaaaatatggccctagcatcatatttttttttctaagttcagtgaaagataacactaatgagactgccaattctaatgcaactagactgcaataataatcttaagttgttcagaatcataccaagaagggaaagaaaggaaagtgtgctcatttggccctagaccttgctcagaacatagcaagagcattgcattcaacacgaggcagcaggttctaagagggaagtcaattcaaacaaatatttcctgcacgccttgatgctgggcataaaccaagtagaattatcacatttacagagcttaatctagaagaagagataaattaaaacaagtaaagagacaaataaataattgcaaattgcgtccagtggcatgaaggaaatggatatattaagagtaagaacagaaggtgggcctcccatttcctgcagggtaggatgaccaagaagatcactctagtctacttgctggaggatctgtcaaatatcctcttcagcctggataaaaaaacttcaaaatagccagaatgcttgtctttataaactgtgtgtatttacctatggaagctgcagatgacatatgttacaggaagatatttctacccaataaatataaaagctacttttaaacagtcagaaccatggattattacgaaaacatactagtgaggaatcagagacctgggtttaatctacaagtctctaagcacatggtcttggccacaatgtttgtttaaccgctctgaacctcccttgcctcctgccacaaatggaactggtactagataccagctagaatgcccaactcaaaaagcacatccatggtatataatatggattcacttatggtttatgaatctaaatctgtcagtgatacttgccatggactttaattagaaaaccctaggcctctgcagttcctttgaatcagactctgaaaaagcttaactcaaaaatagaagatgagtcacaagtgttgcaggaaaatgatgtcataattttattgtcaaaattattaatatccaggcagaaaactaattggaccatggagttgaacatgatggtagccaatatcatgttcttaaagttgcctggcattaaaatctcactcaccgttacttcaaatgtcccattacattgatacagaccaggctcttcaatatggctgttggttcattagtgttgatcaaacagcacagctaaaatatgggaacaatttttaaagtggttttctggaagtagaaattaaactgagctcttgaagattcaacgagtgctaatgaacttcaggtcaatgaagaaattgtttgaaaaatatatacactttaaagattgcaatgaattatgtcaccttcttagagacacacaacttttgaattaaagaatcctactgatttgctcaagttttatatagacagtagcattagagtggcaacacagaagtataatgggcccacacagtgggcactgtagatctttattttatcaagtatgttaatttagctattggggttttaacttgggttacctcttctcagaagcaatatcctaagcatgctgttctcatcagtggaatggcaggattccctattcacatttgaagatctgctaagtcagtctacgtcaatggttctcaaccacctccttaaagaaaaaaattcaaatcaataaatgccctggcattccgatttaatttgtgtgggttgtgacccacgtttcaaaagctccccttgtgattctgaccacaatgaaatttcccacccaatctgagaactccccaagtgcagctgctttaattgaccaaaaatacaccaactttataccttcccaccagttttttctaagttatttccctttcagtcataactttctctgattattatttttctcaaacttgtaacacacagagtaatcctaggtgttggtgtgaaactgctgtttcctgggaaagaccagagctaacctcttctatttcagctaccacatatattatttggcttttatgatgttctgaaggtcgctccccaaagtaacaaaagccattgtctccattctctaaggatggaaacacaatatgatctaaaagcttgtctaggtttggaagtgattaatgtagattcttatgatgaaggaaatgaaaacgagaaatctggataagtaatcactgtttcaacaaaaacaatttcaacaaaaaatgagcctgagacagagaacaaactgataatgccaacagctaataaattattctcttagttttcaaaacagactttgtgataacatttaaagttttgtagggttttttgattcatgagacttccaagtacagccaggaaggaaagggacccagtttcccatgtttcacaggtacattaagtggaatttgagctgagcagaagttttaactgaatgcagaaatgtgccacgaaaggaaggtttgatagagaaaaatctcagagcttcgtaaacctgggagagatgaccaattttctccttgtcatattccctgggccgaaaactacacatcttcaaacacgagctgtgaaaccatctcagagggtaacagaggctggacactttggaactctggtcagggctttgcctcgtgtctaactatagaaatgacagcatttcagaggaaatgtttaccctgggaggatgcaatctacatggtgaattggctagacaatcagttcctcaattgcaccttcctagtcttaccagccaaaaagagacagtgagacagtggatgctccatggaatccaattatgttttcaggtttttttttttttctttttttgagacagagtcttgctttgttgcccaggctggagcacagtggcactatctcagctcactgaaagctccacctcccagcttcatgccattctcctgcctcagcctcctgagtagctgggacaacaggcacccaccaccacgcctggctaattttttgtatttttagtagagacggggtttcacccatgttagccaagatggtctcgatctcctgacctcgtgatccacccgcctcggcctcccaaagtgctgggattacaggcgtgagccaccgtgcccggcctcaggtttctttttcttgaggttttatacacaaagtaccattaactcagcgatacggaaatactccaccaaccacaatcaaatacacctcccactttactatctctagccccacatgtccacatttctgcttgatgactcaaacatcttcaagtcgacatatttcaaacaaactcatgatgttctatccactatccatatactctataagcattctgcttattctcttccctctctcagtggctgacctccaccatctactggtaataaaatctacaacactagaaatcagccttggtccagtccatcaccaaatccaaatcaccatcttcttccacctggataataacagactcctagctactttccttgcagtcctcttgctacctcttatgcactttccactctgttagagaaacagaaaaaactggacatagatttactataagaaattgactcacacaattacagaagctgaaaagtcccatgatctgctgtctgcaagctggagatccgggagagctgatggtgttgttccagttcatgtcagaaggactgagaaccaaggagtagatggtattaatataaattccaatctgaaggcagaagactaatgtctcaagtaggcaggcaggcaggcaacgttatctcttgctcagttttttgttctatacaggttatcaatagattagatgaaactcactcgcattaaggaggaacctgttttattcttcagattcaaatgttaatctcatccagaaacaccctcacagacacacctagaataatgtttgaccaaatgtatgggtacctgtggtttagtcaagttgaaaaataaaattaaccatcacaggaatattttttgcccgcttataccaccaatccatttaaaatccttattctgcaaagccatacctcacttgcttcctacatcttttttttttttttttttttgagatgaagtttttgctctggtgcccagactggagtgcagtggcacaatctcggctcactgcaacctccgcctcctgggttcaagcgattctcctgcctcagcctccccagtagctgggattacaggcacccaccatcacacctggctagtttttgcatttttagtagagacagggtttcaccatgttggccaggctgatttcaaactcttaacctcaggtgatcaacctgccttggcctcccaaagtgctggaattacaggcatgaaccaccgcgcccagccttgcctcttattaataccacattatctactttgtttaaatttcttttaactcataaaattactttctttctaaaagtctttatgctgaatgctggtccttctgcgtctctgtgccccttaagcccagtataatccatgtttattaactaaatcaactagctctacactgggaaagaagagctgattcaaaatgatgttttgtaatggccaagcttgcctttcatagaagcaaatctcaaaatggttttgctctagaggacatatcactgctttctgagagaaatagtcttcaaatgagactatccaatacatttcttaagtctttagagtagaagcctagaatattatgaatagatttttctttcaacagatctctacaaactcagcagattcattggtaaaacttaaatacctgtttcagataagaaggagcttgagtttcaaagtgacccttatttgacttaaaagtagaacttatataattagagaagattatgttccttcttcctattttctggtgcttattttatttaagccaatctctataatgcaagttgaaactggttgaaattggttcccctgagtacaatgtgttcaagccaaagcaggcagttaaaacagggatacctgagccagacacagtggtgcacacctgtaatcccagctattctggaggctgaggcaagattgctcgagcccaggagttcaaaaccagggcaacatagtgagacccctgtctctataaatccacccctcattgttatccctgttttatttttatttttaatgtatcaacctacctgagctggaacaacatttcccaaaatccttccctgagttagcatggctgcatgaggtttggaaggtgagaatgcagcatctgccatactctttttgtgctggaaaatcagtgcagagccacaggcactgttggagatcacctgctcgatcaccttgttagtgtggggcagcagccgagactttagtcttttggctcccaccaattttcttctagcttctccaactcctgggctaggtacatgctgagtttcaggaagaaagacagaagtggtgggagattgtcgtgggttccagttcatcatcattctcccccacttcacatccatctttttttcctgattcccatcccactgacttcaagctccagcatcagacacaaagacaaccttacctagattgtttaaccaggtctcccaaatgtgtaaggacaaattcctataataaacgaaattatatatctgtctcattcatagatgttatctttctctaatggagccatgatcaacaaacttccatggagctttctagccaattgacaactcttcagccagatgtgattctcagaaagttggcacatccataatttaaaaagaagctgccaacttttaaagttgagctgattttatcataccatgtcaagttccgtaatcttttgaaaaattggaaacctggacctccagtgcaacacagatggtagttttaagttccctaaccagtccaccctctgaaaactattaagattattcaacattcaagccctaaaggagcgtgagaacacagagacatcagctgatcattgaggcccctttaacgttatagattttgctaacctagatgaaatttagcttcagttttcatggcctcctgggttatgggaacaaaacaaatcttggggttcactgaggtggggagtcttagagatttcacagatgaaactgggacccccccagttaccaaagcctcagtgtaagggtgaaatagaatctaatctgcctagtcttccctacctggcccttccactcagaggactacaagggaaattgcctgtcttgaacctcagcactgaatgaaaggggaaaaaataaatttctctaccacttgataacttcaaactggccttcactctggtttgtagcctggctgaattcatatcacctggatgggcctgaaatctcaagcagagaaattagtttacggtgggtccaagttcacggtggcaccagtgagtgatggaaacaaatgcaaatcctctctagagaaaacatcttaaatgcaggcttcaaataattcctgcagataaaaatccaagcaatgtgaactcacagtcaagaaggacaaaatacactcggaaacaaggcaccatgagcaagagagcaggcaggaaaacaaggcagccaatgtagacccacagaggcttcagttatgagaattagcagaggaacaaacaagtatgtttactatgcataaaaaaacacaggaataaattaacagagtaaaaaataaagacatataaaaataacacattagaaaagaaatgaaacagaatttctagaaatgaaaatacaatctcaaaaagcaaaattccaatgaatatgagaaatagagaaaaataaatcaatatgaacatatatctgaagaattacctcaaaagcagagagacagaagaataggaatgctagagtaagaacatctaatccaaattgcagaatcaatgaggaaagagagactagggcaagaacagttttcaaagacatatcaggtgagtattatcctaaagtgaagaaagacacaaaaccacaagtttaaagggtaaaaaaaaaaaattaaattaaaattaaaatactgcaaataaagcgaaatttacatgcagacatatcagaatgacactatagaccatcagagataaaaaaggagtaggcgagaaaaaaaaaaccaagtagaagttctgggattgagattagactgacagctgacttcttcatcacaacagtgagaagcagaatgtgaaagaatagtaactttaatacctgagagaaaatgattgtcaatgcagtgttgtggatatagccaaaatctctctcacaaaaggagggcaaattaaagatctattccagaaaaacaaaactgggggcttaccccagaaggcatctactaaaggaaaatatcaaggattcttttgatattggaaagcctaaggtaacagaaggaatatgtaaagagttaaatacgtagacataaataaatgttgattgtataaacagtagtcttgcaggattaaagaatacagaactaagagaattaagacagccaggtagtatcctgaggccagataaatacaccagagagtttagaaatagatccacacatatatgcttaattgattttcaacaaaaacatcagtgctgttcaatggggaaaggattatcttttcaactaatggagctggaacaactggataaacctattagaaaaaatgaacactattcttaaaaattaattcaagatggatcataaatttaagcataaatgctaaaactataaagattctagaagaaaacatgggaagaatatctttgtgaccttggggtagtcaatggtttattagacaaggcacaaaagtactaaaaattacaaatattaataaattgaaatttatcaaaattaaaataaaaattttaagctactcattaagagacactgcttaaaaaatgataaagaaactcatagattgggagaaaatacttgaaatatatatgaaaaagaatttttacttaggatatatacaaagtcaataacaaaaatgcaagtaccctaattgtaaaaagttgggggagagatttaaatagaccccttccaaataaacatatttgaacacccagtaaaacacatgaaaaggtgcctaacaacattagtcatcaaaaaagtgaaaatcataataaagtactattatgtagccaccaaaatttctataattaaaaagaccctcaacatcaatggtgataggaatgtaaaactgcaaaactatcctggaaaacagtttgacaatttctaattgtattattaatctattgctgtgtaacgcattaccccaaaacttagcagtttaaaaccacagacatttattacctttcattttctgtaggtcaggaatcaggtgcagcttagctgatggatctgattcaagacttttttatgaggatgctgttaagctattggacagggcagtgatcttaccaaacgctggactaggggagggtccatttccaaaaacactctagtggtcatttgtaggattaagttctctgtagactgttggactgaacaccttagtttttcttgggctcatggcctcccctccctcagtttcttgggcctctccacagggcagctatcaacatggtagccggcttccctcaaattgaaagagtgagaacaagagcctaagatggaagccacggtctttttacatcttaagctcataagtgatatcccactaattttgccatattctacttgtgtagaaggaagtcattacgtccagcccacgttgaggggagagaataacataagggcatgaaaaccaggagacaaggattcctggggaccatcttagatgctgcctcaccacacacattaaagacatgcctgtcttataacctagtcattccactcgaagctgcctgttcaagagaaatgaaaacttttcctcaaaaagacttgtgtaagaatgttcatagtactttctacaaaatagccacaaactgttaacaaccagatgtcaattaacagtagagtgggtaaacaaatcatggtctattcatgcaatcaaccactactaagcaataaaaagaatgaacaactgatgaacagagccacacggaagaatctctagtttcaaaaatcataaaagagtaaaaatctattattctcattatatgaagttcaaaaacaagcaagatttatctgtggtgctagaaatcagaagaatgcgtgcctctggagggtggtgggtgtgaatgcagagaagcatgaggtaactttctggggtactggtgttggatgcgatggtgattacctgaaactatacatctatcaaaattcatcaaagtatataagtaagattagtgcaatttactgtatataagttctacctcaataaaaagtcatctgaaattttaaaaatttcggttatattaaagacctctaaaaacataatagaatagttgatatttaaaatgacagaaaaatgtgtccaaggcaaataacagaagcatagtggaaaaactatactaataggaaaataaattttaaggcagaaagcattacaagaaataaagagaatcactatatattaagataaagaggataaaccaattccaagctggtatgcatctaataacatgcctcttttagtaaatgataaaacagataaaaatagatatgaatattcaaaaaatttgagtggaacaactaaataacttgagttaataagacatataatatggcaccaacaactgaagaacacattctcttcaggtaggcatgcaagatttatacatactgagacaaaaaggtagtttcaattttttcttttttttgagatggagtctcgctctgttgcccagcctggagtgcagtggtgtgatttcagctcattgcagcctccttttccctctggggtagctgggattacaggcgtgtaccaccatgctcagctaatttttgtattttcagtagagatggggttttactatgttggccaggctggtctcgaaatgctgacttcagatgatctgcccacctcagcttcccaaagtgctaggattataggcgtgagccattgagcccgggctcaatttttaaggaactgatgttatacagaaaatgttctctattataagattgtcagttcaaaaacaatgttcaaaagttcaaaatttaaaaatactagaaatctatactaataaatcttatgtatttctaaaactaaagaacgcccttctataaacctcataggccaaaaagagaagtcatactaaaattagaaaatatttacacctatattataaatactcctttgggatgccgtcaaagaaaaattcataacttaaatgcatatattaaaatttggaaaggcaaaaattaacaaaacagcacattttagaacttgaaacaactggagaattatctgggacaagacagataaatttatgaactaaacataaaaatagatcagattgacaaacccaaaagttagctccttgaaaggactaataataaacctctggcagtactgttcaaggcaaaaagaagacgtgaaaaaaatatgtgggacaaaaaaaagacagacagctacaaacgcagggggcatcttattttttatttttaaaaatcttctttatcagtgcaaaggagaatagcaggggacattttaaaaatgaggatattattttaaaaagactttgtcaacaaatttaacctttatatgaaatggaaaaaaaaagctaacttacaaaaaaaactggagaagaaacacaaaacctctatgaggctgtaattattttttggtggaaaaacatgtatttttcatgcccagagggtttatcaatgtgtttaaacatacaaggcacaaataattctaatctttcataaacaattctggattatagaaaagtgatagaacccgacattggtattacaagaaagaaaaattatagaacacactcttttatgaatacagatgcaaattaccaaaaaaaatgaaatattttcagaaatatatagaaaagataatacataatgacaaagttgggctcaagccaaaaacacaggagtagatagttattggaaaattaatataattcaccacattaatatattaaggagaaatatattatcttaatagatattccattatataaaatagcatttgataaaattcacattaattaatgatagaaacttttggcaaaatgagaatagaagagaactatcttattaaaaggcattaggggagaaaaatcctagaataaaaaacatacttaatggtaaatttggtaaattgttgaaaaatttcctctttaaggtgaggaagaagcaaggttctcatttctttacttctaatcaacactgtattgtatggttctagacagtatagtaaaaaaagaaaaagaattagtataagaaatgacagtcgcgcgcagtggctcatgcctctaatctcagcactttaggaggcccaggcaggcagatcacttgagttcaagatcaggctggccaacatggtgaaaccctgtctctactaaaaatacaaaaattagccaggtgtggtggtgggcacctgtagtcccagctacttgggaggctgaggctgtagtaagccaagattgcgccaccgcacttcagcctgggcaacaagagtgaaactctgtctcagaaaaaaaaaaaaaagaaaaatataaaactttcacaaattaacataatttatagttgcaatgaaaacctaaaataacctacagatagattatgaaaaacagcttacctaggtgttgatttttaagatcaacataccaaaaaagtcaattagatatctatatttcaggaaaataggatatctatattccagggaataggagaatgagaaatacttttttaaaaaacaccattttcaatagctacaaaagataggttaaactattgaaatacatcaaataaaacataagtaattggagatagctacagtgtccatggattgaatttgaatcccatccaaattccaaaagaatttccttatgaaacttaagttcattccaaaatgtatgtggaagacccaagaatcgctaagacattcttgaacaagaataaggtaagaggatttgccttatgaagtataaagaattttaaaactcaagtaagctacaatatttaattaaacaatattttgcagggatagacaaatagaataatagactagaaaaccccaaaagagagccataaaggtatgggaatattatttatgatggacctaaatattggctttttcaacatatgttgagataatctccatctcttttgaccccaacctcagactatacacaaaaattaatacctgatgaattagagacataatgaaaaaagaaaacataaaacctttgaaaacaatatagaagagcttcatgacctcagtgtagggaaggattgctcaggtaagacacagaaagtgcaatccctattccaaaagaccataaatttgtctgcattaaaatgtaaaacctctgttcatccacagatggtaaatataaaagacaaaccacaaacggaaagaagaaattgtcaatacatagaacggctgaatatttttcagattatataaaagtattccacaaatcacacaaaaaataaaaaatagacaaaaatagaaataaacaaaatagatgaaaacatttcactgacaaaaatcccaaatggcttacaaatgacaagatgcttaactccattaataattaggtaaatgcagttttaaaagacaatggcatcccatttcacagtcatttcatacttagctgtatcaaatgtcagcaagaaagtgaacaactggaacattatacactagtgggaaagtcagttggagcaatcactttggaaagctatttgccattatctaataaagctgtagatatgcagatccttaggagtagcaagtctactctcccacattagtctgaaagagacttttgcattcaggcatcaggagccacacacaagaatgttcatggttgcaccatttgtaaaaacaaaaacccaaaaccaacccagtgttcgacagtagaatggacaaataaatcatggtatatggtaacactagggaaatggaataaattacagctatgtgctgaaatgtagaataacctcagaaacatcatattgaggagggaaaacaaaagtcattaaagaattataaagtggaattattctgcgtgtgaagtatgcaatagtagtgtattgtttaaggatgcaaatttagtcataaagaaaagcaggaaaacagcaaacacaaaattcctaatagttgttactcccggggggaaggaaatagaagggatcaggaagaggagctcaggttgctacaaaatttgttttttcttaaaaaagatgataattatacaaaaccattgtcattctttctttttttcccccccaagatggagtcttgctctgtctcccaggctagagtgcagtggcacaacctcagctcactgcaacctctgcctctcgggttcaagcaattctcttgcctcagcttcccaagtagctgggattacaggcacctgccaccacacccggctaatttttttccatttagtagagacggggttatcaccatgttggccaggctggtctcgaactcctgacctcaggtgatccacccgccttggcctcccaaagtgctgggattccaggcgtgagctaccgtgccggccagcattatcattctttataccatatttataattttatattattttgtgtctattcataaaatttaataattcagatcaaaattcaaaacattttaaattagaaaacactaaaatcagaagccctggcaaccactggccaggttagatagaagagcagctgtccccgtagacagcatctccatcgcctcattcacatttaggccagtgccacataccatgttactgttctgggaatgtcattttacttacagctttctcatgggttactcactgtcatcacctatttagtcttggtgggggcacctgagtttatgacccttggactagagccgtgcttctcaaagtgtggcccgccgaaacaagcagcatcagcatcacctgggaacttgttacaaatgtggatgtgtgggcacccctctagacttactgaatcagtaactctaggggtggacccagcactgttttcacaagcccaccaggtgattctgatgctcacatttgagaaccattcttcttgaagatatggcacagcctggcccggcccagctccggcccccacccttcctggccactcctcctttctgcatctcttcagtgaggctcttctttctcctctgagagggttgcagtttctcctaatggaagtagtgttcatttccaagagtcagcaggacccttaactgccactcccatcaggaggaaaccttccatttttccttactacatgccatctaaacaattgtgttgtggtcattaatttatgggcagaggttgacggacatcacttcaggagtgatgctctctgcagtttccacagggttttggtaggagtgtactagtccattttattactgctataaagaactgcccgaggctgggtaatttataaaggaaagatgtttaattgattcacagttccccatggctggggaggcctcaggaaacttacaatcatggtggaaggttaaggggaagcaaggaaccttcttcacaaggtggcaggaaggagaagtgccaagcgaagggggaaagcctcttataaaaccatcagatctcatgagaactcaccatcatgagaacagcatgggggtaaccacccccatgattcaattacctcccaccaagtccctcccatgacacgtggggattatgggaactacaattcaagatgagatttgggtgggacacagccaaaccatatcaaggagctttatctcagtggaaagactagcgtgtgaacaacttctgttaagtctgcttgaacatcaaaggacattaagctgggctgtaaaacagaaagccagttaccttttttgtcactgcttccaggaaatcatcatctctattttgttgcagcctttcacaataggacactttcagagtagtgccctttctcaccaccctggttctttcatggctgagatgtggggaaaggcaggagtcatttctgagtctacctctccggcctgggtccctcctgctaatctcagaggcctaggcagtgggcaagaataaagcgaattctaatgcctgtctgaaatgccagtcctgcatctgataaagctctgtaagctccatactttttttctatttcaagctttctttttcaccaaactattctgtttatattgaatcattcactttgaactctatgtaccaagtttgaacacattccaaatatcctaaatttgatattgctgaagtagaccgtttaaataagttataagaaatactgtataaccatgaagtatgcatcacccagccatatatactactattacctcactattgtttacatagattggttttagaaatttaagcattaacttcttgaagaaaggattacagaaaataggggtaaagatacaatagatggaaagaaatacagttattctggaactaatatggtataaacaaatattagctttggagtccactaaattgaattcaaatcttggctctgccattttactaggagtataaccatgagcaagtcactgtaccatagattccttgtttgtataatcaggactatagaaacaccagattgataggttttggtgaggattaaatgagataacacattagcagtgtcaccacctagtaacaaaccccccaataacacatagctgatgtttaaggcaagaaataagaccagcaaaacagatcagaacaaattctaaatggagttcagatctcttctaaggaaattgtagaacatattctacaagttttgataagtaacatattcaaaacttatttcgggaagatatatttttgtgtgaagttcattgggaaaaaggaaaaactagagacaaaacttgagacacagttacaatagtccgggttacaggcaaccctttcataaccccctcctggtgattctcatgctcacatttgagaatgcttctaagaaattttaggaagaaaagaggagggaaaggaagaaagatttgtccatggtcatttagtggccactccatggcttgattctgaaaacggagaagttctgagttaaaagacgtgttaactgagggaagaaggaagaaagagaaaagatgacaggaggactctcaccttggcaagggggatgatggcagtgacactggtaagaggtgagcaggaagtatagtaaaagcacaaactcatcctacaaggagaaaggtatcgacattagtggaaacagaagcagttagaaaacttaggataaactgtgtgcatcaatcagactgtataggagagaaaacacagagaatggcaaaaaaaaccatcttcatatctcaaaagtgagagggagtcaagagcacaggggcagctccagttagttggattaaggttctagaccaggccgtactgcacagacatcactttctgttgtcctgctactgagtccctctccctgttgcactgacattatcaaaccaaatgcaaatgagatgaaccacaataatgggcagaactgcacctggttcagcacaacctggtgaaggtcttaagaggaggggaggtggggagtggaggatttttgccacacccaaaggggtgagaccacagaagaaaaaattatttacatagaaactcaggccaatcctttcgtaagtactccaggactattgcttctcttgatgattttagttgagtcattgtagggggggacaattcaagggagaaggctgctgcctggaagcaatcctcaggaacctagacctgaaaaatgtggatgagctctctcttggcatttgtgcaatgtggctgggggttgctccgtagtggatcttactggtcagcttgctctgtttgccacttactgaggcccaagaggctttaccctactcagaggcagtggcaaaaacagaacaaagaatcaatagtgggcaaggagaatgaggttcctttttaacatgtttaaggtgtctgaaagttagaagcactgaaattaaattcaggaaattggtctggatcagagtgttttgagaaccattgctgaggtctccgttcctacgttaggatactttctttgtaacagagaggaggatcttcatacattcctatctggtaatagtattaaaatcaattgggtatgatggttcacgcttgtaatcccagcactttgaaaggccaaagagagaagatcacttgagcccaggaatttgagaccagcctgggcaaacatagcaagacgctatctctacaaaaaatttaaaaattagctgcccgtggtggcacatacccagctactcaggaggctgaggccagaggatcacttaagcacaggaatttgaaatggcagtgagctataattgtgccactgcactccagcctgagcaacagggtgagaccctgtttctaagaaaaagaaaaataaaattagaatatttaggggatggttgagtttcagttaatgtttttctcattatatgaattaggcaaaaagcttcctcctaaggagtattatcctgttttgccatcataattagcatagaatgtggctgattctcttgatttattttttatcttacataccataaaattcactcatctgcaagttttcacaaatacatagagacctgtaaccaccactgcaatcaagttccgtcacacaaaacatgttttccttatgctgtccctttgcagtcagaccacctcccctcccagcccctggcaaccactgaccctctctgcagtgcagaaatgacagctgcattgaaggttaaggcctgaggctttcttatgattggttggtattgtaacaatagtaacagcagtaatagtaatatataatacatatttgcatttctattgtgtcaggcactatttgaagcactttatagatgaggaaactgaggctttaagagattttagaaaggaaagaggaggtaaagaaagacttacccatggtcatttagtggccaccccatggcttcactccaagcatgtcagactcctagacccatttttttaacctctatctgattctgcctccatggaagatacagaagcaggacaaagtagaaaggatacctaccaattccaggaagctcggtttagatccgggattgacttacttttacaaaaaaaaaaaaaaaaaaaaaaaaaaagcttatatgagtttgattaattataccaataaaacaacacttggatataagatcaagtgaaaccaggatcctagaacactttccttacagcctttgtaaaatgcaatgaagataaagcctagacttattatgctccctgtcataaacttgaccaggttgtaaagcaaaactttaaaaaattctctgatcaaatactggaatgctttgttaatgtccttgagcatgaacttccttttgtatttattaaaaagaaaaagggatctttattgacgatcttgggtgtttttcaggttggagtccccaacccggtctctagtgatggaggccccaaaaggagtggaaatcaatgcagaagctggcaatatggaagccacctgcaggacagagctgagactggaatccaaagatggagaggtgagggatgagaaggacagaagttcaaagagctacagcttcaacaggccaacccttcccataactggttgacctcggagttggatcctacagtgtatcaacaaaaggagccaagcaggttttatttctgaaacaattaattgagcagcatgattataagccaaacccacaatccatcaaagtgatgatttcttatttgtaaaatgcagagataatggcatgtattccaagtacagaattatatgaccatgaaaatgaatgctattttcaaattctctcttgtcaccttaaaataagattttgttagccaacataattaagctgtatatattatacacatctggctcaagatgaacttaatttacttgtcattactttgtgtcacatgtttctgttttcactgaaaatggggaggcagattgaacagctgtcccaaccagaacaagccaaaactttatagggtaagactaggcagcaagggaatgaaacactgcagatattcattctcttatgccaacacagtcccagctgggtgaacagaaatgctgcttgtgtttttgctagcaagacaagccaattactacccacacccaaaatgtgatttgtctgtaaacttttaaaaatgccttcaaagtgctcataagtgaactttgctatttaatcatagagttaaaaaatctgtgtgtttttttttttttaagaaaaatgctattccacctgactattcaatgagagaggttatcagtctctacctgcttctatacatccactcgatggatataaaagtcccccttttgattggtatggcatttcctattttgttttagaagagatagtcagaacattcagttatcacaactgcctcttcaagcagctacaaactgcaaaccacacacatataaaaatagtggctacctcacatatgcagtttatagctatcagaatttgaactctggaggaatcagttataatcgtaaatctaatggcagcttccacaactgcttatttttataggcatatttttataggcatgtttttctcaaagtatattctatagaccatcagccccataaattgttagaaaaaaaaaaagcagaaaggctcactagcatttaaaagttggaaaatgttacatactctattctcttcttgaacactcaccttgcacacagtcatagtaggatctgggaagtcccatagtaaagaaaattgttaaatgtcacattttcacatttatttgactctaggactctatttacattctgtatgacatttttttgcaaaatgctaacatagatcaatgcagcattatcttgctagaatctaagcttctgtgaaggtagagactttccatcttgttggtatccaaatccccagtaccaaaaataatcaacacatagtaggtgctcattagatttcagttgaattgaacattcacttgctgtttctgaatgtcaagagaagagacgacagcctctgaccaatgctttccttcctattctctgtctttagattaagttagatgctgcgaaaatcaggctacctagactgcctcatggatcctacacgcctacaggaacgaggcagaaggtcttcgagatctgcgtctgcgccaatgggagattattcctgtctcaggcaggagctgggtccacttgtcagataaacacaagtgtctgcctctgaaagactatccatagtggacattgttggcagcataaaggccttttttggctttagacactggctgccagctatttttactagaacacagaaagcctatcaaagaccttgtgtgtatgtgtacgtgtgtgtgcgtgcttgagtgtgttcgcgtgtgtgggtggatataaatatatataaatatatataaataaatatatatatcctctgtataaaatgaggtttcagtacaaaaggaaccatgggtgaccctgcgatatccactgtcattttccatcccatccccaccacctgagtgacagaaatctaaacacacatccgtcccaacattccccagaccattcagaatcacacagcgtattaaacactgacagaatcttcatctagatattcgagtagcagcatatcttctcttttagtgtcattacgagggagtgatggcgggaatctcagtcgcactcaagctctgagacctttgtatcaaaaataggcatttgatttcctgttttagctttagtaaggctggctaacttccccctcttcaagctaggaactggcaatgctgtagaagtcagccgtaggaattcaaaatggctggcctaccttggctaccagacatattggggtttttgtagttgaatgaatgaggaggatgaatttcagcaaattttgaactgctcacccaacttctgctatcttgctccctccaaactcacagattctcctacagtcaaattaggagctgtaaatcagcacaaaataagataacagctgttcctcagtgagctggaagctacttaatggcctgatgggcaatgaacaaacgggtgatatgtctctgtttaagggaaaaatggcttaaaagctgttctgttctcacttctgactttaaccaaaagatttcaacccacaatgatcaggtcaatcaaaatccctaagagcagaactcctaccccaaaagaagcctggaagtctaattaagagtagcataaggaacctaattatgtttaccatgtttcttgggattggtgggaaatgtcaaaacatgccctttatttttaaaggcattcacaaactctctgactttgttcttcttatatattttttcagtgccgggatattcatattcctaaagccactattgtgttttctctaagaagcactacatgccaccagaattgtgcactgaaagataatacaaactgagtgtctttatgagaatcactgtgtcccctgaggcccagcagtacctgcttccctgtatgtggaagcagcacctcattcccgccatcagctacctctcatcaccccaccttcatcatcatgctccagggtcaccctggccagctcttgtgctgggacaggggattacaccatctctgttcaaagagggggaaatgtgcctatgccttaagtcaatgcactcagcaaggagaagcacatcttatttatcttgttacctatagtttactttgggtgattggaggggaatgacttagttatgactggacatcttaaaagctgatagacaagccaaatggctggcagatgatgtggatttcaaagagcccagaatgaactcatcactggcttagacagtcctggatgccatttggaaagtagtggccctgcaagcctaaatgaagtagtatttgtaggcctgggtggcatttggatttttcttttccctcaacaaggttttactttttcttactttacaagcaagggaagttttgtgataggagagaaataaaagatttgatattttttgagatgacactcaagcatcaggctgagatttgcacacatgggatgtaaaagcaagctgtgtgttgcttagtcacttacttagaagtagatggtgggggacagcggcgtgggtcctagcctggccagtgatgctgctggcgtccagaccccagactcactccaagcactcttgttcaatatctcatgcagaagagttgggctggtcactcttaggggtgagaccccgtgattggttggtttgtagcactaaggtctaaaaaggaaaaccataaaagacatcagattacgctggatcagtataattaatattccatagggccatgttgccagaatctgtatgtatcaatacagggtttttccaagccaggaaacgccctccttggctactaggagcacctatcccatatcattcagataaacaatgatagctacaaagtcatttgtggctagataggttaagacaggtgattttttaaagtagactgtctttgcattttgccatctgaagttcattaatctttagatgacaaaaaagcaaaaagttcccagaacgtttttgcttagattttgttctaatcaccacgtgaaggaatgagattagcaccacaagtttcatgccaataaaagagactggtgtgatcccacatgcaaaatttaatcctaagggtagtgagatcacaaacagaataaaaataagagcaatcaaccatataaatcaagtacctattgggaacagacataacattcaatttttcatttatgctaagtgaccacagtatacaaagtaataagcaggaaatttgatatgggttaaattatgcattttgttcagattttggaaattggtatgcattataagtttctcaatgtacatctttttatcccaacaccctcaaactagaatatttgtcagtggtcaagagaaaaaattttacctgaattcttgggggccggcggggagcttttacattaaaaatctactaacgcctactttttaaaaaatgagattctttctaatctttatatatgacattttctagacaatcgcacctttgggtatattaaacagctggtatcataacaaagaatccaaatgaaccttcaatatactagaagttctagtaggttaatattgttcagaagatttttacaaattaaaaactgatttccaaatatgttcaacatttacttctatttgatatctgctcaagaagtcatagaagtcttgggaaactattcgagtatcacagaggttttcaaaagcccttatggtgacatctacctaggtaaaagcctgacatgtggctttataattgttatgttacccaagggataaacttgaactggctttgaacatcctttaggtcattttctctttggataattttcatcgcatatccagcaactatagaccaaagtttgcttaaggtttgaccctagagcagaggtgggcaaactatgacctggaaaccaaatctgacttaccaccttttcctgtagttaaagttttattgtcacatagccacatacattcatttacatgttttctgattttacactacagcagcaggatggagtagttgtgtcagagactatgtatcccacaaagcatagattacttactatttagtcctttacaggcaaagtttcctcacccctgacctagaggtttttgtggtatgcattggatatagcaggaaagaaagcacatttccaaacagcagggagtaagcttacatttctgtgtaggtttgggaatatagttacttggcaaagtctttcaggaaggaagcccttccttatgttacatgtggaaagcctgccttccaagacatgtggaagtaattgatccacctgccagagaaacacaggctcagaggatgcctgggaacagggaggatgggattagtggaagcttaatggaaaaggaaagttatgatcctccaagacccttaattgatagaccataccaggttctgcaggtcagcatcattgtgtaatgagagtgaagtaggggaccctgtggttcaaccttagaatctgtttcctgtaggctctttctgctgtctatattcattaaagttttccacttcaccctcccatagtctagagggatgcccattccatggtcctccagagaatagttttgacttaacatgtctgtttagcccacatcacgtcagttatcaacaccgccactgtgcttactgttcctacagccacaccaggcttgaagagttagtgagaccaacaaataattggaagtattggaaaaagcaaaatacatggggacaaaaaaaatacagtgaaattctttttatcaaactgatgctgtgagaaaccagatgaatgccagtttggctttatttctaagaatctgggtcttcattctctggtgtagaaggaatgcaaaaaactataacaacaacaacaaaaacatattttgaaaagacatattctgacatctctgcttgtgtgtggtaaggcaggttcctatcagacatttatccctttggtcaagatcccttttgctcatccagggtttcatactcaatatcgcttaaaaaaaaaaaagtatcagctagggatgactctggaagtatgagtatcatggtggggaggaaggaattttttttaaatgtaaatgacccccatttaccagaccctaatcaaagtcacttaagggaatccctcagccttttatttggaaacagttgaaataaactggcagcagctagatcagagtatcttgctttattttataaaggccaaaggtagtatgaagtttggaccaaaaaggtaaatagatccattccagcacctgatactgatttttcaaggctctatgaaaggtcaaaaatttcattaaacaagaccagttctccctcttccccctgtcccaagaaatcttaggcatgaaaaggataaggaaacagctcctggaatgatacatttgcatagtgccctagtagcaggttgggaaaaagttataatataagaaacaaccttcgaaaacaggccttttatctcaaagataaaatgtctttcttgtggtctttcatcactatctccgtggtggaaggttcccctagttccaacatatttccattaaaatagtcaaagccacggcattgggatgtcagatgcctctctttctttgtggtaatcggaatttaaaattatacagttgcctctgaatttctcatgcacaaagccaaaccactgataagagataaagcagtctgaagcctgctgcttcagccagcacagcacaccacacacgctcgcactttcaaaagcaatgtgatttctatggttcttaaaagctttcttcataagggagtccctgaaatttctcaaggcaggtttgaatggcaaagggaaaataattacttgtgggaggtcctccttttgagtattgttagagcatacatgtaaaagaaaataacctttttggggcaactcatgctcacacatgctgttttctttggttctccccctaccttccttttgtagatattgacagaataggaggaaatgagcatccttatttgagaaagagcaagaatgtcatgagcccttgatgcaatagtaagtgtgatgtcatcatacagtgttaatgatgctatcaaatccatcaataaacagtctcaaaccttccaacaacagtgctcactgctgctcctcaacttcagcccagcaagcagtaatatcatcacccattttgagatatgcaggtggaatagaacaaagaaacagccactgtaatcgagaagcatgtttactgtctaaatccacctgttgcagtaggaagccagagtggggttccaaatgcctcattaagtatgtggacagcctcactagtaagtgagtgaatttggcttcatcactgaacattagctaaggtcagcttaataacacaaatatgaggccgacttctttgcgagaagagaaaagaaaacatctgcttgatttaaaatccaccccacatgcctagagttgtctaatagtccctcactttccaatggcttcacatcctacttctacatttggggttttttggtgaaatcagagatagctcaggatttcataaaacgagaaactccaaactggtctattaggttccatgggaacacttgtagccaaaggattgtctgagggcaggaagacgacacttgtcaacaaggaagacagtgtttctttagttcccatattcatctaattcatggggttctaacattttggggggccatagattcttttgacaatctgagccaatctatgaaacttctccccaaaaagaaccaccccacaaaatcttgcaaaacgtaagagattttcctggatctgaagctacccgaagacatgggaagagttgtattctattattcaattttaagaatatttattaatattcactgagctattgctagccactgtgctaaacattttacatacattctcctatttcatcctcaaaacaatcctttgagttgggttttaatatagttccaatattcggatgtgaaaactgaggcttatagtggctaagaaacttgcccaaagccactacctagaaaatggcagagctggaatgtaggtttaactcctgaccactatgctataaagtcaccacatgtcaaactaattttcaagttgttgggacatgtcccctactaggttttaaactagatcttccttggtagatgaagctatagaacttctattttccctgctttctgtagtctctcacagtgacagcatctatactaaagtatagatacctaaggggaaaatatagaaagcctgcctgaataatagaatctagaacaacaacaaaaatattaattttttctgtgtatgcttaggtcaagcttaaaaaaaaaaaaaaaagaccggaaaatacctgggttgttagcctcacatttaggaaaaaattgtaatactcagttatctgtgtgtgtggctaaacaagtcagcatttctgcacacatacatctctttcctttatacttcccttcaaaagacaaatatcttacttttgatctttgacactatttggtcagtattcttctttacctttacttgtggcaaaactcaaggaagcgatcaaatagagggaagctcatttctatcattgtctctgtttccctataagaaagaactaccagggactcactgactgcattaggcatacaatgtcagagctgagctgaccactctggtcctgtaatgtctttggcctcacaccttggcagccatcattaatgggccatacccttccccaggtgcagaattctcctccccagagcactcaggccgttactaccaatttatctgagttggaaataagactcatttgccagttcttatttttaaagtggcaccctttaactttgaacctgtgtattttacactggcatcctagattcagcaatgaggtttggtggtgtttcaactaggaagggagaaaatgagtgcatctgaagttccttacagcttggtttctttggaatgctttcatcttctaagcaaagggatcagggtttgatctgtaagagttaaaaagacaaagtcattttgaagaattaactcagccagggatcatgcaaaaagattagaaaccataatgcccttgttaaagccctgctgtcaacctgccttcacccagagcttagagggccacagcagcaaagaggttggggtccatccctctctgatgtgctttttccacaacacatatctggtcctctggcaggattgtggatagagctcctcaccatacccaaaagactcagccccagtgccagtgctttcctggttcaacaacccaccacaaaaccttagtaaaaggatgagccaaaaatgaaaaagactcgactctacagtaagtcagtcagggatttcctttttaatggtttaagacatccaaatggcaagccaggaatagataccattaaagggtctcataggactaaccttaccagagccagaaatctagctctctggaagagatgcaagattctagaaaagtaaagggaagtgtcggcacatctaaatttagtgaacacaaaattaatttttatctagtctgtgacggagggaataaagtttttcatgtatcaaccacctcccccagtcaggtttctccctttttgagattatgaagaagctgagacatacttcttaaggaggtcgtgttttagaaggaaaaggcagaggctatccatcattatgctggctagatgcgcttctgaagaagccggattctgatgttcttaaccaaaatggtgaggtcatggaagtcccatttgcttggagattttgaaaaaaaaaaaaaaaaaaaacccattcccataaagtaattgagttcagcctttggattatttttggtttggtttttctctggttttgggtgtgatgtaagaagagctttttagttttgttttgaataacatcaatccttgcacactctatgcaaaaattttgtaagcatttcaataatgctatgaattacaaggaactattttaactttattacactttctgtataaaaaatttgtatttaatattatttcgaccacagtcttgtaaaatatattaataaaaataatgattggtaagaaggaaagcacccttgtccacttctttagggaattcctctctcacagctaataaatcagtcactcctattgactctacctcaggaataaattttcagattaacatctcttccatatccctttgatcagttgggtaagccattttgactctcgggaagaaattcacacaggttgccttatgaaaagagagcttactataaggtaaaacatggcctggaatttgggagtccccaggatttggagcatgtcaagggaacagccatcctcaatttctcttctaatgacctacataggcttctctggccacagtttactactgccctctccactgctcccttctctgtctttcaagaagcaagccagattggttcctaataggtaaaacctttacaaccaagctgctttagtgctcctggttagcctacaaataagccatctttgagtcaggtgcttatccctcatgctcccttagatggggccatgggtgagacaatcgatgagagaaggcattgtggcagaaccacttggatccactcaccacaattaattcttcattttgagcatctcatctctcctggtcttccacaacgacaggtcagtggacatgctagaatctgcctagaatttattcccatccagcaccacccaccccaggatatcatccttcatgatctcatccacatatcatcttctctctgtggccctcgtcattcttccttgattccctcatttgttctaatttcttatataaccctacattgtactatgatttacccatttacctacctatctgggaccccagaaatgcttatatacattcctaaagtttatatagaatcaaatatatatctaaattgatcttcacaacattataaggtagataggtaatttccttatctagaatatctaaacaaattttacatatctaacatgtgacagaaccaatgtcttttcccaattggattttcatctaaggccacatcttatttcttacatcctgactccaaatatcactgaagcaacattacagaactcctaagataaaaggatttgataaaaatattattcccaggcagagcacaatttatttccaaagatgcagtaattttattatgtagcttctgtttgggaaaaatttaccaaaaaacaaacaaacaaacaaacaaaaatcgaaatcaaaggtaatgaaatcacaattcaagagacttggtgagaaaaaccactgaatcttagctaaaaagataaactctaataagagacagaaaggctgttactgacatgtcaaactaattgacatcattgttgaaacaaaattagaaagcagataaaataccaggaagctaaaaaaagctctttgccttgtcttccaaggaaggaaggtttaaaaagtagcaaataggtataaatcagcaacttttgagatttcttctgatcattacccctttaaaagagatataagattctatggctcactttaccctacgaaaagaacccagggtagggcaggggtcggaatagggatcagagtgtaaaggaataagccaagtgcatttcagaaaaacttgtgagcaatgtgtatgcattagcatctccagttaagtccagtgatagggtaattttaatttgtgaatgtcaattgttaattattctcgataacaccgaactcttgcagctgaggctcaatatacagcccccaagaaagacccttatgacccatcaatggacagacgatggatgaagctgtaagactctctggcagaagtaattaaacataaatttaaaaaacacttgtgagatttttccagacaactcacactagaatctaaaatgggtacataaaatgtgagaatagaatcttccaaattatattttaataggaagtaagtatttggaacagccaaatttaggataatagatattaaatcaagggtagaaattataagagtatataattgattttaatctattagaagatgaagtcaaacattgcatttaaaaacatttggtgcaaaaaattaacctattaaacaagtaaaaggaaaatcaatattttaaagtagacactatggcaaaaagtataggagagattcagattaacaaatttataataataaaatgccctgtctaattgattatacatgattaaaccactgtgctgagcaggcaagtaaccaaaaacaaaaatccaaaattttgaaaaataaacagaaggagcttgacaaatttaattgtaagggaaaatttttaactactcccctgtcttataacttacaatatggcaaagcaaaaaattaactcataaacacacacacaaacacctctctgcacatggcaggaaagaaaaaaacttctttttgtcaataatcatataaatgaaataaatatcatctcaaaatgaaaacgttaaacttttcagactatattctctgaaagtaaaaacagacaatatattttatatttacataaaatcccaagaatttaaaaacatttccctaactggtgatttgagaaagaaacaagcctatttaaagaataacagttaaaaatgctacaaatgatgaaatttagccaaagcagtctttgacatagtaagagcatttaaacttgtcaatagagaaatgaataaataaagcattcaactaagattccagaagaatcaagaaaagaacaaaaatcaacaaaactaagatggaataagtaattctagattttacatcataaaaaaactaaaaatctaaaaaacaaaactgctgataaatcttttaaaatattaaaataagcttaataacacataaaataaaaatgtgttacaccaacataattccttgtaagaaaaatagaaaaccttgatgaaatgtacaattttgaaaaaataaccataataaaaattggtaaaaattagtaaaattagtaaaaattagtgcttgtttcataagcaaaagtgaaacaatttttgtttaggaaattctacaaaaatataccttttctgacataaataacattacatatatatataatgtacatacctatatacattcgtaaattaacatgtgaaaaaaattgccataattgatctgctgtaacctaggccagataaaaattttaaaattttgagagagataaatattaaatacagagaccaactctcaactgtataggctaaaattgataaagactgtcttgttttcctttaagttaattttcacacttaacaaaatgccaatacttttaaatctcaacagaaattttctgagaagtaaacaaaataattctaaaatttaccaggcaaaataaaagagaaaaaaaaaaggtaaacatattgtctaagaaaaatcattagaattacaaaaatctaacagactgtctaaaaattacaaaatagcaataatgaagataataacatttccaaatcagagacatagatcaattgcatttgatactattttcctacctggaaaatacccctcacctttctttgcctggctttcccctgctcactttctaagattttgctgagatatgtcccttcaagaaggcttctctggcccggcgctgtggctcacgccagtaatcccagcactttgggaggccgaggcgggtggatcacgaggtcaggagattgagaccatcctggctaacacggtgaaaccccgtctgtactaaaaatacaaaaaattagccgggcgtcgtggcgggcgcctgtagtcccagctactcgggaggctgaggcaggagaatggcgtgaacccaggaggcggagcttgcagtgagcccagatcgcgccactgcactccagcctgggcgacagagcgagactctatctcaaaaaaaaaaaaagaaggcttctctgacttgttccgttaatagatcaagtaaaactttccctgtactttgagggcacactggacaaccatgatagagggcaacctctatcacggttgacatcgtactgaagcaacctattcattcttctgtttagcctactagaatacggctcaagatcagatgcacggcttcctcactattttatcactcaagcctagcagagtgcaaggcgtctaaactgaaatcgttgaattgaagagaccagaaaacccagaaatagactcaagtgaatataagaattcatcatctatcaatttatcagttcaatctaccgcttattcttaaacactccaagacagagagcaagaacaagatggtggtctctgtactcagcttacaaacgggcaatctcacaaagaaacaaacagttgcaagtgtgaaataagcagtgatccaggagaacatagttctccagggaagctgatagctggaacaccattacaaaccaagggaagaggtagtgattacttgattgttattaggaaaaccgatccgcagcgtccttggtgaggttgaggaggcttcagagtcaccccttaaattaactccagtggaccagagtcaaatgtttgttcatctggcatctattgaatgcctattcccttataaataaataacacactctctttactcttgaataaatatctcagagcctaatgaggtaaacaaggacctaaaatgatcacttataacatagtatgagctgtgaataaaagacaaaataataggccatggaataacaacctacttaggatctgtggaagaatgacaaggaaaatctcaaaaaggaaaaactggcacattcatgcatatgcaattccttttctctctttttttgagacagagtctcgctctgtcgcccaggctggagagcagtggaaggatcttggctcaatgcaacctccacctcccaggttcaagcaattgtcaagcctcagcctctcgagagagtagctgaagctacaggcatgtaccaccacactcagctaaactattgtatttttagtagagatagagtttcatcatgttggccaggctggtcttgaactcctgacttcaggtgattcgcccgccttgacctcccaaaatgctgggattacaggcatgagccatggcacccagcccatatgcaattcttaagttctttcatcactcgtcccactcccacaaataagagaaccttaaataataataatcaagtaaataggagaaatggttagaaattacgaactttgatgagttaatgcaaattaattcttattaacccatcaagatatcaatacatatatgaacaaaggagataagcacataatgcacacaagtgaaaatgtacattgtttccattctagagcactggaagatagcacaattaataaccacttttcaagaaaaacaatattttcttgattttaagatgcaatatgattttacgaatggtaaaaaacccaacttcgactctaccaaataaaatgtggttaaatctatcaaataaatgtggtgaaaccatggtcatacccttgcagaaaaaaacaataggatttaagtgagctgtttttcctcaacctatcagactgtttaaatagtgactttatggagggcaacgtaataaggccgttttataccatatgtttagacctgaaaagaacctgtaaggtaggcagcattttccccgtcttagagaaatcgtgctcaaagaaattaagaaacttgcctaaagtaattctactagcaaatggcagagcttagtattaacttcaaaataattcctcccattatttgaagttgtctacctttcctgtcaaaatgcagtaagacaaacatttgcccactgatgcaatgggcactggtatattctttcagaaagtaattggtcagtatttttaaatagtcataaaaatgtttatacaacttcacctagtaaacctattttcaaaattcatccgggcaacaatatttaaataggaaaatgttgttagtagtagcagtgtgcactgtagcagaatttaaagatgggaaaacttagcaatgcttcctaatcagacgaaggagaaggccaactagattatggttattttaaatttatggaatatcacgctgcctttaaaaaagatttgtgaggatttaatttcagtatggcaaaatttgatgttaaatatgtaaaagtgatgtgcacacatgaatcaagactgctagggaaactgaaagatgaagcaagttgatttggatggtgatattgtaggtatttcttatcatttttgtgtttataatatttgtataataaaacattttcaaaaaagactagtatcttttatttttctacaaaatggaattagtggcacatactttgaccctacaaataatcctcatgaagaaaaattcataaacctaaaattgtttaacacagtataaaaaaattggaattttcctttttttccccaacaacagtaacaataagtaaacaaattatggtacacccaatcaatgaaataaatattaaagtaattttggaactcatggaaaaatgtcatgtttaaataagtttaaaatacctagaattacatgaaagatcattacatttatgttttagtcagtttgatatcctgtaataaagtactgaagaacaggtagcttaaaagcaacacaaatttatttctcacagttctggagactggaagtcacagatcagggtcacgttctggtgagggccctatccaggtagcaggctgacaacttattgtatcctcccatggcagaaagagagcaaatgatttctctgtggtcccacttaaaagagcactaatcctattcacgagggccctacccacatgacttaatcatttctcaaagacaccacttcctactaccaccacattggggcttagatttcaacatacaaatttggggggaacacaaactttcagtaccttgcaagctatgtgaaaaaatatatatatttaaggataaggatcactgatcattttaaatgatggcattaatatgaatcaggctgtttatttttgtttttctaagtagagttagtttattaccattaattttataaaatggatgaacaaaaatcatttttaaccttggctttaaaaattatttaatttgtaattttcagttcttttattcaagtctaccaatgagtcaaatttgaaaagacttctgaacacagagaatacctggggatttaaggttgcttctccttctattccacagaagaataaaacctttgaaaatgttctgctggcctctgtgatggctacaaagctctactacagatttgacatcaaaggacaagccacacatctaaactaagtttgggcaacaaggtggtaggagcttagctcccctactggatttcaggcaagggctaggtgagaaaggccccaacccttcccccttttaagagacatgaagagaaaccaaagaaaatttaaccacaactggaaagggatagctgcctataaattgtgactgtaataactgatgtagtcaggtcttggacatcctttctgaccattgttacctttcattcactttcattcctcaaactcccataactactcctcctgtctcaacattccaggtttgttttgttaaaccttgcaattattgcaagttaaaccttgcaattctaattccaaatggtttcatacagattagtacatcttaaatccatcctttccatgatttctacacttcataacctacgtcccctccaaaatctaactgatcttgctgctctctataagaccccttcacagataatctaccaaggcccccaaaattctataatcaaccccttctccagttcagttaccatacagtccagacagttaccacaggggtccttctctactctttaaaagctaaataactgatacactataatctggcccaactagctcatctttttttaatttttctcctccagccaaatgggtattctccaaccaaattatgccctgtaagaggaaagacttaacacagagtaatggatacagtgaggaaaggtattggttatgttgtcagctaaacctgtgtattagtccattctcacactgctattaagaaataaccatgactgggtaatttataaaggaaagaggtttaattgactcacccttccacagggctaaggaggcctcaggaaacttacaatcatggcagaaggggaagcaaacatgtccttcttcagatggtggcagcaaggagaagtgccaagcaaaagggagaaaagccccctatgaaactatcagatctcgtgagaactcactatcacgagaacagcatgagggtaacctcccccatgattcaattacctcccacggggtctctcccaccacatttggggattatgggaactacaattcaaaatgagatttgggtggggacacagccaaaccatatcaacctgtgtctaacctagaccagtgtttaagaccacgttccctcctatagaatgcctccaagttctgatctcaataacctgggctcctgacaccttcaaccatccccactcagtgtttaaattcagttttctttagcactgtgtgtatagtttgctctcttccttgaggaaggaaacattccttctcttcatgcccttttttttttttctcctgaatcttgccactctggacctaccaaaactgtcagatctttcctatttgtaggaaaggtcatttataatatacacagacccaaaagtattctctcaatcctgcccacctcaagaaactcaccaaccaaatttttttttttttaaacagggtctcgctctgtcacccagagttggagtgcagtggaacaatcactgctcactgtaaccactgcctgccaagttcaagtcatcctccccttggcctctcaagtagctgggaccacaagcatgcaccaccacacccgagtaatttttgtattttttgtagagagggagtttcactatgttgcccaggctggtcttgaactcctgggctcaagcgatctgcctgcctcggcctcccaaagtgctggcattacaggcgtgagccaccgtgcctggcctcaccacccaaattcttaaaatcatagtctatgtttactttttcaccatttgcacacttaaagatatcctccaatctaatcattgtccctacctctaatataatatggttctctaaagtcaccactgacctcctaaatggtcaaatcagaaggttttccaatggccatgtctccattttgacacaatctagtccgaaattcaggttgtagtagactctgttggtggcctcctcagcatccatttacccatcctgtttccttacagaacccatctggatgaggcacccaccctgttcccatgacatccacgtaactcagggaaaataaaatgttatccataaacaatagacacatgaaagcactcatgcttctttggcttttgttttccattttgagaaaaatttgctgattgcctggcatcccagacagatctctgacatatgtgttacgattgcatagttaattctattccttctgacagttatattatgattctgatagctacaaaaacagtgtcttagagaaatcaaagagggcccactccccagcttctcagtcacaaggataagtttctaataccaacatctcgtcatgtctttctccttacctattgctatggtttgaatatttgttcctttcaaaactcatgttgagatttattcccgagtcataaaacaagactaagattttcaatagattaaaatttaaaaaaaaagaaatacattccccaacatgatagtactgagaggaagggcctgtaagagatgattggatcatgagggttctgacctcataaatggattagcaaattaatgagtttttatgaaaggagaactggtggctttataagaagaggaagaaagtggtgaactgacttgggaggctgaggtgggaagatcatttgagcccagaagattgcggctgcagtgagctgtgattgtgccactgcacaatcaccagcctgggtgacagagtgaaaccttgtctcaaaaaagaaaagaaagaggaagcaaaataaaaaaaaaaaagagaaagaaaagaaaagaaaaaggagagaaaagaaagggaaagaaaagaaaaaagtccttagctggcacactgggacactcagtcccctcaccatgtgatgccctgtgccactcttcagacagtcctcatcaacaagaaggctctcaccagacgcagccccttgaccgccttggacttctcagcacccgtaactgtaagcaataaagtcttcttcttataaattacctagtgtcagatattctgttgtaagcaacagaaactgaactactatgcctattaattctttcttcaggtcttggggctcctgtaatgtctttcccagctcttggccatcaatcattctttgctatacaagattggtgacacaagagcagtgacattctttttatattattcttttactgcctctgtcaaaatacattttcacatgcattgccaaataatcttttaaattaccttttaaattacaagacacctatatcatcttgcaaacagagaaactaagtcccagagagacttagtgattatccaagttggcatgtgtaaagcagcggaggcagatttggaatctgttcagtgcttctatatttactgaacactgaccatgtgacagggattccaagggctagcattccttaaaaactattgatgtggcatgaataaaagaaattcaaccttgtttccagtatggtcactagttacatgactgtgaaaagccttgagcctcagttccttctcctctgtaaaatgaaagtgtcagatgaatgatctctgccagccctcacatctggtgattttacatggtgctctgtgaactacatatcatcagagtaaccagtgctgaatcttgaacaaaagtagctcattcattcattgcccaagtattgaacacatactgagtgctggccattcttctatgtgtttgaggattataacaaacaaggtaggcatggcctccaccatcatggagtttacaatctaatggaaagaggcaatataaaaatataccagcaatcaatcaagataacttctggacaatgaaaagtacagtaaaagaattaaacccctccctgaggaggtgacatctgagatttgatgggtagaagtcaggcacacagacatttaggagaaaagtattcaagcagagagaatggaaagttcttagaaaaacgtagcaggtaattagtttcattacttagaaagaccgtacattcaaatgctttgctcatcttcattttcttctgtgaattagacatgtgagatgcagttgttgcctttcacctgctgggagagtgtgaatattaatctgttctccaggaaagaagaacactttttaggtgctaaacacagcttctgtaattgaccatcaaggacaataataaaagaatcaaaacatacacagagtgctgttgaggccaacaagaagggagagaaagaggtcctttgaagtttacaagaagaaggaggaagacagaagtcactagtagcagacatttcacaccacaccaagatagaggccagaacttcataagccaagatttagtaaacaccatggattgccaagggtggctggactctgggaccagaatctcccacatcaggagaaagtcttgcacttcaaagtctggtcaaggtgatgtaatgagcttatatctcaaggcctgctctctgctttaaccacaaatcaaaattaaatataaaaagaggaaaaatataaaaagagataaaatggtctctaaaatgagataaacatagtgaaaagcaaacactgatgaaaatgccaagtgtgtaaggctaaggctgcagggctgctggggaccaggactaggagctggcagaggttgcctgagggcaatatgctcaccatttatcactgaggacacgacagaggagagcggcagaaagcgcctgagcccctgcttcctactgctgcacctacacaacaggtaaagagaagctccccgcctacagcagagattagacacagcctcattacctgctcctggaaggatacagaatttcctccacattgctcaggagaaagagccttagtaagtaatataaaacctggctctggacaaaggcctattggggacctaagaaaaagacagataaaaaatcacttgagtcagagaaaatcatcaaaacaaaaatctgaaacaggaaaaatatctaaaacatatacaagaaactaataccaagataagcaaatggtaattcagcaatgacacattcaatccataagaattaatgttatagaggagtctgaaaaggactttaaaatcctcaaaggaaaaatgaaagataaacatgctttaaaatagaaaacaattataaaagaaaaagaaaaattccagctgggtgcggtggctcacgcctgtaatcccagcactttgagaggctgaggcgggtggatcacaaggccaggagttcgagaccagcctggccaacatggtgaaaccacatctctactaaaaatacaaaaattagctgggcatgatgacgcgtgcctgtaatcccagctactcgggaggctgagacaggagaatcgcgggaaactgggaggtggaggttgcagtgagtcgagggtgcagccagtcgagatcaggccactgcactccagcctgggtgacagagcaagactccgtcaaaaaaaaaaaaaggaagaaaaattcctcccctctctcacacatatataggatataggatagatgagtagatagtatcaggtaaaatttttgtaaataaaaaacgcagtctctgaaattaacagttaacagaataaactctggaatggaatttacccagtcaaaaaggaaatcagtaaattagagaacagtattgaagaattcactaaaatacaacatgaaaaaagggaataacaatgtttaaagtattacgaagattagattcagaggaccgatatgcatctaactggagtttcagaaaaacagaaggggaaatgttaaataagcaatattttaaaagatatacactaaggattttctaaaataaaaaatatgcaaggagtctcagtgtaaacagacactgagcaagataaaaattaattcatatatagatatattgaactaaaactgcagaaatcatggatacagaaaaaaaaatcttaaaagctacctgaggaaggaaaaaagagttacaaccaagaaggcataataacaatgataaacactatcagcttatgtcatttaaagtgccagtggaacataattagtaatacaaaattatatacacatttaaactatcattagcgagagggcaggagaaaatgaatataaatgtttctacataaaatgactgagaggataggaaaccctctagaagacctctctaaaaaaatcccagcaaattatgatgaaaatttacccttggaggaggaaagaattggtaagacagtacgaaaaaaagtaacaaacaatatatgagtttttgtaaagtagtaagagtacagattaaaaccaacatatattagtaactataaattactccaattaaaaattaagattctcagtttaaatttaaatatatatttacatacatatacagaatatatatttacatatgtacatgtgtgtatacatatttacatgtgtacatatgtgtgtgtatatatttacatatatacatatgtgtatatatacatatatgcaatacatgtgtatatatacataccttgtaagcagtctgtgtatatgtgtgtatatatacacacatacacatatatacacatatatacacacatatatacacacatatatacacatatatatacacatatatacacatatatatacacacatatatatacacatatatatacacacatatacatacacatatatatacacacatatacacagactgcttacaagatagatatattaaatataaggataagaaaagtcaaagttaaaagatggagaaaggtattgcatgcacaaactttccaaaggtagatagtatcaatcttatagtatcagacaaagtagactttaagacaagtataattcaacataaaagggatatttttaaataatacatgagtcaatgcaagcaaaacatagcagttaaaaaatttcaccaatgatttaccttcaatatataaaaagcaaaacttaattgccaggattcaaaaaaaaaaaaaaaagaaaagaaaaaacataacagaggtggtgtaaaaacatctgcttcagaaactgagttaacgagcctatttttaaaaatcagtaaggatacagaagttttgaacagcactattaattaactcgatgtatttgacagagatggaacattttacctaacaattatagaatgtattttcttttcaaatttacctgggaatgtacaaaagagaaccattttctgggccgtaaagaaagagtatagttaagctagaattaaaaaaataaaactatatatatatatataatatatatatataatatatatatacatatatgtgtgtgatatatatattcacacttatataggtattatgtatttacacatatctaggtatagtcggatacagacataaacacatatacaaaattgaatcctcaactaattggaaattaacagaactttttttaagttgagggatacacgtgcaggtttgttagctaggtaaacctgtgtcatgggggtttgttgtacagattatttttatcacccaggtattaagcatagcattcattagttatttttcctgatcctctacctcctctttagtttaattagatcccatttgccaattttaacttctgttgcacatgcttttggcatctttgtcatgaaatctttgcctgttctcctatgtcttggatggtactgcctaggttatcttctagcatttttatattatatttctggggtttacatttatgtctttaactcatcttgagttagtttatgtatatggtgtaaagaaggggtccatatgacttcataatgactcaaagattagaaaatattttcacctgaataacaagaatatgagaatcaacaaatgatgctggaacagctagatatctctattcgttttaaaagaggagaggagtcgcttccaagatggccgaatagaaacagctccagtctacagctcccattgaggttgatgcagaaaacgggttatttctgcattttcaactgaggtacctggttcatctcattgggactgcttggacagtgggtgcagcccatggagaatgagcagggcaggacgccgactctctcaggaagcacaaggggttgagggatttccctttcctagacaagggaagctgtgaatgactgtacctggaggaatggtgcagcccaaatactgcacatttcccatggtctttgcaactggtaaaccaggagattgcctcccgtgactggctcagtgggttccatgcacacagagccttgctcccttctagcacagcagtcagagatcgaactgggatgccccagcttggccgggggaggggcatctgccattgctgaggcttgagtaggtggttcaatgctcatggtataaacaaagcaacagggaaactccaactgggtggagcccaccatagctcagcaaggcctactgactctagattccacctctaggggcagggcatatctggacaaaaggcagcagacagcttctgcagacataaacatcactgcttgacagctctgaagagagcaatggttctctcagcatggcgtttgagctccgataatggacagactgccttctcaagtgggtccctgatccccgtgtagcctgactgggagacacctcccagtaggggccgacagaccctcatacaggcaggtgcccctctgggatgaagcttccagaggaaggatcaggcagcaatattcactgttttgcagcctctgctgatgatacccaggcaaacagggtctggagtggacctccagcaaactccaacagaatggcagctgagaggcctgttagaaggaaaactaaaaaacagaaaggaatcaaatcaacatcaacaaaaaggacatccacatcaaaaccccatctgtaggtcaccaacatcaaagaacaaagggagataaaaccacaaagatggggagaaaccacagaagaaaggctgaaaattccaaaaaacagaatgcctcttctcgtccaaaggaacacaactccttcccagcaagagaacaaaactggatagagcatgactttgaagagttgacagaagtaggcttcagaaggtcagtaataacaaacttctctgagctaaaggagcatgttctaacccatcgcaaggaagctaaaaaccttgaaaaaaaggttagatgaatggctaactagaataaccaatgtagagaagaccttaaatgacctgatgaggctgaaaaccacagttcaagaactttgtgaagcatacactagcttcaatggccgattcgatcaagtgaaagaaaggatatcagtgattgaagatcaaattaatgaaataaagtgagaagacaaaattgagaaaaaagagtgaaaagaaatgaacaaaccctccaaaaaatacgggaggatgtgaaaagacaaaatctgcattggattggtgtacccaaaactgatggggagaatggaaccaagttggaaaacactcttcagcatattatccaggagagcttccccaacccagcaacacaggccaacattcaaattcaggaaacacaaagatactccgcgagaagagcaacaccaagacacataattgtcagcttcaccaaggttgaaatgaaaaaaaaaaaaaaaagttaaaggcagccagagagaaaggtcgggttacccacaaagggaagcccatcagactaacaacagatctcttggcagaaaccctacaagccagaagagagtggggtccaaacttcaacattcttaaagaaaagaattttcaacccagaatttcatatccagacaaactaagtttcacaagtgaagaaataaaatcctttacagacaagcaaatgctgagagattttgtcaccactaggcctgccttacaagaggtcctgaaggaagcactaaacatggaaagaaacaactggtaccagcgactgcaaaaacatggcaaattgtaaagactatggacgttatgaagaaactgcataaattaacgggcaaaataagcagctagcatcatcatgacaggatcaaattcacatataacaatattaatcttaaacgtaaatgagctaaatgcccaaattaaaagacacagactggcaaattggataaagagtcaagactcatctgcgtgctgtattcaggagacccatctcacatatacagacacacataggctcaaaacaaagggatggaggaagatctaccaagcaaatggaaagcaaaaaaaagcaggggttgcaatcctaatctctgataaaacagactttataccaacaaagatcaaaagagacaaagaaggccattacataatggtaaagggatcaagtcaacaagaagagctaactactctaaatatatatacacccaatacaggagcacccagattcataaagcaagtccttagagacctacaaagatacttagactcccacacaatcattaacaccccactgtcaatattagatcaacgagacagaaggttaacaaagatatccaggacttgaactcagctctgcaccaagtggacctaatagacatctacagaactctccaccccaaatcaacagataatacattcttctctgcaccacatcacactcattataaaattgaccacataattggaagtaaagcactcctcagcaaatgttaaagagcagaaatcacaacaaactgtctctcagaccacagtgcaatcaaattagaactcagaattaagaaactcactcaaaattgcacaacaacatggaaactgaacaatctgcttctgaatgactactggataaataatgaaatgaaggcagaaataaagatgttctttgaaaccaatgagaacaaaggcatgatgtaccagaatctctggtatacatttaaagcagtgtgtagagggaaatttatagcactgaatgcccacaagagaaagcaggaaagatctaaaattgataccataacatcacaattttaaaaactagagaaacaagagcaaacaaattcaaaagctagtagaagacaagaaataactaacatcagagcagaactgaaagagatagagacacaaaaaacccttcaaaatatcaatgaatccaggggtgggttttttgaagagatcaacaaaattaataatctactagcaagactaa

SEQ ID NO: 5655 - DNA, 286021 bp, Homo sapiens
  LOC134541 gene - 166644421 - 166890441 of chr5; NCBI Entrez Gene ID: 134541; Build 35; sequence includes 20,000 bases upstream of initiation codon and 20,000 bases downstream of termination codon of the gene
cagactgacttgttagcatcatcaaattgtacctaggcatctggatgcccaagatacatgcagggtcagacagaaaatgagctaaatagctttttcagctaagattttgttatctaaagcagctcttatgtgagtcaaatatagagcaaaaatatttgagagaccttcctgagaagagaaagccatgtggataaaggaaaggaaaggtggccgggagcgatggctcatgcctgtaatcccagcactttgggagaccgaggcgagtggatcatgacgtcaggagttcaagaccaacctggccaacatggtgaaaccccgtctctactaaaaatacaaaaaaaaaaaattaacctggcatagtggtgggcacctgtagtcccagctaccagggaggctgaggcagagaattgcttgaacccaggaggtggaggtttcagtaagccgagatcatgccactgctctccagcctgggtgacacagtgagactctgtctcaaaaaaaaaaaaaaaaaaaaaaaaaagaaaggtgggcatgctggccattttaaagggtttgctcgatgaatgctagaatattggggatacagaactggttatggcatcatcaaataattttacttcaagttcaggtgacggtggcttcttatattgagcttaatgggttccacacatgcaaaattaactcaagttggtttaatttgaaatgaaaattttattctgagggcatggggatttttctgtgaacccgagtgcaggatcataaccattgtacacaggcctctggaaggtactagaactagggactggaaaattgtacagactctccacccttcgtctctgtattgctgcgttattgtcttcttatgctgcaaactggcttctcctgcatgagcttatctgattatgtccagagttttctgacctcacaatttccaagcacacatgttacggttccagctaccagaagacagttaatcttaattactctcttttttttcatagtcccatatttttggaaaaaatattatgatcgacctagcttgggtcatgggctcattcttgttccaattaaaattttgcattatggaagccaagtggtctcgctcatgaaactggcattgcaatgaatttatattaattgtctccccaacacattcaacatattttctaccactttggagatacacaagaagtgcttgtaaagtgaaaaggtatagagactcaataaagtcaagtcccagttgtggaatgtctgactcctttcctacttcaaccaattgagcctcttctttcggcgtctctttattacaatgatcatttatcataattgtgagattgcgaattgtcactaatcatctcaaggagaggtacaaaattcccctggaatgaattttaattgaaatttaatttttatcaaatcacataaaaaacactggggtataagaagaagggggtgaacacagaaagagaggtcatgaaattttaccttgattaagagttggaaatttattcatctatttttgaagtatcttcttactggagataaaatttaactttccaaaatttggctaataaggaagctgtacatagagtgctttttaaattcttaaaatctgagttctgttttaaatggtaggaaattaatatgctgcttaaaaaaataggagaacacatggaaggaaaacacaaggagataacatgtatcggtgaaatctggatttaaagcctgatattttgatccaaatctaggctctgctacttttatgtaatcttgtttttaatgcttttatgtaatcttaagaaaagtttctttatttgattccttatctgtaaaatggggataggtatatctaaataaaatggttgctgtgccgtttaaagagatagcaaatatcaagtacctcgtgtgttgcagcaattgcaacatttcattcatttgaataaaaggtttcagacacccaggtaaataaatggatgataatacagataaaagtcacgccggttcatgaaatgtgaatgtgccatgctagatgaatcacttttcataagtagagacagtgcaacccacctgcaatatcttcagttgtggtgtgtgggacacatgtcgttctatgtgttcatccctcagtatgttttgagttgttgcctctgcttggtgtcattggtcagtccacccactaaatcagcctgttactttaaaaaatcctactgtttccataaagtgttctaaagttgtatttgagtcaccatagagaatggcatgttatcgtgctggtgaacctaggaaggcatttaatagaatctgactgacatttgattctggtctgtgcccttcttttgtttgcacttccatttgttctttgggtccttagtcattcttcccagcaatcctgaccacttagggtttctagcaatctcttttgagaaccaatattaattcatcaagcatgcctttcttttccatttccagggtttaaagagtgtatatcttttgaaagcagggttttgatgacttctttgagcctttattctttgccccacaagagtggccccttatttttataatcaaaggtaatgaagaagccagattcactttccaggcagtggtactacaacacaaacatttcatagcatgagggatgttaataattgctttgggagggaatattcccctctcaaaaatcagacactatctctatattccaggcagttcatcacaactgtctcccgcagaaccttttatctgcatgtatggaagagtttacactgttgtaacatttgatactatgttgggcaacagagggtagtaggcaaatgtgagagactttcatttccttgaacctctgagtgattacagcattatgtttctggtgaatggcagtgctaatggccgtaaaaatataatggtataccttaagggatccttaggaaatgcagggatgcaagtacataattttgagattgatgttattgagttatttttaaatttgcacaaaattttttatggggctgtacattttttaatcttttctttcatattacctattgatttacaactaagctgcaatagtaaggacaggcaacaaagagtctttttaaatacaggtttgtataaatgaactcttcagctatcactcaaattcttactccttacttcttgacaaacacctttttcagccagtgtgggtatgagcttctttctctgcatgtgtattcttctggaacttaaaacttgaactatcaacatttttggccatttgataaatgaaatatctttattatcttaagtgcaaaataagatatagaggcatagagatggaaaagtggtataagaaaataatttgatgtaattgtggctgcttctaatattcactgacaaacctcaatgccagaaataatggacaaaataataattagcagcagcagtcaggcaataactaaacacgtattatacagaaaggtcagatttcaaactattgtcacaagagcagttaaatccaaatgcatcttctcaagagatgcacagccttggctcctagcctaagaaaatgtatcaatttcaaatcagtaacctcctaaatacaagcaatttattttgttacattgtactagttactgtccccactatgaatgccttgtttgtgttaattcaacatgttgcaagatttctggcaaaagaagtcctcatctgctgtaagattcttggtgaggcatgtttgatgtgaagctatttgaccagaattccaaatgtcttgcttttgttatgtacataatagcagaggttagcatactgtggcctgggggtcaaatggaacttgctggctgtttttgtaaataaagttttattgaaacacaggcatgcccattcatttctgtattatctattactgcttttgggttacaatggtggagttcagtagtagtaacataccttatgatgtgcaaaaagttttactgtctggatctttacagaagatgtttgttgatccctgacatatagcattgctaggcctcagcacatcctttccaaaagatacatagatagatagatagatagatagatagatagatagatagatagatagatagatagacagacattttttttttcagtagggcattgattttgatttcacattgtttcaggagccaactcctacactctgagtattattttaaatctttcaaagaagttaacaatatttatactttgtttcctaattaaggaagcagagctaccttgaaagagaacatttatgttgtatttttttgacaaagcaggaagaaaatacgtcacaaaatttgtatgaaaattcttatgtaaatgctgcaaattaacaacagacctgaaagatatattcagggcagttaacagctaagaaagacaacaatggctctaaggccttttaaacatttttcccatcatttttttgagatgtcttgtaaacacacatctatttttaacaaagctttattgggcgctctttaatgctgggttctgtgccagctactggagatttactggcaagaggcacggtccctgccctcacagaaaatctcatacacagagcaaaatgatcttgttatcatccgtttctggattttgcaccttagttcttgtctcatgtcatcattgaagcaagactttaatgaatattatatgcttactcataatagtaaaatagtagaaaatagtgactacacacacacacacacacaatcagattcataacaaaaatgatgaaagtgcattgtactgtcagtcctccctcccctacctttttggctgggggatggagtaaaaaaggatttatatcacccagtacattgcattccactctgaaagtctccagggaatatcttccttctccactcattcactctcttcttctctggatatgcctcttttacattcttccccacaagatctgtaaatccttctggtttcattctctgtacttacctactctcttaagacccttctctctttattatgcaaagaaatttagaaccatcccagttcttcaacttctgtatctccacatccattgtttaggtataagaaacaacagaattcccagttactaggatcaggtagtgagatacctgaacaagtagtcagatagttataaacaactcatctttttcatgtcatttctccttatcatatatgttatcatttctgtgatgaacccaatatggtctatttacaatacaggccaagtgcatctaatttaagaatgagtgatgtagttagaacacctcagtttcagattttcagtgttaaatggaactgtttcatgcagcaaaagtagaatatcaaatgggttattaatatttgtgtttctatgctaagaaagtgccacgctgctaactctttagagctcagaaatacagcaacctaacatgtcatttagaatactggtacttaacttgcactttaaggatcacgaagtaaccactactgttattgttcatggccagatggtagtagtaataattgacattagtggtgggagtggtggtggtgatggtaaagtccgtcactaattgagcatctattattaggagattcacacatacctgtttggcatcctcataatgccttcaaggtaggtatattatccccactttccagaagtggaaactgaggcctatttccctcaattcttctttgtctcttcatcatgatctctctctcctgtatccagtgttcatgctatcttagaggcactcgaatatactggttccttgattggatggtgcccttacccttgatgtagatggtcccacatcaggattgtgatgtggctagtaacttcctgaggcaactgcattggattgaaggaactaggttcttggacaattacaaatccaatggccaaagggcaggggagaatgctctaagactgccgttttctctgtcgtttctctttgtaatgaaggcaggccttggagttaggcagctatcagtcccaatcttgatgtgagcactttttaggcatctggaattaacaactcacttaacctctcagaatttacattttcccatctctaaaacacagctaagaacatctgtgttgcaggatggttcaattagtgataacttactttaggagcctaactcaaggcctggtgactggcaggcattcatgaaattgggagcttgacttgacgatgattttgactttgatggtgcatcctctgcacactgtgattgtctagtgtggctttcaatctcatttacagagaggggcacattcaatggaatgggaagagggtgttcaatctttttcttcattaggttttgaggctgcaggctcatgggctttctctgctgcctctccgaaagctctgcatggtgaggaggagtggggagggactgtttttccggttatggtaacttagccagtgcctaaggtacagccatctgttcagcttctgatctcaggaggcacataggaaaatgggaggagagctgatgggtctgcatgtggggaaggtggagctgaagaggaacaggcttcagtaaacctccacatttcgtattgaaatttttgcaggaggtgtaaccatgctgtctttcttgaatgttaagcagtttggactggagagggggaaaaaaggcatggaattagatgaactaccaatctgatatagatatttgtcttttcattgctattcaagtaagaatacacacaaacacataagcttgcactatcatggcaaatatctagatttataaggtacgtgttatccctttgtggcttttgttgatttggactgctagtacgtaaaaaatgtttttcatttcacaattcataaaattcatagacagcggatcctggctctgctctcaccatttcctgtgcaaatggctccagggaccttaacagattctaaaaggcaggaacatgtagctctgaagctagggagcaaaacacaattgtgaatttgcttattctttcttgctctggacattaaccagagttggctttttatccccagacatgtcagtataatggcacaagggaacaggaagcgaatttcctttgacctcttatttactattgcattaaattactaggccactatctcccacttttgtagattttaaaccagattttccttggtctacccagcggtcacaggaatattctctctgtaaatattttggagtgtatctatgcttagaattacccttaagtgtgtctaagaggagactggaaatcttagagtaccagttttcacactgtgtccatcaggcccttcttggggatggaaggaggcagacagactccagcttcatcccctatctcagcttctctctctttcttttgtgtaaggctctgcatgacattccaattggtactttaaatatttttaaatgaaccacttttatgcaaaagttctaacacacaagaatgggatgcactgttttcgggttgacttagtagttctgcttttgggaaacaggcaaaacagaggaataaaggataaaggcaccgtgcattatccattacattttcttaaacagaaaagcatgtcacctgcaatatttaagaaacaggttggcaattcaattaacgtgttatcagaaggaagacaggttttgtacaacagttttctgattgagcttttaaaatatgtatttttgactataaacatgctcatccaataaaactttttattagaattatagaatacctttaacattagctcaaattaagaaataagaaagtttgattcacgtgtactaaccctttcccctactcccttctagactatcttcttcaattacttgtcgtaatttttaagtggggaagaaaggtggtcacatccatccccacttagatttaacagattgcctctcaattcacacgggcatttggaaatagctggctttcttgataccatacatcctaaaggtgcacagtcattttagaagacacaaatatttaagcacaatgaaacaatgcctggggtgtgatcaaagaccaatgatgcgagagatacacatttaaacaactctctgtagtatttgttctgacagggaaaacatggatttccattggatgcacctaaaattcacctgtgcatccttattgcatccatttacacacacatacacaaacacaaacaggtacacaggtacactcatatatacaatagcacacacacacacactttcacacacatatctcaaatgggctgtcagtgattaacaagtcaacccccttaagtagtaggatattctgagaagttaatcgtgaacagtgttacagctcataggattagttaattagacaaaggcttgcaggcaagatcgctgtagtctgttttgctaaagtgatggaccccacttaggcaactgatgaagaaagcagtgtgaacgctcttcaagggcggaaatgtggaatgtaacagaataaagccccagcatagcagtaacgagctggcagaggtattgccatccggtgatggccatttgtcagtggcagaaaaggtggaggcttggggaaaagatttataattttggttaccatccttcctactgcttcaaggcaattttaattactttttaaaaacagtctctaaacttgcatttccccacatgaattgttgaccttaactttcaaggacaactatgctgacagtgcttactcatcataagcaataaatacatttattaaaagatggctattcaactgtattaggattaagagtagtatcttattactttagaattgtcttaaaaaatatgttggcaaatgtggttgcttatattgtaactagctttttgtgatcctttctaggagccaccaaagtgtttctttttcctttataccaaaactcacaaatataaagactatgttgtccaagcagagggttcaaataaataaagaagcctcgctatacaattgaaaggggtggtaaaataatgacagtaataatttttaaaaaggggtgtttgtgtacctagtttaaaattgtaaatgaccttccaaataggtatttattttcatgatggaatttgaggccaggtatgtggcattgtgggatttttttaaagtaggctttgtactttgctacaactgtcaaatcgtatgcagccagaaggaagtaatacagagatatccaatgggcaatgactaaagatgcatccctttagtcaatttccaccaatagcaacatcttgcacactgtagtacaatgtcacaatgaagagactgacactgatacagccaagatccaaaacatttccatcacaaagttgattccacatgttgcccatttatagctatactgacttcttacacaccatcatacccttcttaaccctgacagccactaacctgtcctctagttctataattttgtgatttccagaatgttatgtaagtggagccatgccatcaaaatgtaatctttaggattgcttttttcactcaggattattctctgatgattcatactgattgttctgtgtatctctagtgcattccttttcactgctaagcagtatttcatggcatgggtataccatagtttgtttaactagtcacccattgaagaacacttgggttgtttccagtttggggctaatgagtgaatgttttgctataaatattgggtacaggtttttgcatgaacataagttttcatttctctgtgatcaacgcccagtagtacagttactaggttgtatggcagttacacatttaatttttcttttctttctttctttctttttttttttaagaaactagccaactgccttccagagtcactgcatgagtgatccagttttttctcatcctttctggcaattagttttgtcatttaaaaaaaaagtagctattataataggtttgtagtaatgtgtcattgtggaattatctatatttttcatggctaatgatgaacatgttttcatatgtttatctgccatttatatatcctattcagtgaaatatgactccatgtcttttgccaatattctaattgtattgtttagaattgttttactgttgagttttgagaaatatttatatattatcagtatttatcctttctcagatatatggtttgtacatacattcctgtctgtagattgtcctttaatccttttaacagggtcatttaccctgtcagaagaatatatatacatataaatatatatacacacatatatttatttaaactaaattaaggagttttttgttgtttgtttctttttccctgtgggtgttcaattgctccaataccctttgttgaaaatgctgtcttacctccattgaattgcttttgcacctttcttaaaaatcagttggacatagctgtgtgggtatgtacctgggttctctattgtatccattaatatgtgtgtctgtttctccaccaacaccacacagtattgattcctgtggctctataagtcttaagattggatagattcattcctcccactttcttcttttttaaataattgttttagctattccagttcttgtgcctttctatatatactgttaaacaaacttatctatatctacaaaaaattttgctaagatttcataggaatttcattcaatctgtataacaatttggggagaattgatattttaactctgttgagtccttcaatccatgacacaatatgtctctccatttatttagatcttctataatttctttcatcagtgttgggtagtttgcaccacataatttctatacatgttttgatagctttgtatctaagtacttcattttgttagtgattctaaatgctttgtgttttgatttccagtgcccatgtgttcattgctagtgtattgaaatgcaattgatttttacatttttatcttatatcctatgacttcgaggaacttgcttatattagtttctaggagttttcttgtagattccttgagatttttctgcagatgcaatcatgtcatctgtaaacagggaaagttttatgtatttctttctgatctatatgcttcttactttcctttcttgtgttgttgcaccatctagaagttccagcaccatgttgaacaagactggtgagagcagacatcattatctctttgaattctcaggggagatactgtgactagaatttttttagccttttaatacaatgaattacattcattgcctttaaaatattgaattctgagtcttgcatcctcagaataaatctcttttgttcatggtgtgtaattgtgtttatatattactgattttttatttgctatcgtaaggattttttgcatctatataccaagggaatattggtctttagctttcttttctttctttcttttgctctttctttttgtactatctttgtcttgtttagtcatgagggtaataagtagcttcataaaataattggaaaatgatccccttccaatttcctggaagagatgttgtagaactggtgtcaattcctttttaaacatttggtagaattcaccagtgaaaccagctgagcctgttcattttgtgtgtgtgtgtgtgtgtgtgtgtgtgtgtgtgtgtgtgtgtgtatctgagagagttgtgacattataaattcaatttcatcaataactataaagtcattcaaatgatctatttaatatttcatatgagatgagttgtcatatgaaatatttgagttttttgagttttttgagaagttagtccatttgtcaaagttatattgtgtatagatctgtttgtagtacaattacctctcagcatccacaggggattggttccgggatgtcgcacagatactgaaatccacaaatactcaagtctcttatatgaaatggtagatttgcgtataacctatgcacatccttctgtatgctttaaatcatctctagattacttataatacctaacacaatgtaaatgctatgtatagttttgttatactgtattgatttttatttgtatgattttttattgttgtatggttattttttatttttcccaaatatttttgatccacagttggtggaatatgaggctgattgaatctgatgtggcaaaacccatggatatggtgggccagctatattctctaattatcttgttcatgtcttcagggcctgtaatgatacctcctgttttattcctgatgtggataatttgtgtcctccattttttctttgtcagccttcctagaggtttgtcattcttattgatcttttcaaggaaacaactttttaattgtttttctctgttgtttttctgttttcagtttcattgatttgggtcttatgtttattattccctccccttttttgcattgagtatgtctttttcttcttattttttcattgtttttgaaatgggagcttatattattgatttgaggctttttctgttgtccagtgtatgcatttacttctataaccttccctttcatcaccgctttaactgtatcctgcaaatactgatattgtagtttcatttttattcactttaatgtatattttgattttttcctttagaatttctttgacccatggattatttagaagagtgttgtttacttttcaagtgtgtggagattttcttcttattttctattactgattctagttttattccattgttgtcagggaacatactctgtatgatttcaattctttaaaaatttttgaggtatgttttatgatccaagatatggttttatattgatatacactccatggccacttgagaaagatttataacctgttgttgttgggaggagaattctgtaaacgctgatttatcttgttggcttatggtgttgttgggatcttctatatccttcctgatttttccacttaaatattctattaattttgaagacctgggtgttgaaaactcaaatacaattgtgcattaaaatttttttcagttatatcatttttttgtttcacatattttgcagatatgttttttgtggtcatacatatttagaattgccatgtccatgtcctcttggaagatttacccttttataatgctcctttctgtctctagtaatttctttgcctgtaaggttcactttatccaatattagtatagtcattcctcctttcttttgattgatgtttgcatgatacctttttgttttgttttgttttattttcaatgtgcctggattgttatatataaaatgactttcttggtggagcatggtggctcatgcctgtaatcccagcactttgggaggctgaggtgggtagatctcttgggcccaggagttgaagactagccttggcaacatggcaaaattccatctccataaaaaatacacaaattatccaggcatggtggcacacgcttgtagtcccagctactcaggaagttaagacaggaagatcgcttgtgtctgggaagtcaaggcttcagtgagttgtgattgtgccactgcactccagcctgggtgacagaatgagaccttgtcaaaaaataaaatgaaataaaataactttcttattgacaccatagagatgggtcatgtttttaattcactttgccagtctttgtcttttaatcaatatattaagaccatttacatttaaaaaagcattgctattttagggcttaagtttgcccttttatttttaattttctttttgttctcacattctctgtacttttcgtatctctgttttatttttcccacttccttatgggttactgaacggtttatagggctccagttttacttacctatagtaattttgagtacatctctttgtatagcttttgtagttgctgcattgtacatacgtatcttatcacagtctactcctttcatcattttactagtttgaataaagtgtggaagccttcccttcctttacattctctgaccctcccctatttataatataacttattaaatatattctctacatacgtttagaatcatatcccagagtgttttaatttttgcttcaactatcaaaaaattcttaaaaactcaaaaggagaaagtttattacatttgctcatatttttgctttccacattctcgctaactcttggtattccaagattcctccttttatggtttcctttctatttagagaactaactctttagctatttttaaaaataggtctactgttgaccaagtctcttaattgtcctccatctgataatttcttgaactttatttcattccagaaggatattttcattggatgtaggattgtagtttgaagattcttttatttcagtacttgaaaaatgtttgctactttctaatgacctccatggtttctgataataagtccactttcgttcagatcatttgcccctatcgatcagttgtattgttttttctcaccctttcaatattttttcactgcctttagttttcagaagtttgactatggatgcaattggatttgtcctgcatgggactcactcagctttttgaataggtattttatgccttttgcaaagttgggatatattcagctacattttcagcacttttccagcccctccttctttctcctcctgggactctgatgacatgaacattaggtattttatcatcaccctacaggtccctaagttagttagttagtttctttctttctatctttcttccttcccttcttcccttcttcctttctttctttctctttctttccttccttcctttccttccttccttccttccttccttccttccttccttccttccttccttccttctttcttctgttgtatatattggggtaatttctactgattatttgcaagttctctcattcttgtctttttgcctcctctttgctgttaagtcaatctaccatctatcaagagttttgttttgttttgggttattgtatatttcagttctgaaattttcactggggtcttctttacatcttctatttggttcctgagaatttctatttctttgatgagactttctgttttccatttgtttcaagtgtgcccataattgtccattgaagcaatttcatgatggctgcttatatcagataatgctgacatctttgtcatctcagcgttggcatctattgaatgcgtttttcctttcagtttaagaacttcctggattttggtatgacaagtgattttttattgaaacctggacatttgggatatcatgttatgagactctggctcttacttaaaccttctattttagctgattttctctgacattgctgttgacagaggaaggaggaacctacctcattactgccaaattccctgctcagcttctgtcaacattcaaaggcagggagtttcttctcagatgccaagggggaagccaacccagggatagaggaatggaagttctggctccccatgagacacgcagtgatacctctctgggtggtaggagtaggaatgcttcagcactgcactacatggcatctgcttacaccgcagggggcaagaggacttaccacagaaggatggtgaaaagttctgactctcctaaacattcttccacaccactccagtggagaaggggaggagtgccttgtttatgctcagtgggggtggacgacagcaccctgtgaagaggagagcttcactatttcctggaaggggctgaaagtcctggctctcctgtactgtggttgaggttggtgtctacttgcagcctcattttcatggaagggcaagctttccacttggtctttgcttgtgaagattggggtggggccacagttggtttccatggtgtgtggctggagtagggtagtcattgcttcaacattttctttcttgtgagcctgccccttttcatagtcctttggctatataggaggctcacttttgttgtctgtgcccattgagatctctgggttgccagctccatgtctgggatatctatatctatctgtctgtctatctgtctgtctatctatctatctatctatctatctatctatctatctatctatctatctgtcatctatctaatttctttttgccatatatatggcaaaaagaaaccccagggaactcaccactgttgttccttgggtcctgaggcccctcattgttctgctcttctttctacttttcataatcttacatgttttatttataatgttcagggcttttagctgtaccttgtagggaaaatagggaaaagtatgtctattccatctttctggaagcagacatttatagtctgcctgatttttaaagataagaatccagattttcatatataattcttccattttgtcttttaatactgacaatcaatgtttttttttttttgaaatggagtctcactctgttgcccaggctggagtgcagtggtacgatcttggctcactgcaacctccgctttccgggttcaagcaattctcttcctcagcatcttgagtagctgggattacaggcacctgccaccacgcctggctatttttttttttttttgcatttttagtagagacgggatttcctcatcttggccaggctggtcttgaactcctaacctcgttatgcaccctcctcgacctcccaaagtgttgggattatagacgtgagccaccgcaccaggctgacaatcagtttttaagtaacaggcaggctaaatacaaaatgtctatttgccaacagtccgtgagctttgcctagctccttaaggaatttagtttctctgactgagatttgtgaatttttatctcattatatataattttccatcatttatccagaggtgatattgctgacaaagttaactatcaagggcagagccaagaaagagaaatttatcaggaaaagatatctgagcaaccacattagatgtcaaaatgtccaaacactaaagttcttgaactttattaataggttataagccttgcagccgggcacagtggctcacgcctgtaatcccagcactttgggaggccgaggcgagcagatcacctgaggtcaggagttcaagaccagcctggccaacatggtgaaaccccgtctctactaaaaatacaagaaattagccaagtgtggtggtgggtacctgtaatcccagctacttgggaggcagaggcaggagaatcgcttgaatccgggaggcagaggatgcagtgagcggagatcacgcctctgcactccaacctgggcaacaagagcaaaactccatctcaaaaaaaaaaaaaaaaaaaaagttataagcctttaagcttccactctgagcatgatttaaaaactaaaataaaagcatacacacgcatacatacacatatgcagaaagtcagtctactttcccaagcacaatgcaaattagagaagataggatttcatgagtcaggaacactgaagatattgaaattaaaaactaacagtgaagcaagagagaagaaaatcatcaaagtgactcaaaatactcaactccccataaaaccacctgtggctcctcagtgttggtacacagtcttatattctttcagtagatgctgaaagtcttcctttattggagcctagcttaagaattaggatttattattagaactgtgagtttcagggatttatatcgtcatcttcctcctctgtcttatgcaagtctgtaactccttagctaagaaaaaaacatttttaaaatcattcagaggagaataaaaactaattttaattgagcccctatgatgtgttagatagtatattaggaattttaccaccatgtatattttaatttttacaaaaactctgtggagtagatgctattattttctacaaaaactctgtgaagtagatactattattttctatttcagctgattgagaaactgagttcaaaagaccaggaataattttgacaaggactctgcctcaccagtggtcatggtaggactggcatccaattaagacttcaatggccatgctcttaaataacctacagattccaaaatgttgaaactgcatgttagaagttagggaaggggatttgggcatctagtaattgccttaatgtggagacacttgaactgactatgccacagcaaaaactgacatgcaaaaacactacttaatgtcctctaagcaggtcctggggtcatgactctcaaaggcacttctgaacttgctgagtgagagactccagagtccagcaagctagctactgcttgtgctttcttatgagcaactgaggcagcaccaagactgtgcttgaagatcataatatttgtaccctctttttcttttttttttgagatggagtttcacacttgttgtccaggctggagtgcaatggcagatctcagctcactgcaacctctgcctcctgggttccagcaattctcctgcctcagcctcccaagtagctgtgattataggtgcccgccaccaggcccagcgaattttttttttgtattttcagtagagacggggtttcactatgttggccaacctggtcttgaactcctaacctcaatccacccgcctcggcctcccaaagttacagacatgagccaccgcgcccagccaatcgtaccctctttttcattgccaagtgtcaaacaaaattgtccacaattacaggcaatatttgatacagtgtacacgtagtatagattgggggagggggtccctgagatctagaagaactcctggtgtgaaaaaacaagggaggggctacttggcttctggtgtctgcaggcaaatgtcatccacattgctgtgcatagctatcttattatagtgtggtaaaatagccaaggaagagcagaggggttcaaaactatagatctgctccccaagtatttcctgacatattgaggaggcagtgagcaacagtagcctggagaaaaatcattgccctggctctgggttgcattttccattttaattaaaattcgtatttgtccattctgtccaggtcctggccctgtggtctatgctattttgcatggcaaatgaaatcaataagagcctatgatttggaacttggaggcgcctaagcattttggtcatatttgctaagcagaaggcgagtgttttctgagtgatgtttggcatacacttccagtctgagggtgtcaaatgccagactgtggggctccctggttgccagttcatatgttagagaggttccttcccttcagctttcctcattttttttttcggttctatagtgggtatcccagcaatgaaggtgacagaatggcttggggtgattatcaggtggctgtaccagtaagactgcctgtcagcagttatcatgttggtgggtgactaggcagaagaagtaaccaggtgtgtccaagacacagatctgcaagggagaaaaaactgggagtttgccaaaagctcgttgaagaaattggagaaagattgtttgcatgtcgagaacaacttttattcttattctccagacaaagctaggaaatgttatgttagttgaatgtgacttggtatcactacaaagtattaatagcacatatttatgccttatgctcaaatctgctgctgcacctttctttgccttttgtttattttttcttttggagggggggtggtatttgttttctacccaagccttctatagcatagagagaatgtaattaaagaaggataagatcaatttggctttgaattgcttcacagtaagatcttgcattagagtgacagactgatcatgtcatctgtgcatacaaaaaatctaaagatgagtatttgttgttactatttttttccaaatctattaaattaaacagcaagaaaattaatttactgtatcgagttcttctatttaggctgattgtttagttaacattaaacttttgcaaaagagattgtgcagggctgaccaaggctgcatgttcatgttttcgtctgagtcagagcatgaatcagaactgaaggcagcatttcttgtaatcacagtcttgggttttttcttctatgttttcaggtggcaaagtgacaagtgccaaaactcaggcctgacttttctgaaaacatcagcattctgccatatctggaataatggatgtaaaggaccggcgacaccgctctttgaccagaggacgctgtggcaaagagtgtcgctacacaagctcctctctggacagtgaggactgccgcgtgcccacacagaaatcctacagctccagtgagactctgaaggcctatgaccatgacagcaggatgcactatggaaaccgagtcacagacctcatccaccgggagtcagatgagtttcctagacaaggtttgtagggtttcccctgctgatttgctctcaactgtctaacttacttgatttacatggttgatggctgcttttggagatccagcatggtggtttttgacagatgtaccctacagcagacccttggttccataaaggacattcctaacaacatggtgaatctctatcctgagaaacctaagattatctgtggtttctcaaaactattctcctcatagtccacttacaagcctcaaatttctattccttttcccattgggtttctcacttagattctccttgaacaaatggtgtatcttggttaaaacatctttgaaatagtgtataataatacgcccttttccctctactaaaatatgatgttaattctgagttatacgtttctctttttgtgtttcagagcatgggtggccacatgtatgttattttccaattccactgatgtaattatccctcctactttccccaagtcttaattttcctttccttatactgttttgatttcttttgggaggagaatatttttctcccaagcactaacagttggcactctcttcatgtccaatatttataaagagttctgttatcacttctccagggttgctgtaaatgcatcaacacgtagaataaagcaaagcagtgctgagaggtggtgtgacaaagctcactctctagctccatgtcttactagtcccagcctcgctgtgtgtgcactttacattgatggctcagcaaaattacaggcaaacgcacaaaactgtaccgaatgcctcgggaagggtcactctgccagtgccaaagggctaagccctgctctgctaggttattgcctcatttgttttataacactgattctttatttcttgttccatgtccttgggagtaaatgttgcaatgggtttaatttctaatgaaataacttagcttggaattctagtcctggtttctcagcttccttaaactactttttactactttttattacaaaatgtgcatgtgtgtatatatgttattaattagcactatgcccacggtttataaatctacaatccagaggttgttgtagataacatctttttatacactcctggtttaccctagcttcagcttttatatttaacataggattgaaaaaataaatcaacagagaaactgttagaattgtgtttccattgccattataactcttgcaggatacaatttttatttaatcttccttcttattttctgagttatcttcatgtaaatgaaacacatgctgatcctcctccatgagaaaatgggggcagaggctgcttgaaaattgctctggatcaaatgcctttgatctgtaacttcaacaagtgtttttgctttgttaagtcctcaccattccccaaatttcaggtagtggcaattggaaaaaaaatatgaagaatcatggcttaattaactgagagagagcttacatttccaatataataaaattgggacacctctctgttgtttcccagagctgcactaacacgagactcagatattttgaaaggtgatgcacgttcaacgtggttcaaagcctttcattttctgctgtagtttttgtctcatttacgttgttcctgcatacgtttttgtgtctcataattctgtgctgaaatgttcacttttcttcctaagttttattaaaagtgcatcctggcttctggatcattgtgcactgacatgtagattccagatgattgttgaattgtagataggcctgtcaccttttcctttattaatatttacataaaataaaaccaaggactgggattttattttcaaatatacctttattcttcctgtttagtcttgttcccctccattgataataatggaggttgcttggccatatcaaactcatagctttgcaattaacaattcacacatgccgcatgttgttattgagcccatatttgtttgtgtaatgtgtttgcatgaattaaaaactgtgcaggccaaaagtagaaataaaaagcatcagaaggtatttgcatatgcaagtgcaattccttctgaagacatctatgaatttatgcatgaaaatgtagtcagagtctgagtggatctactttgatgggttctaaaattgaactctgcaggaagtaaataagcacatatttaaggagaggaggaacaggagatacaatctggcaagcagtacattcaacttgaaacttagccactacagacagggttaaaataaattttacactcagtaataacaataatttttttaaatgtcatgcatttcccattttattttcttattcatgaaatcaaagagcaggatcatctccgtacttattagcctagaggtacattaacaaggatcatagtgggatcatctcttgcagtattcttatttaaaacccaagacactgatcataaaacaaacacacttctcacatacaaccaagttttgcaaacacagttggatgactctacagatgctcagggtggaaaagaattgccagccagcaaaagtgatgggggcccagagtcagaccttgtccagttaccccagctggcccattcaagtatcaaatgcaagaacctgccatctcccagcaggagaaatgagccaggtgttcccatgagaagtttacggaagctcggtcaaattgtgcccatctttgcttgctttcaacacagaatcctcctctgccttcttctattgtggcttcttctcttgagtatgcaaatcacctgtctggcctctattatgctggatcctcctggtgtgaaagaagaaaattgctgaccttcggtctgtggccactggagtaattagtaattagtaaatgactaatcctgcactaaatagcatcctagtggtctgagagctaatgcacctgacaaaagtgagcagtggtctgatccctggtcagacccagccctaatccaacctgtgaaatagatgccactttgaataatgaaggtcggccaagttcccaggcagtttgtacaagcttgtctttttttttggaccccggagttagggtgaagagcaatgtgatatacaagacattctcctggggcttaggagtctagagttggacgtgaattctgcttttgcatgtgtatgtgcctgggactctgctctgcattctgtgtttcatcaggattactacatggtttttaggtatattaaacaaacaacaataataacaatgacaaaggaataatggcgaacaggcgggcgcggtggctcacacctgtaatcccagcactttgggaggccgaggtgggcggatcacgaggtcaagagatggagaccatcctggctaacacggtgaaacgctatctctactaaaaatacaaaaaattagtcgggcgcggtggcgggcgcctgtagtcccagctactcagcaggctgaggcaggggaatggcgtgaacctgggaggcggagcttgcagtgagcggagatcgcgccactgcactccagcctgggcgacagagcgagactccgtctcaaaaaaaaaaaaaaaagaaaaagaaaagaataatggcgaacatttgttgagtagtttgtgtcaggagccaatctaagcattttgcttgcattaactcagttaatgctcacaacagctttgcgaggtggatactatcactcccttgtttacttatattaggaaactgagtcagagagagattaaataagtcatccaggttgaaaacatggaaagagccggagataggcttcaaacctaaggggctgtattcaagacctgtgttttaaaccaatgtgtttcatcacgtcccaaaaaaataagtaaacaaaacaaaaatatctttaaatccttagtcaaaggctgggaaggatctatgaaattcactttctaagccttttaagaatccatacctttaaatctttcttaatgatacaggaactgtagttaacagtattgattgaacatataatgttcaccaccagctcccagccctgctgatctaattcctgttctcatccattcacctccatctcacaatcattcctgactctccagaagcattcctgcctacaatacctctctaccaaccaccactgtaggaaaacgtttcgactgtagggatgtgtactgggctgtcagcactgattctatgccctcccttatggtcatcacctttttgcacaaactctcaacctggaacactaacaaagaaaggtgtcactatctaaatgatattgctcaggtaagtagaactgacttgtttctgtgctaaccaagacccagtgggccagagagttcagccagccctcttattcctcaaaaagtgcttctttccagttagcagttcaagtctctcgagagggggccaagattgaattctttctctgtacgtcaggctggctgtctaggtcaaggtcgaagaaaaaattgggggaagattgaatttttgaaagtatgcttgcatcagttctctcaatcagttaaagcaaagagataaatcctaccggctatttgatgtgctttaaaaagcatgtaaacaaaaatcaacacacatacacattttaggctaggtttggttttggtactccataaactaattcttgctcctatgatctttaaaataatgtgggcaataacttttgctctgtataatttggcataatgtacatttaaacagtgttaatgagctgaaaactcatgaaccactagtaagctagagtattacctgcaatgattcaattaacttatataataattgtgggaatactttggaaattgtaaatatttctttctatgcctttgtcttaaaatagccatttttccactatacctaaataataattaaaaggttctagtttgaaaacctcagcactttaatttacctacaaagaataccttgtagatgttagtaaagttcaagagtttctgtggtcagtatcttgaaggctgaaatgtaccttgagaagattgctttccatttattttcccacttccaggtaggacttcttttcataactcaactaagaataacacaatgccttctagtctttggttgtattgttttttcttttttaaaaaatatccttagaaaaagagaatctacaacttttcaatgttatctttttgctggataacttgaatccttgttgttttatatgggaggcatatgtgaaaagagtaatgaatgaagactctggagttcaactttgtccatatcccagtgctgatgggtaccgctagtgtgatcttgatcaaattctagaacacagactgagtctcattttctccatttgtaaaagctctaccatatataggtattgggtttatttcttacaattgtgtatttattagatctggacattatctttcttttaataagtgctagtagttatcgttacagttattgtcactttaaccctactaccagcagaagtggcgatcacttgctctccgaccctaataatactttggtgcaacagaaatttttctttcctcttgatttgtttcccatgacttgcaaaaattctgacattttcaaactcagaacttttttccagcttgttcatagagtgtgtctgactctctatccaccatacatttctttcccaaagatgaacataactcatacattattttcctatttttagacaggaatgaaagatactatctaacaactgtcaactgatgccaacacactgtaagagagttgctagtcagacaattttacaagtcaaaaaaaaaaaaaatagattggaaaaactgctctaaggtagtgtcataggatacaaacactttttttaagtgtgcattttatggcatgtaaatccatacatatttcagaaatgagtttaagagtagatttaatccatataaatgctggataaaattaatccattttcgtcactttatgggcaataatttggagtctatgtcagagagtcaatgttttggattttcatcattgatgcttactacccttctaggaatatgtctatattttttgataactttagccatttggcaactatcttcatgtttgcccaactgttatcctcccagtaattatctattgtcaattctgtgttcaactttatatttaactttctttgaattaccttccttctcctgctctttctcagtggaaattccccagagtttcaccctaatcctatactcttcttctccatagcactttctttagaacactcttattcatatgacttcagtggccactatttctgcttctgaaaactttttcatttacaaacaatagtatcccagttcaaattagcttacttgaaagggtaatgttttggcagacatcaccagtaatctaagaaagcatctgccctcacacttatcatctctcacaagattctcattctcatatattggctttattctttggagcgatctctttgaagatgtctgctgattacccccactctcacattttctcatttggtaacatcactggaaagagtcccttgtttatatatatggttggggtttattttgctgttttcagcagaatattctccaggtagatattcaggctggcctggcatgggacacatgctgatgatacctatatctaccattttacggctgtagctggccacatcttggatgtaggtttatcctgtgcttggagatagcttacagtgagtgcctcctaaacctgatggaatgaattccgcacaggaaagaaagactctgatagctgcagtagactgtaaacactaactggcctgataacaaatgctcctaatgctagtgaggctgaagtttaaggcttcctttctgtagtctatctaagctgtattggtccattctcacactgctaataaagacatacctgagactgggtaatttataaggaaaaagaggtttaatggacttacagttccacatggctgggaggcctcacaatcatggtagaaggcaaaggaggagcaaaggcacatcttacatggcggcagggaagagcacctgtacagaggaactgcccttcataaaaccatcaaatctcatgagacttattcactatcatgagaacagcatgggaaaaacttacccccatgattcaattacctcccaccaggtccctcccatcacacatggggattatgggagctacaattcaagatgagatttgagtggggacacagccaaaccatattataagcttcacatccactttgctactgggccttggaatattttatctttacatatccaagtgggaaatttaattgtctttccctcaaaatttgtttccgtttttcatttctcagctttggggaatggtatcacagccttgcattttagataaagtcttccaagcctcttttttcttgatcctttatattgatgtttaccacatcacacctattattcctgcttcatttatctcagtttcaagtttctcattccatgggcagcttccaatatttcaacactggacaattgcttgagcatttcaatcgcctccttccctaattctttcctctggcatgttttccataacatggatagttttgagtttttaaaacacggccttatttttcccacttccctcaaattgattcaaaaatatttcaggggttcctaaaaggcaactgcaatttgtgggacacaacaataaaaaaaggtaaacatggtttctaacctcacagaacctggcagttttaaaatggtaagatataacagatatgtaactaggtaccttataaaaaacactacaaaagggataatattggatggttttggagagacctctaacccagatttatgtccggaatggcatcccagaaattgtggcattcctgcatacatttgagggatggggaggaggttggacaatcaaagaggcaagacagtgttcaggcaagagtcatggcatgtgcaaaggcccagaggtgactacattttgttgttccaaggatgtcaaagaagtgtaggttggatgagctagagtggcagagagagacagtcatgaagacatttcagggagacagtgctggtttcagcttgtggagagaggaaagatggtcagttagaggttgtgtcttcatctaagcaagggagcctggtggcctgaactaggatagcagagattgtttgagaaatgttattgagataaaaagagtgttggcttttttgtttgtttgtttgttttaaggcagagcttcactcttgttgcccaggctggagtgcaatggtgcaatctctgctcacagcaatctccgcctcccaggttcaagcgattctcctgcctcagcctcccaagtagctggcattacagggatgcgtcaccatgtccggctaattttttttttttttttttttttgtattttttagtagagacggggtttctccatgttggtcaggctgttctcaaactcctgatcttaggtgatccacccgcctcgggcttccaaagtgctgggattacaggcatgagccaccgcacctggcccctgattgttggctttttaggataccttaaaagtggaggcagatatactgttctgagactcctgggcattgactgcttttttctcttggaaagagaatattgcctttctgatgctgagtttacttaaagagccaggaaaggtcaacgcttgcaaataaccccttaagtggaagtacatagattgttagttcaggttcttctggaatgttggacataaacctaagtataaaaaatgtagtgttgcaacaaaaatttggatttttttttaaaatttgttagattcctgcctatgcaaagggtagcaccagctacagagcacttcatacggatcccaggcaaggaaaaaatagagaagagattatgctgcatctgccccttctctgtgtggaccatgataccattgtttgttctctatcatggactaaataaatcagagactctaagtagatgtgagttctgtgtgtgtgtgtgtgtgtgtgtgtgtgttcaactgagtgtgtgttttatccctgccaatggtaactttatttgcaaagctgagtacgtttggaagatagaaacaatactttcttgcaactgatggggtaagcaggctaagcaaaaaaagaaaagtcaaggacatccctgaagtttctggttatggcaactgacaagatgttaccatcaatccccagggcttgagacagaggatggcctggtttgtgggttagatgggataggtaactgtcaaccttttgaattggaggtatcctgtaggctctccatgtgcagatgtctaataggctgtggctgtccagtcttgaaattctggagagaggcttgagctggataaagatttagcagttgacagctaataatttcatgggacttggtatgatcatctgagaaaaaaatgtacaaggaagagaaataagaagttcacatgacagtgcaggtactcaaggaataggaaggggaagaaaatcctgtgaaacaagtgggggaaaaaaaagaacaccttactttcctttacatgtgctattcactcagtgcaaacttgacctgtcattccacagggcgagttttattccccatcccaccactcagagttgacctcctttatgtcccctaaatcagaggccacaaaattaatgtacataggacatattcggcccctagataggttttatttggcctatggatttctttagaattttgaatcaagtgccagtctattcacatttcagtttgccacaggccccgtttctgccttctgtcttacaccagtcctattcctctcaggcctttattttatatgccaaacctctgaaagctctcacaattgcaaaaatatcacggatcttcctatgtctatttttttcttgtggaatacctctctgcctattgcaaatctattcatcccacagggtgtgacctgtggttcacgtctttggtgaagcttcctgccctctgaatttttatagcccttaatgggttgttattgttgttattattctcttgatgagtgactcagcatacatagcacatggattctatgactcctatgaatagggaaataaacaaagggctctgcagttttgtgctctgactcatagatgcaactaccagggaatttgctctttttagtggcttgtttcctgttctaatgagaaaaatggaaagcacagctcagaaacagactctacttagaaaatgtggatggtatgtctgtccagcatgacaatgtcaaatctcacattttgaaatgccaacttacaacttttctgccatttactctgacactagcatgttgagttgcactaacagttcctttttctgattattggtgatgcaatattatcagcttctcttggctggtgccacatgttgcagttaagtctctgcagctgtctactctgcggtatgtataggagggctttggtgcatatgtgatctgtgcagggatgcctttctgaccagaacctttgggaaaactgcacagtgagagacggaagaattgccaggatcagccttaccatgctttacaatctgtgtccaggagtggcactgccccacccactgatgaatcatcacactgatattatcaaaggagacattacattttcaatgtcatgttttaggtttataatttaattttcagctctggcaattccagaagcatccctagggacatatgaagaggaaggggctagcgtgtactcgaaatgaatacatgttcatttcttgagcaccttaattggcatgcacatctcacaagctccctttttctctgctgcagccaaactctctcacaccaccaagttactcaatattcctcctgcactgactgccttcctttccactcaacctcaagtcagatctactttagtaataaatctctgctgggaatgatcagaacaaatactgagtgtgcaccacaatattaaaaataagtgtaatatagacttatttaataaggtccaacagacttttataacatttggaatattttaccaaaggtactatcagcattatgtttaatgcattttctccaagacagaaaaatcttttcaagaatgaggggggaaaagaaaaaaaacacaaaacacagagaaaagtcagatgggctctgatgcattctcactcaactaaatctgtgattctccttcctttcccagatctttctcttcggccagacccacaaaatgtgaagcctctttgtgttcaccctgatttatgaatagtcggcactgggcaattgcggtcccagtgggatacatttcagtttaaaaatagtctgaagcactttctttcaaattcccacatgtccactgccacctcataatatgtgcttctccttctgtccttgtgcagttaaagtcggatccatgtacggggaatgaaagcactgaatttgtttgtagcactttgaaccaaaatggtgaatttatttagagagtagttccagcgagttaagttagtttcaatggacatattggctgcaactggagcattgatggaagggaggcatactactttaatgtcctcaaaaagaaaaaaagaaagaaagaaaataaataaataaaatccagtcaactgcaggataagtatccataggccaaacaaatccctctcaaaatgactgcaagttcaggtgacaccaacagctgtcaaaagacccctgtttgcctggcggcagctttgggttcaaattcttcctagtttacagtgacatttcatttaatgcttgcactctgactccatttgtctgccctgcaaaagctctgcaaagagctgacccagttaacactttctgtttcacaaacccagagactgaacagcagggaggctacagcaaagtgctgagttgtcctagctgagcagtaaggggacaatgactgtggccacagtccatgtcatttttgtttctagaccagtggtgactcattggactctcctgggcagttctgaaaagtctgcatgtcctagtctcacccaagaccaattaaatcccaatctgtggcagggaggacccaggcatcagcattttttaaaaccaaatctttatataaataaaatgtctcaagggatttgagtgcaaaaggacatactctatagaatataatatttctttggtaactgatgacatttcaagcttataggacctcatacttagcatagtgacttagaatctcacttttcactcagaagctcataatagagtcttttgattcttcaggggtttaggttaataaatgcaatataaccgaagctcattatgtagtgtttctaaaccactatcgagtaatcatttgctggtgtattaggcattgcaagcccttggtgccatagtccatctccttgtttctgagtcagaagaagcaggtggactgattcttctggcacccctgcttctcagcccacattgtgtcaaacattaaaagtgaggttttaatttgagtacctggcttggaatgtaacaggtaacagttgattatgttaattgatccaacgtcttcaaagtcaaagcagtaatgatgaatctggacctactattggaagaaaatgatcaagttacatttatgttgaaagatgaagtcagtagggaaagattctgttaaaatagtgggtttcatgcgcatccatgtgaagagaccaccaaacaggctttgtgtgagtaacaaggctgtttatttcacctgggtgcaggcgggctgagtctgaaaagagagtcagcaaagggagataggggtggggccattttataagatttgggtaggtaaaggaaaattacagtcaaaggggggttgttctctggtgggctggagtgggggtcacagggtgttcagtaggggagcttttgagccaggatgagccaggagaaggaatttcacaagataatgtcatcagttaaggcaggaacaggccattttcatttcttttgtggtggaatgtcatcagttaaggcaggaaccggccatctggatgtgtacgtgcaggtcacaggggatatgatggcttagcttgggctcagaggcctgacattcctgtcttcttatattaataagaaaaataaaatgaaatagtggtaaaatgttggggaaaatttttgggggtgggatggagagataatgggcgacgtttctcagggctgcctcgagcgggattggggcggcgtgggaacctagagtgggagagattaagctgaaggaagattttgtggtaaggggtgatattgtggggttgttagaagaaacatttgtcatttagaattattggtgatggcctggatatggttttgtatgaattgaaaaactaaatggggccgggtgcggtggctcacgcctgtaatcccagcacttcgggaggccgaggggggcggatcacgaggtcaggagattgagaccatcctggctaacacggtgaaaccccttctttactaaaaatacaaaaaattagccgggcgaggtggcgggcgcctgaagtcccagctactcgggaggctgaggcaggagaatggcgtaaaccccagggggcggagcctgcagtgagccgagatcgtgccactgcactccagcctgggcgacagcgagactccgtctcaaaaaaacaaacaaacaaacaaaaaacccaaaaactaaatggaataagagaaggagaaaaacaggtattaaaggtctaagaattgggaggacccagggcatctaattagagagtgcctaaggagattcagcatagtcctgccagcaaagattatttatttactttaagagttaagagtggcagtttggggatagcacgaggaggtatcagctgtgatggcttggagaaacagtgtaaactggcagtgtaaacaagagcagggcatgtatgagtagttgagaacggtgaataggagtgtgactagacagaagatagtagggatgacaagtttttgggggcacagtccgagttggtctggtgtctggactgagactggggcttaataaaaaggagcgtccatacaggagctcaaatgggctgtaccctgtagcattccgaggacaggcctgacttctgagaagggaaagtggtaaaagtattgtccagtcctttttaagttggtggctgagcctggtgaggtgtgtttttaaaggacctttagtccgttctacctttcctgaagactgaggactgtaagggatataaaggtttcaccgaataccaagagcctgaaaaactgcttggctgatttgactaataaaggctggtctgttaacagactgtatagaggtgggaaggctaaactgaggaattatgtctgacagaaggaaagaaatgactgcagtggccttctcagaccctgtaggaaaggcctctacctatccagtgaaagtgtctacccagactaagaggtattttagttatctgactggggacatgctgattaaagctaatttgccagtcctgggtgggggcaaatcctcgagcttgatgtgtgtagggaagggagggggcctgaataatccttgagaagtagtagaacagcagatggaacactgagaagttatttccttgaggatagatttccacgatggaaaggaaatgagaggttttaagaggcaggctagtggcctgtactatagcatagcctgcctttgctggtgtgtggcgattaggcctggtggaactgccatcaataaactaagtgtgatcagggtgaggaacaggaaagaaggaaatatggggaaatggggtgaacgtcaggtggatcagagagatgcagtcatgagggtcaggtgtggtatctggaataatgtgggaggctggattgaagtccgggccaggaacaatggtaattatgggagactcaacaaagagtgagtacagctgaaggagccagggagcagaaagtatatgtgtcaggtgggaggaagaaaagattttggaagttacgagaaatgtagagagtgagttgagcatagtttgtgatttttagggcctttaaaagtattaaagcagcagcagctgctgcacgcagacatgagggctaggctaaaacagtaaggtcaagttgtttggacagaaaggctatcgggtgcggtcctggctcttgtgtaaggattctgaccacactaaccatgcctaggaaggaaaggagttgttgttttgtaagggattgaggtttgggagattagtcggacatgatcagcagggagagcacgtgtgtttttatgagaattatgccgagatgggtaacagatgaggatgaaatttgggcttgactgaagtaaaggggactgtctgtgaagccttgcggcagtacagcccaggtaatttgctgagcctaatgggtgtcagggtcagtccaagtgaaagcgaagagaggctgggatgaagatccagaacagaataatgcgttgtagagggaggtattgaggataggagagtatatgagtttagcaccatggggtggataggcaaaacaatttggttgataaggcacagatcctgaactaacctgtaagtcttgtctggttttaggacaggtaaaatgggggaattgtaatgagagtttataggctttaaaaagccatgatgtaacaggcgagtgataacaggctctaatccttttaaagcgtgctgtgggatgggatattggcatggaggggggtaagagtgattaggttttaatgggatggtaaggggtgcatgattggtcgataaggaaggagtagaggtgtcttatacttgtgggttaaggtggggagatacaaggggaggatatgaaggaggctttgaactgagggaaaaggcagcaatgaggtgtggctgtagcccaggaatagtcagggaagcccataacttagttaaagtgtctcggcctaataagggaactgggcaggtggagataactaaaaaggagtgcttaaaagagtattatctaagttggccccagaattggggagttttaagaggtttagaagcctggccgtcaatacctacaacagttatggaggcaagggaacagcccttgaaaagaaggtaatgtggagtgggtagcctccttattgattaagaaggggacggacttactttccactgtgagagttacccgaagctcagcatccgtgatggcctagggggcttccgaggtgatcgggcagcgtcagtcttcagccgctaagccgagaagatctgggaaggagtcagaaagccttgggccagagttccaggggctctgggagtggatgccaggtgagttgaacagtccgatttttcagtggggtcccacacagatgggacatggcttaggaggaatcctgggctgcgggcattccttggcctggtggccagatttctggcacttgtagcaagctcctgggggaggcagttctggaggaatgcctggccactgtggtttaggcatttggaagttcttgtgtgctggagatgtggctggggtttgtctcacagtggaggcaaggaattgcaactcagaaatatgttgccacttggctgcctctactctattattgtacaccttgaagatgaggttaagtaagtcctgttgtggggttggagggctggaatttaatttttggagttttatttaatgttgggagcagattggataataaaatgtatattgagcataagacggccttttgaccttttagggtctagggctgtaaagcgtctcagggttgctgccaaacgagccatgaactgggctggatttttatatttgatgaaaaagagcctaaacgctatctgatttgggataaggaaaaaggagcattaaccttgactatgcctttagctccagccacctttttaagagtaaattgctgggcaggtgggggagggctagtcacagaacaaaactgtaagccggaccgggtgtgaggaggggaggtgataaaaggattatagggtggaggagtggaggctgaggaagaattgggacctagctcggcctggcaaagaggagagagatcagatgggtctgtagaaaaggaatattagaaagactcacgacgcttggggttgggactgaggggacaggtgggagggaaagaaggaagatttgggacaagttgcattgggaacagagactatggagggactgatgtgtaaaagaatgcctggacatcaggcacctcagaccgtttgcctattttgtgacaagaattacttagatcttgtaggatggaaaaatggaaagtgccattttctggctatttggaactactgtcgagtttatattggggtcaagtggcattatagaagaaaataaggcatttaggttttaggtcaggtgtgagttgaagaggttttaggtttttaagaacacaggctaagggagaagaaggaggaatggagggtggaaggttgctcatagtgaaggaggcaagcccagagaaaagagagagtagagacacagaggaaaggggtttgggggttcttaccctccagaaaaggaggaaaggggtcagggtggggaaataaggggttggggtgcagagataagaggtcggggcatggaaataagggatcagggtgcagagataagaggtcggggcgtggaaataagggatggggcacagagataagaggtcagggcgtggaaaaggatcagggtgcagagataaggggtcagggcatggaaataagggactggggggttcttgcaccctagaaaagtggtacttgccactaagggtgaaggagaaggggttggggggttcttactgcccagaaaagcggagaaggggtattgacatggagagaaggggttgtggttcttgcccctcccccagaaaagcgggacttgccgctaagggtgaaggaccaaggcaggcatccctgcatggtcagacacctctgaaacatgggtaaataatcagagaggtgtccctgcagtgattaaacaccaagggaaggctgccttcccgagtccgtgagcagtgctggagttttgggtccatggataaaacgtgtctcctttgtctctaccagaaaatgaaaggaattgaaattaagagaagggagagattgaagggtggtgccaaaattgaaaggagaagatggttgacggttagtgagagaggttggagaagagagtaagaagaggccgcttacccgatttaaaattggtgagatgttccttgggctggtgggtctgaggacctgaggtcgtaggtagatctttttcacggagcaaagagcaggaggacaggggattgatctcccaagggaggtcccccgatcccagtcactgcaccaaatttcatgggcgtctgtgtgaagagaccaccaaacaggctttgtgtgagcaacaaggctgtttatttcgcctgggtgcaggcgggctgagtctgaaaagagagtcagcaaagggaggggtgaggccgttttataagatttggttaggtaaaggaaaattacagtcaaaggggggctgttctctggcgggctggagtgggggtcacaaggtgctcagtaggggagcttttgagccaggatgagccaggagaaggaatttcacaagataatgtcatcagttaaggcaggaacaggccattttcatttcttttgtggtggaatgtcatcatttaaggcaggaaccagccatctggatgtgtacctgcaggtcacaggggatatgatggcttagcttgggctcagaggcctgacagtgggtctgtatctccttttcaatgtgaatatgtatcgagactatgaatagctaagtaaaggtgaaaagtcccatactcacaaggaccaggcaggtaagataaacgggggaaataggccaggttgtcaactatgcgtcatggtggggactgttctgatttgaagtctgtatggccaggcagtgtctctcagggctggcaggttggtgcttccagggaattcaggtgtagagttgctagatctcccagttcctcaagaaaattgagcaatctggatttatttttatataaaatccccagatttaaaatggttctgtaatggtcacttgtggaacagtttaagtaggcttttggcacaacatcctggcttcagatttttctgacaataatgtgctaaatgcccttaaggaccaggacaattacacatacgcaacccatgaagtgcagaaagttagcagctgtgggacttccttgaatgatgggttcagaagccagaagataagaagctgatgataaatgcttcttcccctcatcctgagatgcacagcctaaggctcctgggaaggtccagcaccatcatgattaggcacccacaacggcagtggctaactgtataactcttccttgtgttggctttccctttccttgtctctgccactgttccttactcttgctcttctgaatcgcttccccagtaaactacttgttcacagcctcagtctcagcctctcctttcaatacaaattgggttaagacgtttggcagctaattcatttttaaaagtcactgtgtagaacaaaacaagactatctatagggcagatgtgtagtgcaggacttcttgggaaatggtagatttaaaaagaaggcattgagcttgagttacagacgtgatttggtacttagggaatatttgtaacttattttgttttccataagaaactgtgtgattttttttctttgctttttggattgtttgtttgttttttttaaagaattttagtaaacctttcattttaggatagttttggatttacatgacagttgcaaaaatattatggagtatcctggttgaatttttttgttgctgttattgttttgagtacatgggagttttctaaacacatgcttagcaaacctgatactgtttttccctcttcagagctgtcagttcagatttcagaaagtgcagaataggaagttataaacataccctgtaaattccttgaaagacagtgcctcactcatctttctatctcccttagaaccagccacactgccatgtacgtgacatttaataaatagttgttgaacaggggatcctatcatacatgagcacggagagggatcatagccagtctgaaggcccttccctgcactatccctgaccaccatacctcttttcctcctctccaaaaggcaacctttccccctgtgcgatttctgtcctaccagggtagattgggaaggacactggatattggaaggcaaggtttttcgttcaggtttgcctgaatctcccactcactcatgtatgattaagtgatctttgttgccaaacaaagccagagctgcagctttgccgtctggacactgtgagagctttctaggacatacctgtgcactgcatgtcacagtgtatttttagccaatccctgagtgaaagctgacaagcattttgtttctcttctagatcctataagcacccaccttgcatatttactcagtggctaacgaaaacagtaataataacacatgctatagtttcagcctcagattttagaacatctttacaaggtcttttttatcaacccttctcaggaaactcagacagcttgcttaaaaaaccaggaaatatagaaacaatatctgtgagaacaagttacttttgttcaatctcagtttacatctcaagaggatgattattcgtagaactttaaatgatgtggtaacaaatactgtaagctatttgttttccgtccttcacagaattgaaagcattcagcattctatggcagggattcggcacattttattcatggactatgtcagggatgaaatgaacagaaggcatcttatttcatagaggttttgttttgttaatgataacaataatgccctgcattgagtacgtcattgggtgccagggatcctccagtgcacctcacaagtatccattcaataatatccccattttaaaaatggaataactgaggttgagagattatgatcagcagagctaaggggacaatgggatttcatggaggatgtttagttccagagcaatataatctaatttacattactgaagaagtcgctggcttctcagtgggaaacaaatgcaaaaatggtgagagtggaaacagggacaacaaaagctacccagggttgcttaaggggaaccagcatcccaatatctagaagaggtgttggtgggtctgacagaagtttggagactcggagttgttcaaacgctaaaggcagtagcctgctccttatattcgattcggtaagaattatagatatgagcaatggttattttgtggagcacaatgaaagcacgtttcaatcagatcgtggcccttttccgtaagtcttgctttctggagcagagcagtgggtccggcactgttgtactttatctcaaaccagatggtcttctctagcttctatcagcttgcttgagacacacagtaagtactggcttcttgctcctcagtcatccttaggggacgatgatttgtttcttggcttttgaaaggtgatttaattcaggcgtatcagagccccttttctgtaaggggaaagaatcttaaaaaaaaaaacaacaactagaaaatcgtctgttgtccacaaacccacacatccctggttgtacggaacatcacagcttcttgttcacaggcagctttaacagatagatgcggggatgccagctaagccaagtgataagaaaacaaaacaaaacagtggataagggctcatcattaaaatcaactattcgtatcatttatatagtccccacaccaattattctgggaactgtgtctttctggaactttctgtcaccatcattcgttttcccaattctgtaacaccataataccctctttctctaacacagatacagaagacttgtagcaataatgttaataactgaataatatttactgaatattaactgtatgcctcactattccctgtaaagttggtacatgaaaatcatcactctgctaaggacaaccaaggcctagagaggttagttacttgaccaagtgcaggtaacttgtatgaaagggctggaaagagaatcaaacccaagctattgcactccagtggctggtgatcttaggtgcaagaaagtctgttgactgactatgtgaaaaccatactccccgcaacactggccagagggaagaaatcaaatccgtgtgttgagatggtctggacaggcaggctgctggaaggcagagtatcattacagctattaagacaatgcagagggctattttggtgctcagatctgtgcagccagatggaaattgtagttcaagcttagtgttgtcagacagcagaggctgtgggcaaaggggaaggcacgggtgagcgatttttgactgtttatctctaatgtgtgtggccagtgtcactcccatctctgatgtctgtgatttattctattatactgtcaggattaaaacaccttagcaggagaaaaataaagggagggatacaaatggtgtgtcattgatgtgacagatgctatttctctggaaaccatagaggatgagggtatggaaactctcaaaaatgccacgaccaccgaatatcagaaccgaacaaacctttagggaccatctgtttcaagccactcatttgacagatgaggaaactaagactcagggagcttaggtggtgatcaaagtaacataagctcctaaatttagagcaagaaccctaactcccaccgcccagttcagtattcattcagcaacatcacctgctggtgaggtccattgttccttcccctaaattcagagttgagattcacattaagtaaaaaaagaaaaatctgtttttattttagcaagagtaaagaaaagtagaaagcacgagccggaaattctctcctttgctctccagtatccatacaatgttaacactgggactgtggtccttggctctctttgctgttgctatcttttgtggctagctcctttcccttctctgaacaaaaggagaccctagtcacctcctcacccttgttaagtgatggggtgggccattctctgcctggtgcagctttcagctccttactgcgtcctcacccatccttgcctagacctcttcatccgctgtctctctcctgctgtttcctgtgtgaatagagagaaaggatcagagtaagtcaaagtcctggcctgccaaggaacccagacacccgtctctccacctcttgcctccttcctcactcattcctctgcactaatctttcagcaactcagattttctgaaacacttaaaatcagtagaaaagcacagaatttgaagcaggatgacctaactttaagcctaatcctgatcacggtgagccatgcaacatgggacaagtctcagacaagtctctgtgggccagagtcatcttctgtacaattggtatcctagacaaagttcctacacccagtattattctaggggtgaagttcattgatgacaaaatacgttgtaaagagtgtttattagcaccaaatttttactgtgggtgaaatgcctaaattactttgtaactcctcagctctattagaaaatcgtcttgtgctcagacatgattatgcactgacagggacctcctgtgagatgtgctgtctcagcccaggagactgaatccagcagcctccaagagtgctgtgttcccctcaggccgcactgcccagcagagacagcctgtgttcacccagaaagagggccaacatctttccagctgtgaattctgcttatcacttggctggatgcagcattgcttgtggcccaaatctcaccatgttcctcatataaatatgctgtcgggctctgctcgtggtgttctctctctaagaaatgaagtctgccaaggattaagcttagaattgagaccacagtgtttccatttctctagtttctaacgtgaagacacacatacaaaactaccacgttggagacgaacaaagggaaaccattttgggggtgaaggttagggagggcattcctgctcagagctcagaatcatcaacgcccaaccttgacacttaataaaagtatcactagaattgcctggagttgtgaattacctaattttgtagggacttcaatctctatctatattgtgtgtgtttggtggggtgggtgggggggaggtttaaatgataaaaaatccaaaacaaaaaacaaatcacaaatcaccttcctatagaatgatccttgtcttctctaggaagtctcctattttgtatccctacactgaagcaggtaagtttgctttgaatatgataccagaaagaagaatggaaagaacaaagatggccgctctccctttctctgaccccactgggttgatactgcaacgtggtccctgatttacaattctctactttactatgatgcaaaagcgatatgcattcagcacacttctgacttaggatgggattaagtccagataaacttattgtacattgagaatatcgtaagtcgaaaatgcacttttgactgaacatattttcaacgtatgatgggtttattcgttaagccaaggaacatctatagaatagacgcaatctctcccaaagctcaaaccaagatgaacccctcagaaaaacgaatgtctgcaaacagctggaaaaacctctgctatgtgctttatcctcacccctttcaaaccttagggctatggaaaggctttagaacctcaaaaccaggctatgactataagccgcaggagatcactcttgtcaaaaaacacttaaggttcattttgtccctagttttgtttgggagctggggatacagatgctaagaaggtagtccatgctctcaggaaacccacaagctactccaggagaggctaaaagagtcttattatgccaataccatagagaaatgacctggtagacaaaagcacggtattatgggaggagaagccaaggcttcccggagacccttgtaggagagattttgtgctgcgagtcagagttgagtttgctgaaggtttcctgagatccagttaggtttgctctagtgtgaactagattactaaaatagacagagaaaatagcatcctgatatttaaatatatgattaccctttctttataagtacttagctggaagtgtcttcgggtgaatactaaagcgcgtatctgtgaatgtagaccatattggaaacagatttactgtcccaaagcgtagtgcttactcagccatctgatgagatgtgagcactgagcagtttgagagggatgcatagagctgttttattacaagatgctgttatgagttatagcagctttccttatgctctacggctgtcgccaaacaagttacatgaatataagcagttttatttgcaattttttgcttacattttcttagcatattcggattatagcttctcacagctccactcatgctcctgtggctgtcccagtatattgctttattcagagccaaaaggagcgtttacaaacatttgtagaaagtcctccttagagtacacagtgctagtgtttattgatgctatcacctggcacttgtttttttcaaaaaataaaaaaagaaaaaagcattttcacccttggatataatgtgtttctttcagagaaaacttaataaatacatgaatttgcctttcatttgatgcagttgcagtaactcctgtgtaggaggttttgtgtttcaggaaaaaacaaaataaaacaaaaacaaaaaacaaaaaaaacaacaaatagagtttcaaatttcatttgatcaggattgaacctgaaacaactaaaataagaaagaattaattttgtctgagagatatacaccaggcttggttgttacatacaagttataggctggaaaattagtgttgttaattcccctggaatgtgtgaaaatgaatcagaggaattgatgacgttaataaaaatgacaataacagtaaattagtttatactaaatgtaaataatggttatgctgggacctaaatgaacctgcaacagctagggacttagtatgaacccagtttattcttattttattaagcatcctctagatcaaaatattgtgttattaataattacaataaatatctagcatacagtgctcagtattcagagcctgtcctcatctcactgtttactttgggaaaatagcatgttcattagcacttggcttggtccagggcttaggggacactggacatttgaacatgactgcataaccgagcttcattgaggagcaggggacaggtgccagatgaggttttaggtaatttgaaggattagtctttaaagagtcttttaaattactttgcgctgtactcctttttgctggttataaaaataattcacatccattttaaagaatttggaaataataagtgtataaagaagaaaattaaaatagcctatcattttactgctgaatagcaattgtttttatcattttggcatatttatttcccagcctttgagttgtttgtgtgtatgtggaatgtattttcaaaattggaattatatgtgctatttatatactactctgttcattttacttttgtcatgaatgctttccttaaattgttcttctggaatatgatttctttaacaatgatgtggcattgtcatatggatatatcacactgtactttccatctaatctttttcccaatggaattttagttttcgtgcgtttttcatattataatagttcagtgaacatcttttacataaatctttgtgtatgtcactcatttcttcagaatacatctgtatttaaaattatgctaatggagaggtaataaaagaacgagtaggccaggttttgatataggtataaatgtttggggcatgcatctaaaatcaaaaatgctttttaagacaaaatttaaattttacttacaaatcatattctaaatttttcagccacatatgcaacaatccgtttatatcatattctgaaatgcatcattctgttgtaatgatattttgttaaaccaattttaaattgtatgaatgtagggatcttatgtcattttatctggagcctagttaagggggaattttttaaggtcatatgactatcccttaaacctcaatttctttgcaatagcatcatgaggactacatcctaggaaatctggagttgtaagcataatcacaggcttaattgttttcccttgaccatatgcatatattgttgtatacatacacatatgtgcataaatatacgtatgttagatatatattatataaatcacatgtaacatattacacatattaaacacaataaaacatgtacttatatatttgtgttcatgaacatacataacatcataattttaaactattatttaaagagtttgtgcataccatcacatgatttgacagatgtgatgtgttttaatcaggtgaccattagaacaataaatacaatgctttatagcaatctggtctggtctactgttagtctccacttgccccggctgtcaaatattgcttagagttcatgtcagaaggagctcttgcatcatagtccaaagcagacattcccagaacaaaaaaaatggagtcaagagacacagacaggacttccttttctgtctcattttcgatgtatctgtgggaagctttctgcctatacaacaaatcattcctagggagggctgtatcatgatatgagaaacgaacaaaaaaaagaaatgatttctgattcctatgggaaaaattggtcttatgtgaaaattaaactcagtgtgttataacatttgctacataaacctgaacaaaagaaaaaaaaaacttgtgagagatgctttttctctccacagttatctttcataactatctctttagttttgtgtgatgctgctcaaatttgttggtctaaactgcagtgttctcggagggttcagcacatgcccttccagaccggaccctggcaaagcagaatcaagcgacaggatagccctgccctcatgaaaccttgaccttgactcttttttttttttttaaatggagcctccttctgtcacccaggctggagtgcagtggtgtgatctcagctcactgcaacctctgcttcctgggttcaagcaattctcccacctcagcttcccaagtagctgggattacaggcacgcaccaccactcatggctaatttttgtacttttagtagagacggggtttcgacaagttggccaggctggcctcaaactcctgacctcaagtgatgcatcctccttggcctctcaaaatgctgggattacaagtgcgagccaccgtgcccagcctgaccttgactcttggctcaattttctctgttcttggcatctatgttcttcagaccatgatgcaagaattccaggggtgtacaatcttttggcttccttgggccatattggaagaaaacgaattgtcttgggccatacataaaatacactaatatgggccaggagcggtggctcacgccttataatcccagcactttgggaggccgaggcaggtggatcacgagctcaggagaagacaagcctgaccaaatttgtgaaaccctgtttctactaaaaatacaaaaatcagctgggtgtggtggtgtgtgcctgtaatcccggctactcaggcggctgaggcaggagaaccatttgaaccagggagatggaccaaatgtctatatggcctatagcatttattattaagtctgtgacaccaatgtacttcacttggcaagtcacttattcaccttaagcctccatttcctcccctaaaatgagatcaaaagaggcataaatgattgcccttctcccatcattcactctatctctgcctctatgtagactcagttcttgctcttcaactgacttggtagatccttgaatatatgtagtcattttaattccaaataattagtactaaagtaagaaaattctggtgagagaaaactgcaactatgtttaaatgtacaaataaaggtgaatcaatcccatttggagtaaagaacgtccagatgtcctcaaaataagtgtcctttctcctccacctattccctgtcccgagtctcattttcatgctcagcaagaccctctaccggattatgtcatcccccaccccgatacaaaagggttatgtttataaatgttgaatgactaacatatcctctcagcattgccatatagagtggcaaataatgttggaaggaaattgggcattttggaaaggactgatatgaatattaattatacaagtgtgggctccaaaatctcttttttaggtttttcccacctgcattcctacagaattgaatgtttgttcttctattatgcttatcagtaaattcttaattttgttaaggaaaaaaaacaaatccagggcaagtgcttacattatcactatcatctgcttgaagcctgaatttcattaagtaggttgttaataaaatgaggaatgatatatcacaactgcaatgctgtgtctcccaaagttaatgaagagttattattttatagatgacaaattaaaaggctgttaaaatagttggtaagactgtcaacggatttagcaacattctaattaaaaatagggcattaaagagaattaaaatcttgaatttggagaaatgagaaaatatgcttaatatgtgatttaacatagttaagagccctggaatctttacataagatgagatggatgtcgttttaaagatatcgtgacaaatttttgcaaaactaggacatcaccatctaatacaatttcacagagttgatgaacaatttgtttgccattaaaattatatttttaaatgtataagtaatattaaagcaataataacattttaatatgtattattataaagatatgctacatgtagccttaatatatattaatgatatacacatttacctgtcacccatttctaacaaattaatagttttcatttttttcattttcactgaagtacttatctatctggatacatttttatacaaaaatagatttttatacaaaagttacacttctgtctgcttttttcagttatacctcagtcttacatatcttaaatgttttcctttttaatcattaaacaccattaattgagttgatatgctacattttacttaaccattcctttcttggttagttaggtcccttccactttttactataataaataacattcaagaaacattttcatatacatttagagtaagtttctggaaatgagattactagatcaaaaagtattaatgcttttttggttgtttaaacattatcaaactgcttatcaaatgacttttatcattttacaccagtaatttaactacagttgtaattcaatgacaaggtggataggatttgatggcatcattattttataatttttgcaaaattagtaggtaaggtggtatcatatgtttgttaacttatgtttaaacaatctgctccaagaatttcacagataattagataacatgactgttttctctattaatttggttttctatattttattctttgacaagtggtcatatgcaaggtgccccacatatgatgccgtaattttcttttagcagattttggaggtattcacagaattgagattaagcatagctcaaacaaagatacccatggaatgaataaatgaaataatatttaatagagtaaaacagaaagtgtttagaaacatgttatagagtcaataacaggtatagtgaggatgatttttttcaaggtgtgctaaacttgaaaattgaccctttttatgagtatttcaggagctagagaatccctcctattcctaaaacaaaggtgaaggagaaacagggaaagacagagacctctaacaaacagaatgaatagctgaagtggacgggctgtctctgggagtgggcattctatagaatgcaagcagtgggggtaaacaaatgctgtttacatttcccatccttgttaaatgaaaaagaaaattaggaacaattatagctagagttatagaaatccaccttgtgaaatagagaccttgggtccaaagcgtctatttgcatttcactgtttctgcctggaacaagtctgttagcatggctcactccctactccctgcaggtctctgctcaaacattatctcttcctgcctactctctataaaatataaagttctgtgtaccccacttgccattccattcactccctgttcttttttatcatgcctcatgcttcttgatctaagatttgcttatttgcttatttatttactcatctatatactgcaagaatgtaagcttcataaaggcagagatatgtactgtatccctacaacttgatagaacaatgcctggcatgtaatggatgcatcataaatatttgttgagtgagagaatgaatgaatgaattgtgaaagatcaccaatggataaattacccaaactctggttgatatagccaacctactacaaatcaatgaccattccagtgcagagttgtacatgagcagatgcagtattggggccacaacactgtgtaaggttggatctggaattaaacctttcttgtaatcatatctgcctaagtgtttctttctttctttctgaagagggattaaagacagattctagaagctcactgtatattattttcagttaggtatgagtatccatacatgtttacttgtgcatgtgtgtatacgcatacatatacataggtacaaatatatacacacacatatccacacatccccacacatgtttgtatatgtgtattaagttcactttagtaaactctgtagaggatattcccttgagtacaatccgtagagtcagataatgtcgaccaatatttttctgtctttttaaagcttgtgaagaatttcttgagacattgcaatggagaaaagcctggaacaagtgaatttaaattgataattacagttagaatctggtactcatattgcataagacagttataactgtgtaaagagttctgctttattgtggctaattatgctcttctaagactgttgccaaaaaaagagcacacagtcaacaatgtcccagccttcctctgcacaccccctaataccaatgtcttcttatgtctcagtcctctcctcatcatcccttggtcacttttcagcctttattttcttatcacattgataacttgtagtatcattaacccttgacactcatcccatctacaattcccctaaaccagtagacgtccctaatttaaaatggccatggtcatcaaaggcagaaaatctgcttcctctcagcagtcaataatgcaactagaaaggatcccttcagtaggttcatgattcttcctattcaagaaatggccattggtgttttgtctttgacatcaattgattttatatttaattcttattcattttttaaaaccttcctttctcaattctaagtcaaatcagcactaaactgtctctgtggcggttacatatcttagttgctctttcatcctaccatagaatggagactcataatgctagaggagaccatgaaaagaccaactcatcaaccctacagttaatcactaagagaattgagctctcttgccatctacctttctatcaggaaatggatccctgagcatctgtctattattccttttgtgtgttgtgctcaacggaaattttccacatctccatctctgtaactccactgtcaagagcaatctcttaggcactgcctgccattgtgattattgccaatatcactgaattaaggtaatcaggccacattcatcgcatgcacttggagcagaagctgaaaccacaggtaaaattgaaatgtcctgtaatggccatttctgtgtcggtttcctgttcctttccctaaagtgcatttgcttttgcttttcctccttgcctgctgagatcattgtgtgggtgtgagtgtctgagggttcaggttgataagttgcaaagggaagaggggataaaaagccacacagcttgaataaataaatgcatgaaaatatgtggtactctagcatgccctaccgccatgtctccatcactacacaaggatgtcctcatagattaacttcagcatcagaattctgaaggcagagaagcaaaagtagcagctgtgggagctccctaaagtggaatcgggcatgacactctgaattttgaaattgcaaacccacagttcagtaggttgcagcaacacagaatgcagatggtgtgttcctttggattgtcagtgtagttctacagtgtatataaatggcttcagttcactcctgttggctctgtcactgccttttaacaccaatgtgtcagtaaagccatgttgcagtgacaatcgtgttggtaatggggctcagaggagaataccttgagaaaatttgaaattaaccatttcagaatagggaagtcttttaaatatgattcatgttagaaaaatgaggagcacagtgcactagacatacaaggttactacaataacttggattcacttaatgcatgttatggaatttaagaatagatgaagttgttcattttttttttttttacacaattacatgttttcccccacggtgtgaataaaacgagataagtgcacattataactatctcagtgattaaagcatcttcttttcatctataaatatcatataatagagttagagtaaatacaaggctgtaattaactttaaggccttcactgatacactatcaaaatagggccttactgccttccaatggcagctgagtcaaaaagaatggtttccatttagaaataatgtttggaggttttattcaggatcctatgccttatttcccaacacacagcttcagtggccagttagaaatataggttccctgccatttgcaatatctcatgcccctcctggtgttcccaacagctttgagactcagagcccacaagtggaatctgtgcatgtgagacttatttaaaaaggaaagttttttaaattttgtgaattacatttttgagactgtcagcttagagttgtcttccattaagttgatagaacgtgaagcaataggagagcagttggaataatatttccttagcagaatgttatgccttgcaaaggcaacttgtcattcgaggctttcttttatgggatatttagagattttaaaaaaaaatctgtttatcaattgatatacagttggccaatttaaaatgatgacttcatttcactaatgaccaatcagtgaaaggagtttaaaatcaattaactttgtgtggggccaggctgaatattatttgtttcactgttgtagaatgtctgtagaatatactgcatgtaaagtatattgtagttaagggtcagatgccctaattctgctttttagttatatgaccttgagcaagtgaatacatttctcagtttcagggttttcgtttttgtttttttcttttaaatggaggtaatactactttcttttggttagttgggtgtattaaattagaaaatccatgtaaaggcacttaacaagttgtctcgcatttagaagtcctcagacagtgttaacaatgatcattattatgttaattacatttacccatacaacctaggatagctataggggaaaaaccaaaagccaacaaatgatttagaatcacagatggttaatactaggaggaaaataactagattttcgtttaccctccttattgtacagttgaaaaacaatactcagggaagtctaggaagtgactattccaataacatgcatctatttgaaggaagaagctgcatcagggtgctaggttttctccaatcagcagtgatttctgctatgccatgtggctttcaaatgtatctgcttaaaaattagcaggatgacttgtctttgaaaatagaattacttcagtgtcacctcactttatattcaaacctacctagaacctattaaatggctggaatcaagggaccagttagtatgtatgatataaccagttgtaataagcaaggtcactactgtgttaaacactatatgcaaccaatctttgaccattcattctgcaaatacttattaaaacctctggtgtatgtcaggcactctactagcagtaatgatagttaatatgtgttgaacacttatgacacttcaggccacaggctaagaactttgcttatgtaatctagtttgactctaacagaaatcttaccaaataagtacttctattagtcccactttatgatatgatgaaaaacaaaaatcaaataagaaacaagtcctcattctatcttaacagatgatctgctatgcttatagcctcaggaataaaaacagtgtttgtcttctggcacatagatgattcccaataaaatatttgtttaatggattggcatacagcctaatggagattaaatacagataaaaattaatacaataaaactagtccaggcagtacaaaaaccagcacactgaaatatagttaggacccaaaagaagaaatgggcttattcaggaaaggcctgaattgacagattctacaggtaaatcctgacttaaatgacattttagatccttgccttcttttcttttgatagacacagaacgagatcattcagggcttagccatataggagtgctatggtttgaatgtttgttccctctgaaactcatgtcgaagtttaattgccattgtaacagtataagagctgggacttttaaggcatgattaagtcatgagagctctgccttgaggggtgagattaatgccattataaaagagcgagttgagccctttcatgctctcttgctcacttgacaccttgccttccaacatgttgatgacacagcaagaaggccctcaccagatggtggcactttaaaattggactttccagcctccagaactgtgagccaataaatttctgctcattataaattacccagtctcagctattctgttatagtagcacaaaacagactaagacaagggacaacttattttttatggttgttcaaatctttgttttcaagtatcctttttacttttagaggaatttcttcctgtaaagacaaacaaacaaaaaaaaacactaaaatctagaacatacctgcaatgctgatttcctgttttgttcttccaagtcacttccttaggataaaaagccactactctgtgcatttagagcccctgaaataaattctccattttcaaatgaccttacaagaagggactagaaaattgctagataagtcagaaaagatttttattttaaaaaattgatgctcttctctggaaattatattacagttctagctgtgatatgtattcacaaaattaaaaaaaaaaagataatccaagagtaagatgcaaactcatttttttggcctgtgtatgaaaatagacaaagaaaaatatagggcattttggggctgttcaggccaggataaaaaaggaaatgggtgtcattcctgaagcttctctctctggcctgctttttccttttctatctggaggctgacagacaggaatcacatagaagttattttgaaggtaattttatatggagtggagacatttttccccttctgcagtcataagccttgagaatttatcaccagcttcaaggtaagaaacttttttgccatgaatttgtctgctctaacgttccttaactttggtctctcagccaacaacttgccccttgtttccagcccagcggttaggtggtttgctaaggtagaaggggagcaaagcagcttaggctggggcagccaaaatatccatccatccctgctttgtgttatgctttctctgtatatgagctctaggttagttttacctcctcaaacttttctttgtttatttccccttaatgtctgcctgggcattgaatctgttgtcttgctgccttggcttattttttttttttttttgggggggggggcgggggggggggtggatggagtcactcactctgccacccagactggagttacagtggtgtaactcagatctcggttgcagatctcggctcactgcaacctctgcctcccaggttcaagcaattctctggcctcagcctccctagtagctgggactacaggcatgcaccaccacgtctgactagttttttttgtatttttagtagacacagggtttcaccttgttggccaggctggtcttgaactcctgacctcaagtgatctgcccacctcagcctcccaaagtgctggcatgataggcttgagccaccgcacccggctgctgcattggcttttatgtcttcttgacactctgatttgtgtgtttatgatgctcgtgtatttaagtgctcaaaaatatttgtttttttttttttgttgctgttgttttttgttttttgtttttgttttgttttgaaagaaaaaacatctatcaagggcccacagtgagtcatatctcaggcttcagtgcacttggctttgtattctggccctgttagccacccataccgtggagagagaatctctgcatttccctctctaggaaacaccacccaaacacttgggttctagattctaatatatcacattcaaatcccactgcgttgctccctgactgtgtgacctcagctatgcaagttgtgtgtaccttttcctttctttcttctatagggttgtgaagaccaaatgagatggctcatatgaaatgtttagcccagtgctcaagaactcttaattaccttttccctccccctttttttttaaatctccccattcttccttaaaggtgaaaataaacatcactgtccaaaagaaaaataggatggaatcaagattaaatgattaaagctggaattttccttttacgtacttaaccagtgggtcattcaaggtacttcacaatttgttgagagaaccattaaacaccattagtaggtcatctgccactgacttcaaaactatagtctttaaaacccagccaaatagggaaatcatcttaatagctccgatcactttgatttgggccagaaggccatggtgacagatgcactaagcatctcataaatagcggggtatttcctttagcaattataattcacagaatagaaatagtcatgtgctattattatgtaatatgatatcacttaaaaatgtaaaactgtcgcaggggcattctggccaactggccctgcacctttaaccacacttcagtttgttctggtctcatctgaatgaccctcacatcataaaatgtctttttctccttcaaattctgaaaggaggatttatactagtacagcatatagagctcgaccgaacttttgagactacctagtcttttaaaagtcctttatgagatgtattattctagtttggttttctgaatgtacagataaagaaactgatttagagcagtgaattggtttggcatggctaaatggatagtaggcggctggttcagaatttgaactgacatcgtcctaactaaccaaggttaagctgaaaaataaaacctttgttttatagatacagatatgtgtgtatatgtgtatggtgcatacatacatatataatatgtgtgttatatgtgtatatatgtatgtggatatatatattcccctccctaaaatagtgctgagatgtgtcctctgaatatctaacacctctgagttttttgttatatttttttcctaaatgcaatcagcttttactcactgataataaaaattgcatgtgctaattttgaagaagtcaaaaaattgagaagagtagaaaaagagccaaaatcgcctgaaatttcagaagtatctgtgaaaattttgataaatgttacacaggtatatttaaaatttcataaaaatataagtagaactcctggagaaaaatcaatgattggttcttattcccaggtcctaccttctaactcagagcatatagtacaggaaaatgataggattcaaaatgtggttcaggaaatgcaaatatcaacgtcacctgtgaacttcagagaaatgtacgaagtcagaacctccccaaggcttactgaatcaagagctctgagggtggggcataacgatctgggtcttaaaaagtccaccagactattctgatgtaagatcaagctagagaacctatggcatgatgtattagtctgaaagatctgagtttgaattcgtcttagccgtgaccttcattggatcatgaccttaattaagttagtcacccaactgttcctcatggtgaagtgaagataatatttaccttaaagagttttgaagattagatataagttacatgaagcattaaatccagagactagtccattgtagaagctcaatcaatgacaaccattatagaaggccaccattgctttcatcagcagctcagttacacaagtcatttttgagagatgcagtagcatgcactctaggagagaaacacactgttgttaatatttaaaatatttcaaatagcattacagccagagaaataggatccatctaattcacaatttgtattcctcagaagcaacatgtagttcttcattgccaagtaggtctcctttcaaagatggataggtaattttttttcaaaatattttaatccatataatttgagcaaatactcggggacatgagattctatgatgaaagctctgttttgatcacaaaactctgaactgcaaatgtgagagtgtgtgtaattccatctttctctttttatttatggaaaaaaaactaaatcgaaccaggtagttgaatccttctttcaagaaggattaacagtcattgggaccacgatgtatttggatagaacaagaggaaaaaaaaacatggaaataaatatgaaatagaaataaacatgattgtgtttttagtggtatttgcaatgccttacaatattactaatatgataataatcatattagtattccactttcaggtacattgatttaatgaagattactgaaatgatttataggaaaaaagaaacaaggtgaatttaataaggtgccagacaactgccctctgagtctataaaagtgttcagagggaccgaattcggcttaacctgacccagagtggcacattacaagaaactgcctcagtcttactcaagtgtgaacgtggctctagcaggccctactgggtattagttatggtgatgctgtatcaagtctgtggagtgttcattccccttccacctctgatccatgtcttttaatctcttaaactgagaatgaatggctattaaaaactttcagtgatttcagaaagattctttaaatataaaccaataaaatgaaataatgcaatgacaatatttaagcaggaatattatggcagataaattctgggaggtttactgctaatggccacttgacatttttaaatagagcgtttcagtaaatcactgaaaattagccgacaagaatttatactcatctatttaaatgatacttgtaaataagtaaatacggtttaaatatagtttgagtgatggtggaatttatagcaggaaatgtcctagtgtaggtttttgttctaattgaagatcaagtcaacaagcaactattgtagttgctttgttcccaggaacagggaagtatgctagttcctgcagacccacagaggagagaagcccaattctgcaaatccagtaactcattgctcaggttaaagtctatcaccctttaccccagaaaacctcctttccttaccacacaagtggacttacaagacttccaggttagaatttagaaatgctcctaattatatcttgtggattttagcttgcatatagttcaagagctatacactggtcaggggtttataataaatatcagtggtatattttaattatgtacatattaatgcattcatttcacaaatacttactatgcatgttctcttatattccagacgttgttctggcatagaagatggtaacagtgaacacagcaacatctgttctgccctgaacttatagtctatagttgagagatcaaccatgaacttgtaaattttttaaaaagataatttcagttaatggtgagttgttaaggaaaaaataaatggagcaatggcatagagagagtaactttggagagagataaggaaagaaccctttacatggacctgtctgaaaagatctctctggaaaggggacatttgaattggagcatgaagtgggggaagaagcttgaacggtggccaggagggtgaggggcattctgagtgaagagtggtcagggtacaggcttgaagagagagtgttctcagtatagcgcagggttagagagaaaggtcagtggggctggacttcatgacaagacagggaaactgtcctataagatcagtttggtaaggaaagcaggatatatttgatagtcttctagagaacataatttactatgttttgatattatagtgggaagtcactggatctgaggcatggaagtacatctactttgttattaaatttctggaaatggccaaaaatcgtagtaattttatacgtactcttaaaataggataaagtcagccaggcatggtggctcacgcctgtaagcccagcactttgggaggctgaggtgggcagatcacgaggtcatgagagcgagaccatcctggccaacatgttgaaaccccgtctctactaaaaattcaaaaattagccagacgtggtggtgcacgcgtgtagtcccagctactcgggaggctgaggcaggagaatcgcttgaacccaggagacggaggttgcagtgagccgagttcatgccactgcactccagtctggtgaaaagaatgagactccgtcagaataataataataattataataataaataaatatatatatatatatatataaaataaagtcaagcctcctaagtcatgttcagtttacatattggggaaaaccccaaagttacactcagtcatcacttcaatgcaagaagcatgtataattacaaaagttctcaggcagtcttttgaaagatacaatactgatgaagaaatagtttctgtctcaagtaagctgcatgctattagagaaagaagctatatataattacctatgatatacaattttaatgaaataaattctgtattggaagcctaaaggaaaacccggcaaattctgaataacattaaacatttattcttttttaaaaaattttattattatactttaagttttagggtgcatgtgcacaacatgcaggtttgttacatatgtatacatgtgccatgttggtgtgctgcacccattaactcgtcatttagcattagatatatctcctaatgctatccctccccgctccccgcatcccacaacaggccccggtgtgtgatgttccccttcctgtgtccatgtgttctcattgttcagttcccacctatgagtgagaacatgcggtgtttggttttttgtccttgcgatagtttgctgacattaaacttttattctacaaatatgttttgattgcctggcacatatcagaaaggatacaatggtgaacaaaacatgcctggctcttgctcttaatgagtttgtagttcaattggggaggcaggaattaaatatgaaatatagtcacaaattggaataaatgcaaaaagcaggaaagaatagcacttaagacagtatctggcgcatagacacccagtaaataccagttgaataaattgttgtttatagaagaaaaacagggattaacatgccttagagacagcatgttcagaaaaaacctccccgaggatttaccgataaaggtgaggtcagaagaagtgaaggaataatcatttcaaaagatttggagatgggatggcttctaagcagagggtccagtatatagagatccaaggatggaaaagagttctagaatgtgtcataaagacagagacatgatgttagagaggaagagaatggtgaaatagggtagagtattgcaggtcatgagaagttataagtcagtatgtaagccattgtggggctttgtatgtttagaagatcatcctaatttctgcaaaacgaattgactctgcggggataagagatgatgtttgtgatgatattgtatgaaattagattaaaagatgatggtgatttaggctaagatagtgagagtgcagatggatgaaagtggctgaatcaaaagggtttgcagaggcagccactggatatagtggaatggtgcaccttctgtcttccaggtatttaagctaaaagcttggagttatccttaatttatcgcagcattaagtgtgaacttgttaaaaaaaaaaaatcagttttcttatttctctgctcataacccattccaacagttcgatagtttctcatatcgtttttttttttttttttttttttgatggatttttgctctgtcgccaggctggagtgcagtggtgcaatcttggctcactgcaacctctgtctcctgggtttaagtgatcctcctgactcagcctcctgagtagcttggactacaggcacgcaccaccatgcccagctaatttttttgtatttttagtagagatgggtttcaccaagagatggggtttcttaacctggtgatctacccgcgttggcctcccaaagtggattacaggcgtgagccaccacacccagccagtttcccatatcttttgaagaattgaaactcttaagcccctaaaagctcttcccgcttattaaatttataaatcattcccctacaagtgtcccctttagttaatctaagctgcctcactggccttctcccagcattcaaataaaataatcacactacctcatggtattttccctagctgttccctctagctggaatgctcattccctagatagacacttgaagattttacttcctttagctcttggctgaaatagcacctaaacagtgaggtcttccctagtcacttatttccttatgtcctgaccctccttctcggtatactctatcctgtttctctgctttattttctttttagtgtttatcagtatttaacaaagtatatattttgtttagttttagcttttttggcttgtcttcccactaaaataagagaactgggtcttgttatttgtttattaccatatccgtgatgtctaaaatcgtgaccaatatatgttggttgaatgaataaatacatgacaatagttggagaaaggagttagtaccttccagaataaatgttgttataataactaaagttgattggccatttgaaaacaggtcagttgttgagttattggcttcatgcaacaacaacccctgtgggagatgagtctgggtagatagaattgggactggttggaagaatcttgaataccttgtcaagaagtttggacatggtcttatggagagttagaatccattagaaaatttttaaagagaagggtggtgggctgggtgcagtggctcacgcctgtaatctcagcactttgggaggccgaggcgggcggatcatgaggtcaggagattgagacgatcctggctaacatggtgaaaccccatctctactaaaaatacaaaaaaaaaaaaaatagcctggcgtggtggcaggcacctgttgttccagctacccgggaggctgaggcaggagaatggtatgaacccaggaggtggaacttgcagtgagccgcgatcatgccactgcaatccagcctgtgtgacagggccagactcagtctcaaaaaaaaaaaaaaaaaaaaaaaaaaaaagaggtggcatactccccttacgtttttgttaataattttggaaatggtgtgcagcaaggagcttgagtgggtagacattggaattaggaaaaatctgttgaggaaattattgaattgatccagctatgagatgtatgagaaatgttgaagctgaaaattgttttaaaaatagaaatagaaagaagaggaagagatatgggggatagaaattatgagttcttgcttatagtagtgattacttttggatttaaagacattctttctcattaagacaatttctttagtttttcatatccctaattcctcataaagcatttgtgtcagtggatggtcttgaacattgaaatctaccctgagtactctagtaccatttattataaaacaaattatgttactgtcctggctaaagcatctaaaactttcctgaaatgtttttcaggagcaagttcactggatttttagaaaatctccgttctttttgtttctgtcacttaccagacatatgaccttgagtatgtcatttaacttctctaaatgttgtttccttatagtataaaagaacatcttgggaagaggataccagtgacttatattcaaatagccaaagtgttgtcataattataatagccagccttaactgagtgcttgataaatgaccagccttgtgtccatcaaatcctcatagtaacactatcagtttggcatcattggttaaatattcctgttttacagttgaggaaactgagatgtagagaaggtattctgtttacatagggacgcttagttattggtgaagtctggatttgaatccagtctgtctgactccagatcttacacttttaaaagctatatgcttgctggggtagaagtagaagacttgtagcagttccaactgaatataaggaagagctttcaaaaggcagagtgagaacgagctgttttcacagagagtagtctctccctgtcataacacagcttcaagcagagactgggcactcatgagtatccagtgcttccattccaccaagtgtttggcaaggagatccaatacctaaaatggtagctgaactagatggctttgaattccttcatgctttagattagatgctccaaatctgaggatccaggagacaacagcaatgctcatgataatttctgtttcctcttatttgctatagcatttgaggtccatagcaattttctagcatttctcacttaacgttcttatgtttgtagcttattcctctatcaaaattttgaggacagggagtacgtttcattcttccatgttttctctgatgcgtagacataagttttggtcactacaggcttttaagtagtattgtgtatgtattacctattgaaaagcattatgggccaggcgtggtggctcatgcctataatcccagcactttgggaggccgaggagggcagaacatgaggtcaggagttcaagaccagcctgaccaacatggtaaaaccccgtctctactaaaaatacaaaaattagctgggcatggtggcacgtgcctgtagtcccagctactcgggaggctgaggcaggagaatcacttgaacacgggaggcagagactgcagtgagccgagatcatgctactgcactccagccagggcaacagagtgagactctgtctcaaaaaaaaaaaaaaaaaagacaagaaaaaagaaagaaaggaaaaaagagaagtattatgaagaaataatttgtttaattctacttaaatatcagttgaaagaagaaattatttcaaaaattaatggctaaatctgaaaggtcctatcaactggcaactctttcaggatagaaagatggacagatagtgcctatgagattatgatcatggccctttaactgccctcaacgcatgaatgtacctacagaagtgaggacatggaaagtctaaatctcttcatcccacttgagaaagatgaatttacaatgtaggatattctgtcatcttaagataatcaaaaactagacttttctttgttgggcgcgaagaaggaagatggagaacctcttctgtttgcaagatatattttgaaagagtgtgaatacaatgatggcaaatgcaactcttcaagagatgcaccattgaaataaaagtggtaaaagtgagacccattaaatgtgagcaccgttgagtcaagctgcatataattatcacagaagataatacggaagcagagaatgttgttaatgatttctcagagcccaagtggtgtggaaaacaactctgagtgcatttactcctccttttgtgtagcctatcacaatgtaaaattgagggggcacctggcattaaatactgtatttacgaaaatgcagtaaaaaaatcaagatagcatttagtgtattgttcttccacaaaagagagagaaggaaaaaaaattgcctttatcgaccaacgtattccaattatgatgttttatttaaataatcaccaacgggcaatttgttcaaagttatttctatattcccagcatgaaataatcccctatccactcaagtttttttatgactctaagatgggataagtagaaccataattacaggaaaaaaatttgggcgttacgattctagtccaaagtgttggggcattcactttcgtggcctcggcagtaccgtttgtctttgttgaggctctattttccccctcactttagctatgatttccttatggtattttaaattaattatcaataccttttatgcctttttatgtttttgttctatatttgtatggatagctcttgctattctttgtcaaaattgcttcctgtgcctcacgtgcctctgaactacagttggatcatgatgagggtttctttgctggtaactgcacccgcctcaacagaaacaggctttgttccctggagaacagctttgtgactactgaaccagaagcttcagtgttgcaggggaagggtcggaagatgcaaattcatgtttgtttggcagtggacgcttggctctgccccagtttcatccccatgagtagcatgcgtttattccttgggattcttaatgtgacctatcacttcaggaatatcctgtgcagaattttatttgcttgtactgggttgagttcataaacactaatcacacaaaaaaacctaattagcgcaacaatgaaaatggaaagactgaacatctgagtacttatgaatagtctttcagtgtcgttgattccgttagttatcttgtatattttatgtcctacttattacagtaaaataataatattctatagagacacacttatcaaggaagccaggaagagaagatactggctatagaggttatggctgagtcccaaactgaagagacaaattgatcctcagagttacatgaaaatacaagtgataaacgtggtaagaagtttgtttaaaaggtaaaggggaattaaagaaaaaatggatgtgaatttaaaccccagaaacagtagtgcgtggactggaaatttcaaaatgaattcataagccatcaacaaagattaaagcaatataacagtgttatgggcattaagtaaaatggataaagagaggaaaagtaatcagagaaagtctttccataacaggaaaactaggctgaattactaatggattagtaaggcaaatcagagaaaatgggagggggaacactcttattgcttcaggattctagcctcacgcctttctttctgtgagacccctacaactgcttacttcacctcttagcctcgattttctcagctgcaaagtaagcacaatgttagcacctctcgtaagattatttaatgagatgatgttcagataaagttcttaaagcaaggcctagtatatattgtggtagttgttgttattattattatcattattagaaaaataaatattttagattacctgatcagtgagccatgttcttccaaagtctttcaactgaaaagtcattaaaagaaattatatgtccttgggccagctaaaataggacatgatcgttgaaggacaggcaaatggcaacactgcaactgagtagaggacttccagtgaggtggaagagagaggagagttgccagtggccttctagaggatatgtttgttgttcttgtccctttgctccagggggaaggatggggatcaatcaacatgacagggaaggtatgtctttaagagtaggtctcaaaacaacaaggctgcaataaacctgcctcttagaaaatcaaagagatttagagaatctacatcagctttctaggctcatgagtccagtgggtaccttggcttcactctgtatggcagcaatattagaaaaaaatagttcaaatggagttataatgaagacattaagtcagggatatagattaccttgcctacatcagattatgagttgatatacatatgtattttgtaactaaatatatagcatgtaaatatttaaataagaatacactaataaatataccttatatttattgaatctttcctgtgtgccagatattataagtgcttttatgaattgttttatttattgttccaccataccctgataatgcagaatactttcattattccaattttgacaatgggaaaattaaaatgaagacaggttaagtagcttactaaagttcacttagttaggaaagggtggagttgggttctagcccagagtgtctgcaactggccccataatcttaaccaaacttaaaaactgacctttagcagatccatgatcaccatatagatttgactgaatgacagtaaaattttcttaaaatatgccttcaatgttcctgttgaaagaatttgccttttgaaaataaaacaatttctttccagatacacttaatggcataaaattattaagtaacatcgacactagctctacctctttctctgaaaattagagctaagtgacattttcagacttttctaggtagacaatgtacttgctattccaggaattctcattcaatagtgcattttctctttctttgtctctctttccttttcttcctctcttgttttttccttccttttttcttttgttctcataaattcatggaagtctgtcaaagttgtgatagcatgctacgacacattatatttttgctagtcatgaactccgttacaacatattatctggtttgcaggtcatattatttgaaggaacatgctttgctgaaatcttaaaaggataccaaattgaagctctgatttgcaagcattttgcaatcgtcactcaagccatatttgtcttttgaaatcagaatttatggaggacttgtagccttaaaatctaacaggagaagaagttgacagaatcgttgatgatatttaactcaaatttcatagcaagtattttgtgtattgccagatcagaacctctcaggttatcataaatagggcttgactattttattaatagcttggttggtgtagtagtccattctcacattgctatgaagaaatacctgagataaagtaaggaaaagaaaagaaaagatgtttaagtggctcatggttctgtaggctgtacaggcagcatggcagcatctgcttctgaggaggcctcagggagctttgactcatggcagaaggcaaagcaggagcaggcacttcacatggggaaagcaggagcaaagagaggggaagagaggtgccacacattttaaaatgaccagatctcatgagaactcactcactgttgtgaggaaagtaccaagaggatggcactaaaccattcatgagaactccgcccccatgatttatttaatcacctcccaccaggcctgacctccaacactgggggttacatttcaacatgagatttgagcagggacacagatccaaatatcagttggctggctagcaacctatggcttcgtggctttttaggatacctgttttataaacacacacccctgctttcacctctaccactactaccatttcgttttgcatacaaaagaataaagcctagtttatcacagcgatttcacaattagcaccacagatgagactcatctttttttttttaactcctttgtttgaaagatgagccaactaaagctaaaaaagtgacttgtgaaaggtgatacaaatccttagaggttcagccaagttccaaattctaatctttcaaaatccatcccagctatttccaccatcttatccaaacaaatccaactaatcaagttgctggtataatgctagtgtttattaatcatgagggctctccttctgtgtattgttctcagggaccttatgaataaaaatgctggttctcaaggggagtgagatatgttgagctaggtgtgctgggctgtgttcagcaccctgtcagcagtcctaatagagatactatcatgaccccctccctgctttataaattaagaaaccaagacttaataggctaactaactatctcagaccacacaatagtaagtcatggagtttccttgtaatcccatcttattgatgccagactctatacagtgctgcctcccttgtctcatgctagaacacatataaatggtgcctgcacatttacaaaaattcatccattggctcatccaatgttcttttcatttctccttttttttttttttttttttttttccggtcagggtaagggtctaggataaagggtggatgcagtgatttgtagtttctctgttttttgctggctggccacattctatagcaagctgatctcaacgagccctacttgggagagctgcttggagtgtgtaccaagctggggcagccatagcctttgattaagaggataaaaaggcatctctggttcctgtggttttttttttttctttgcttttgttcttgtccacaggagtggtggggatggatactgaagaggctcagtaggctgaatgtgaagaaagttgaagaaagcccctctgttatctaaggaataaaaatcacatgtcagaagtttacaaatggaaatttgagcagaacggtagagaattccaaggctccttatactctttctaatcagcagttacaaagcatagtccagcaaacttaaatgccagcatatcaaaactccctgtcttatcataccctttgagaattcctaatctgaaaatctgaaattcaaaatgctccaaaatcccaaactttttgagtgctgacataatgatgaaaggaaatgctaattagagcatttggattttcagattagggatgctcaatgagtaaatataatgcaaatatttaaaaaaaaaaaaatcggccgggtgcggtggctcacgcctgtaatcccagcactttgggaggccgaggcgggtggatcatgaggtcaggagatcgagaccatcctggctaacaaggtgaaaccccgtctctactaaaaatacaaaaaattagccgggcgcggtggcgggcgcctgtagtcccagctactggggaggctgaggcaggagaatggcgtgaacccgggaagcggagcttgcagtgagccgagattgcgccactgcagtccgcagtccggcctgggcgacagagggagactccgtctcaaaaaaaaaaaaaaaaaaaaaaaaaaaaaatcaaaaatctgaaactcttctggtcctgagcttttcagataagggatactcaatttgtagtgtacgtaagacatacagcagggacaagaaaaatgaaagcaagcaagtttacaatttgtttccccttaacaattaagaaaaaaattaaactctatcaacataattattcacctttattaagcagtcaacattttcaggcagaactagtttgtaatttgacatattcacccgttcattcaagaagtatatagtaactatataacacaataagtaagagatgttttcagccaacttaaaattcaaatacaaggaagagacatgttaaaagctgatttataatgaagaggcataagtgctggaatagagatatccataaaatgatttgggaatgtaaagggggaaataattatttgtaaaaatgttggccaaggttttgcagaggaattgacagttgagttgggttttgtggaatgagcagtcatcttccagaagatgaatgggataactctaaagcagatgaaacccattgtgtgaaagcttgacgttgcaaaaagacgtgatccatggaaggaaaggtagatagttcaaagtagtggggtgatgtcaaggagtggtatgacaaaggaggctaagtgctggccttggaaatgtagttgagattataaaaggttcataccaaaatgtgaccaatttcaaattccaatctcaatatgtgttttattataaatcagtgagattaattttctgtggttcatcattaaaaaaatactttgcaatagtgttaaacaaggttaggtaaaatcaaaagttgttccaaaattatcttggatctgggtagacatttgtaatacaatcttgaaagcataaaatgaaattttgtgatttctcactggattacaaaatcagttggacaatctcataattaaaatgtctatattgttacaaaaggtcaacatgctgtacttattactgtatctggattatatgcccactgtggttattcagcgggctatagcagaacgttacaaagtttcttattattgttgtttgcttctgcttttcctaccctctacccacaggactaaagggtttttgtttgtttgcttcctatatttatttatttccccaccccatggaactaagatggctttatcaaccctaacaatgaaaagtctcagtgatttaaacaacacattcattctcacttacattcgtgtccattacgggttaactaggaacttcactccccactgtccttgctccgacatacagcctgatggaaacttcaccatctgggccactacaagttgcagaagcaattaaaatagaacgtggggagaatcatgatctttcttattaaaggctagctgtaagggtaataaatgttacccttgctggtatttcattggctaaaatatatcacgtggttttcccttcttttaaaagagactaaggcagtacagtcctacagtgtgtcttgagggaaggtaaccccaattatatggggaccacactaccttgcttgctatgtattagttagcatggtcttttgtcaaagaagcaggaactgggtggcttaaataacagaaatttatttgttcacagttctggaggctagaagtctcagataagggtgcagacatgctcaggttctggtgaggactcttcctggcttgcagatggccccgcttttgttgcattcacacgtgacagaaagagagagttctggtatcttgtcctcttgttttaagtcatcagtttcattggctccaacctcatcacaccatttaaccttaatcattccctatttccaatagtcatttgggaagatgaggcttcagtatgccaagtttagggggacacaattccatccatagcattccacccttggtctccctagatttgtgttcttcttgcataaaaaatacattcattgtatctcaacagttccaaaagtcttaactcattccaacaacagccctaaagtctaaagtccaaactctcatctaaatagtatctaaatcagatatgaatgagactcaatgcatcttagaaaaattctctcctgctgtaacactgtgaaaccagacaagttatatgctttcaaaatacagtgatagacagtcgtagactaaaacttcccattccaaaaggaagaaatgataaagaaggaagggctgacagatctctgtcctctttagctgaaactggcagtgttgttaatgtcatctctattcctggtttcctgatgagatggctgattaagtccatgagtcactcccatgctgtctttatcaaataaatggttgtttaaccatactcatagtgttgtcttcagaacaagctttctcattcatttattcttttttttttcaatatgcatgatatgaggattttccagatcttcaaattctggcttctttttatttaaaacttcctttttcaattcatttttttttttattttttgcattttactataagtagtcaggagaaacaaaaccattctgctatggtatgtgtctcccaaaattaatgtgttgaaaacctaatctccagtgcaaaagtgtggggacttttgagaggtgcttaccctcatgaatgaattaacgccgttataaaagggcttgatggagatagttttgtttcttttttatccctctcacttcccatgatgtgagggcacaagcaacacttccctctggaataaccatcttgggagcagaagcagctctcgttacacgctgaatgccagcaccttggtcttggactcgacaacatatagaactatgagaaatacatttctgtgctttataaattacccaggctcaggtattttgttatagcagcacaaaacacactaagacacatttcttcagccctttgcctaaaaattttctcagccaaatactcaattgcatcacttgtaagttctaccttccacaaaacactggaacacagatcagccaaatccttcgtcactttataacaaggacacctttcctccaatttctaatatttccatctgagacctcatcagaattgcccctaacatctgtatttctataatgcacctcaaagtgcttctagcctctatccactaccagttccaaagtcacttctgtgtgtttagttatttgctacagccacactctacttcttggtaataaaatctgtgtcacttccagggtgcaataacaaaatatcacagattcgatggcttaaacaagagaaatttattttttaacagttctggaagtccaagatcagggtcccagcatggttgagttctggtaagatctctctccatgacttgcaaatgtctactttcttgctatgccctcagatgacagagagaggtttggtatcccttcctcttcttgtaagggcacccttctattggatcagtgcttccctctcatgatctcatttaaccttagtcacctccttaaaggcccgctctccaatatactagcactggactttagggcttcagcttatacattttggtgggacaccattcagtccatgatatattttttatgaagattgactgaatgtaaacttggaaatgacactattgaaattatttggtgcacgtaaaagatggattggtgctataatagcataaatcatattaatcatacagacaaaatattaaactgtgctctagaaattgttagttaacaaagtcaagacttattccccagaatattcctgtttggggtttattatttttttttgtaacttatttcaccaggattctaaaaacgacaagtcagaatggagaagaagtgggagcttgctcggctgtcatgctttctctctcctcccgtccctcttggtttgcagaccctcttggtttgcagaatggaggcagttctgctgacaccctacagattcgcattcgatgagaggccaaccctgaagatggtttcagtgttcttcccaggtctctgctgttcctgtttgggtctaactttagactaagtgacaggcgtgccaccgtttctcaaaaacaggtcatggcaggcccctgtgagttgttctagtttaattgtgtgattaaaattagagaaggggattttattttattttatttttagctcagaacctaactgagtcattggtttgtcctaaagataaattctctttcttttctttctgctgctgatggatttttcagtattttttttccaaactaccgggatatctgtgtgaaagacaggcaaagtttatccatagatttgtttacttattttatgtttaaactgaattatctagtactttggcaaaggacaaattttacagcttctttttttcttttcatgtattgttttctgtttatgctttcatttttctctgagtatttcagttagctggtgctactatgttgttaaataattcatacagaggtagggcatgaccatttatgaagtacttcacatttgtgatgattgaaaaaaaatctgtcttaaatgtctgtatattattgttgaagatgaggctgtagatctctttttcttttggttcattcattttatatatattttatatagaatatatatttaacaaatcgtaatcatacataattatggagagatctctcattctgaactaaagaatggctcccatgcctgaggcaaagtaacagttgggacattatttggccaatttagctgggattaaggagagaaaaaataagcaaaatttacatttcaccaaacaatttccccaattcatctccccaaatactcataatttttctcttttacattttgatcaaatttttacaataaactttttattttagagcacatttaaatttcagaaagttttagatgtacagaattattgcagagagagtacagagagttcctgtgtgcctgacacacccaattgtccaggttgctaacatcttgcaatagtatggtgtcacgattaataaatcaatagtaatacattattattaactaaagctcatactttatacagatttcctcaatttttctctaatatccttttctgttccaggaccccatcctggataccacattacttagccttcctctggttgtgatggtttctcagtctttatttttgaccaccatggcagttttgaggagtcttgattaggaactttatagaatgtcccacagttgagatctgtctgatatttttctcttgatcaaagtagagtaatgtgttttgggaggaaagctacaaaggtaaagtgccattctcattatgtcatatcaagggtacattctgtctacatgacttactgcttatgatattaaccctggtcatctgactgcggtcgggttttcaggtttctcaactgtaaagttattctttttttttttttttttttttttttttttttgagacggagtctcgctctgtcgcccaggccggactgcggactgcagtggcgcaatctcggctcactgcaagctccgcttcccgggttcacgccattctcctgcctcagcctccccagtagctgggactacaggcgcccgccactgcgcctggctaattttttgtatttttagtagagacggggtttcaccttgttagccaggatggtctcgatctcctgacctcatgatccaccctcctcggcctcccaaagtgctgggattacaggcgtgagccaccgcgcccggccaaagttattctttatcgtcctttccatgatgcatttttttttttttttgaagaaagtcattatatgcaactcacactttaagagtagggagttatgttccatctgattggaggcagagtatttacataaatgatttggaattcttctatatgggagcgttcttctcctccatttatttacctatttaattatttatttatgtcagtatggactcctggatatctatgttatattttgggttccaagttaatactattttatttactttgttgctcaagttgttccagctttggttcctgggagctcttgcacctggctcctgtgtccctttgctatacacccatcattgtggggttttttgctttttgttttaagcactttcttgctttctggaattacagggtatatcacctgtatttcttgtccctatccctagaatcagccatttctttaaagggcactggtttctttaccttgaaaaattatactggacaccaacatctgggtgctggatgtgctcctcttaggccaatttttgatgtgatatgtcccattttctgtttgattaggtgttagctttaatattggctggccattgagaacttgatatctctcccatacagtatggagaagaaatattttgttttattcccatttatgctccatatgaactttaggttttgcctccagatattttgctttatttactaacacctctaaaatcagactcatataactttatttaaaaagccatactttgttttagttcaagagaacagagctatcttctgcagtctgcccaggtgttaggaaaagatcagaaatcaaactgtaattgataactaaatacttgtactgcattttttaaaaaaatgaattaacacaagaagtttgttctttaatttaagatcattatacattaaattgctctaagataattatattttggttttattttcttaaaccctaagttatgatggtctatcttttggtagatccagttgagaaatgtcataccatagtgaaaggcagtgggcttgggatgggcaaattcactggggaaatattatttattatattacaaaaattaccaccatcataagatatattcattttagagtggaaaggaaacttaaaaactctctcctctaactaatttgtcttaattttgaataaaatgacttgcctaagttcattcatttatctagctgccaaacaggatcagaattcacttgtcatgagatgagcaattccatccagattagaagtttaactgttcaagaacttatatatcagttatatatattatattatttatatattgctatatgtattttatatatatataaagtagagaatacacacacacatattgcagagatatgaaactgactgcataaagcattttggagataatatatataacagagaatacacaaacacatgcacgtgcacgcacacacacacacacacacacacacacatatatatatatatatatatagatatattgcagagatatgaaactgactccataaatcattttggtgactgaaggcatggccatctgaattgcatttgctatttttaccttaaattcagtgactagaaccaagaaatgttgaaaagaaattcatctctgcttggaaccaaatgtactaaggagaaattaacttatttaaggaaaaaaaaatacacagctaactaggctgcttttgatgattcaccaagaatacatcctttaaatgataccaaaaaatgaaaataaatgttttctaaagaaagccattaatatgcttgcattgcctttaccctttctagcaatcagccaggaactttggatctaataactcaatttctcattcctatggcttctttctgattcttgggattggtgacagggaaagacaccatggaagctagggcacaccagagacttgaggagattcagatgtcataactgctctttaatttcttggaacagccttccttgcttcctggagtccccacagaaagcagtggggcagccacctggtgacccctttatctgaaggtgaaggtgggtaaagaatgcccattttgagcttccaaaatcagcctttgtcttcctggtgtttcagactctaagatgaggatgcagaaagagaaggaaaggaagtacagcctccttagaaggcagagagagaatctctgcttttctaagcatcttcctattgcgttgctgattagaattttatagggaacataaagtctgaaacccttactctccacatttgcctagtcagggctgtttctcttggctttgcactcaattattcaaaagcagacatcactaagaaactcaggaggtgagcccatggaagccagggaggctgacagtcagcttgtagtgtgcagtgtagcaagcaaggcttcacgtcacgattgcatgagaaagccatgcttacaggtcctctctccattcggctttagtggttgcacgtgtccatcagcttgtggctgagcgcaaggaagcatatagctttcaatggggacacaaatgttctcaaaagtgtgtttaactcaccttcaatcatacatcatttacgcacccagggcgttgaatctggggaacatgaacagacagagatgacagaaagaaaattggtatcaaaaagaaaagattttatttaagttatgttttgattgttgttttctttgttgaagatttgaaactgctttatgagtgggagaatgaacagaatacttgaagagagatatgaatacagaagtcgcttttggtaaaaataaggttttttactggcatttacaaatttttattagcagaattttaagtcattcacataggccccactactgcaaagaagctaatatttctgattcctttaaaaactatatttggacaaaccaaaagaacatgaatcagaatctcaatgtaggagggaatgttatttggcaacctgctgaccctagagaacttctttttgagaggacacttttttttcttatctctgaatataatctgattagctctcatcatttaattcaacagagtaacatacagccaaaaaaaaaaaaaaaaacaagtaatcagtgaaaggaaaacataacatgagttttaccaaatatctggtccctaaataaattcttccaaaataatgcagcagtaaatacgacctaaggaaacgtgtaacgacattttgccaggggtgggacagaacaacatggcctaatcatgaaaggtcacctacccaagtccgccaaatagcaagttacctaaagaagtcatttgagaacaaagtatttttatctatttgtttaaagaggatattggactacaggaaaggatctcaacctctttttttcctttcttgaaccaaatgctttgaaaaatgaccgtcaaacaagatgcatttattacattatggttagttaattttctcaacttatcaattacaggtaaatgtaactgtcaaccagaattttttatcagcatgagatagctcctattcatacacggagctgcttttattccagaagagaatgagggaagtaatgagctactttatttggtctgcccagttatttttattaataaacatatgatttatccatgaaatctgttttaaatgtacaaatgttttctcttagactttttaagatattaaaatttgctctcatgccacatattggtaaataggcaaaatagagttctccgaggtcatttcatcctctgataatcagtgataaattgctcttgtagcctctgccaagaactgtgacggttctgagatttcaccctacttgtaagctaacaagtctgccagtttcatggatgctggcagaagccataagcctcctgggtcagagacagagggcagttttgtacgcacagcaaggaatgtagccagaatattggcatttgtgccagttctccaagccccaactatttttttttttcttgagacagagtctcacactctgtcactcaggctggagtgcagtggcatgatcacggctttctgcagccttgacctcctgggctcaagcaatccttccacttcaagccccaagagtagctggaactacaggtgtacgcctccacacccagctatttttttatattttgtagagacagggtcttgccatgttgcccaggctggtcttaaactcccgagctgaagtaatccggacaccttggcctcccaaagtgctgtgattatttgcatgagccatcaccaagctccagcttttacagagaaacacgagaaaagccagatcatacctgtgtgcatagtgaggtgaattacaagagaaaaaaaaaaaaacctgtgtataaaaagaccgaatcttttttaatggatagtacgcatgcctgctcctttgctccagaacagataatatcttgatcatccaagtctgtaataaaacctgtgctttgctatggtagaaggcactatctttgtcttctatggctgtttgctatgcaatttgctctgaaaagatagtccagaccaaaagcagtcagtgcctctgcttgcaaaatgtgcagcaacaaaggagaagcctagagaattgtctcccaacagcttccttatcgataagtgtagtctacattggcaaatattttcattggcatagaaaacacatcagatttattaccaaggaaatgaagttaaaataatgtatttgtcatctgccatgtcccagctactttactaggtactagggttgcagtggtgagagcattctggaaaatctaatggggtacaaagaaatggtaaaataatttctcacatccacttctaaacctccttcttccttccatccttccttccttcctactttatttttttatcctttctttctcccttcctcccttcttcccttctttccttttttcttcctcctcctgtcctatcaatctatttatatttatttatgaaaaaccttctatttatatacccagtactgttgtaggtgctgacaacatagaaataaattagacaaggtaccttctcccttcatggagattgaatcatggtaattagctttcatgcaggtgatgtcacaagactacggcagatggaaacacagagcattacccaaaagaatctacaggggcaaccaccaaacagtccctcatgtccaccgtgccctttgagaagagagaagagaagtgatcgcatccaaaattctgccagcaggcaagggaatgttcccatatgccttttaaactggactagacggcgtgttgttcgggaacatctctattatagtagtcctgctcggagtttgggaaagaattgttcaaatcatacgggaggcagttctttgaaagccccagctaatgttaagagaaaacagatttacaatccgaggccaaacttaataatacataacgaattgcagctctgtttgggaatccccctaggtaccgttcctaaggatttcgagtgtttaattgaaatttcttctgggacagtagtaatcattcacttaagcattatatttatatttgtgcatgaagaaaggaagtcaaagggctaatagaccgactgagtagaatggctgctttcagctgtgggccattgacgagccggcaattctccaaggggcgcttatcctggcgacagcttgcttaggttgtcctccagggactgtgggaggaggacagcactgtgactgacagctgtttcttcctagactgagatagaatacatgatcccagtgtagcccgtttaatcaaactgtttcagtctacaggattaaaaaacctcaagatggaaaagtattccggtagagatttattcttagaaaggctattctttttaccctgatggttaacatagagtgttttaaccccaggggacttgtgccttcatgatttccaaagcaacattaatgagtaactattattctaggagtatttcagccactaaaattggcaatggagtcaaaatgaaagtcatgccgttacaataatactgccttcttggcatcgtcagatttcctatcttctttcagttcgtgatctcagagaattgcattaacttcaactagtttattgcatattctgtaagtcttaagagttgaccccgttgttgtttgctggtttttacaggtacaattttcacctacatacacagaaatacttaaattcaactggtttagtttcttcacagctatattgaggtatagtttacaaattataaaattcccccacttcaagtgtacaattgaattaactttagtaaatttctaagctgttatattctgagttgcgttgccacaatccaattttggaccactgccatcactccaaaaggattgctcatgctcacttgctcccaccttcagctccgggcatcaactggttcaacttcaacctcaccttgtcatggttggtgcacgtcatctaatagatctaggtgtagtttcctcagatgtgagctatagtctgtatgtctgaatacagtagctattattatccttattttataaatgcaaaaactgggatttatagagaccaggaaatatacccaaggtcccagagctaagaagctacagaatttgaacttagtttattctgactccaaagcctctttgcagtgtgccacaccatccctcctagtctgagagtgagctaattgtggatcctactagaaactagagattactcaaaaattattcttgttattattgtgtgcatgtatatatagatacatagtaattctcttttcttatttctcaattatcttattgtaattactatatatacacacacatatactgtatatatacatgatctgtatatgtatatgtacacacacagaatatgcagtatatgtgtgtgtatatgtaaatatatgtatatagcctgttacttttttaattttggtgattgtgttagtgtttgatgcctaacagtgttctgatactagcttaggtaagagttattttctttcacattaaaaaagttatgctatcatctcttttcttatatacatgaagacatctcatcaaaaattgctgtattgaaagacaatattgcctatattgaaaaattataattttacatattggtcagcaagttatttatgtccagctgaatatttaggaatacttgaatttttcagagtttttaaatttatagtacaaataatcagaaatctaacatgtggcatatcagaatggtgtcaaattatatcaatatggactcatacagattttaatagtcagttgtcaacacgtgatgctccagcaaaaggtggaatagggcagtgagaacttttttggagcttccaaaatctgagtttgagtccctgttcttatactggccactttcatgtccttcccttgggtcacttaatttccctggtcctccttgtttgatacaaaaatgagtctgactaaatggcagttattggcatcagccaactcacaataggaagtcaataatttattttttggatcacttagttgtatacctttcctataaaacacaacttcaaacaattcaatactttctgcatcatttgggataaattgaagtgatggaattatgaaaacccatatacatatatatgtgtgtgtgtgtgtgtgtgtgtgtgtgtgtgtatgtatgtcccatatatatggggtatatgtatatatcctatctatatatatacaagatatatatatcctatccatatatatatggaatatatagacaacctatccatatatatgggatatatatagatatatatatgggatatatatatatggatatatatatatgggatacatatgtggatatatatatatgggatacgtatatggatatatatatgggatacatatatggatatatatatatgggatacatatatggatatatatatatgggatatatacatatggatatatatatatgggatatatacatatggatatatatatatgggatatatacatatggatatatatatgggatatatacatatggatatatatatgggatatatacatatggatatatatatgggatgtatacatatggatatatatatatgggatgtatacatatggatatatatatgggatatatacatatggatatatatatgggatatatacatatggatatatatatggggtatatacatatggatatatatatggattatatacatatggatatatatatatgggatatatacatatggatatatatatatgggatatatacatatggatatatatatgggatatatacatatggatatatatatatgggatatatacatatggatatatatatgggatatatacatatggattatatatatatgggatatatacatatgggatatatatggatatatatatatgggatatatatacataagatcaaccacaattaatttcttattcccatgaaatttgaaatcaataatgctgatgactaggtgcatctcctccaggtagtgactgacaacaaagcgtctttcttctggtgacaccaccatcttgaagccacacttgcatcatcagggaaagagaacatggagaaatttcataaggtttttaagttctcttgtttttaaatgacacacattacttctgcttcacaagaactagacacatggcctgacctagatgctatgggttcactgagcaatagctcctgacagggcatagccactttgcagtgacagttctatggaaagggaagcactaattccggtggacagttagttctctctgttgctcaggctaagtctcaaagcagaacatatagaggtgatgaaaaccggaagctgaatggagccttggacatcggagctatttgatattgggggacaaggaatggtgaataacttggtttatttgcctaataatgaagggatggtcctaattagctgttttcaaaagtttgctggccccaagtcattatttaaggggcagctgtaatcaggtcctcacctgctggaggctatcgcagagtccccagggatctgggaacaaaaacaaaaaaacaaaaaaaaaaataaaaccacaatttcaaaccactggatgaaattgctttaggagtccctctctcaacattctctgatttgaggtctttaatatctctctctcctgttttattttttaataaaagtgtatttaagtgatgagtgaagaaaatctagagcaaagactgaagactggcaacttaaaagcctatttaatttggactgtcctttttcaaattttattttttgctatcatttatcaataggtaaatatcacataaaatctagattttaggcttttctagaaacactgcaagatctagcaacataagctccaccttcttaaatgacagaagtctactggagctgaatagcagctgcttttcccaaagggacctgcactctttcctatttttccacaggcccccactgttccttattgccttctacaatggctgagttagcttctttatgttaactgccttgattttgtaagtcatttgaatttgcaaaatgtgatctaatgaaaaattgcgtgaccttgttgaaatttttatctttttcaggtaagcagataattattaaaaacttatgaggaagaataaattgagtctttgattattcttcaatctattttgcatagaaagttttgccacgtgatcctcccctttttggaagacatttatttgtaaaataaatttacaataattgttctcccccattatctgtgttattccctttagcctttgggcttacaggattttaggcttctgctccgaattaatttacgtagtgattttctgttatcagacaaaggatctacatagcaacaatacatatgagaaaagagatgatagcacaatttttataaaaaatttggcaatcttcttcttagagttgtagctaataacgtctttgtgaggttgtgtagtgaaactctgacatatgtcatggttgtcaaagtcggcattaacgcaaaataataagttatttaatataggattcaactttattattttttcaagtaagctgtctatcaccaagttctgaagtggatttctttaaagtctccctgtctccagagaaaaaggggaaaaggcaatgtgtccctggacaggatctatgactcattacgtcaatcaaaccccacttcagaagggaataaagagatttgtatctcaaagcggcgcataacgactcctcggcttttcatttcatatttatgagcggtttactttgaagtgtttatcagccaatgcgcagaaacatgagggaggcttgcccgaaaccatactcatgcctctaatctgtgaaatgctttctgagcagactggctcatcagcgcatgccatgcaaaaataaatacataaataaactttttgttatttgaggtcttggagccatgtctttatataaactataaaaaagggataaatggtgctgaacgttttgaaattggtgtaacacaggaaacttgactctgtaatgtgcaggggggtggtgggggtgcagaaagtttattgcttgaaataaaacctggtagaaagcagacaagtaaaaatacacaaatttttacatacatttctcatctgatctaaggctttgggtccgtccaagtgaccacatgatggcagtgaatagtatatggtgttttttgttgttgttgttgtttttttttttttttttttttttttgagacggagtctcgctctgtcgcccaggctggagtgcagtggcgggatctcggctcactgcaagctccgcctcccgggttcacgccattctcctgcctcagcctcccatgtagctgggacaacaggcgcccgccactacgcccggctaattttttgtatttttagtagagacggggtttcaccgttttagccgggatggtctcgatctcctgacctcgtgatccgcccgcctcggcctcccaaagtgctgggattacaggcgtgagccaccgcgcccggccgtatatggtgttttatttaaaagaaaatttttttggagatgttattttcggagtggttggagagagagcactgccaagatgttgaaaccaaatgaatgaaatctgttttataatttttatctgtactagtatcccatgcatattgtaaaataaataaatgtgtagaagaaaaatggaagatgaagaagaaagaaacatagaataaagtatacattcttgatgaatggaactacgaccttttctctgctttcagtctaactgggttatacattaagcaaactacctgtgtgtttattgagcaactactacactagatcctgggtttacatgggtaaagaccagccggaactgccaaggcagatctggcgtgatgggagaggatgccaagtcaacaagtcagtgtccttatggtgtcacagttcctgagaccaagggccactcaattctctacttctttaaattagatctcttgcttttgtgctcatggctcactgattttatccaaaaagaatgtttaaaggcataagcctaattcactttaataatccacaaattaggtcagtgatttgaacagttgttgggagaaaataaaatttaggagtccataaaccattgtcttataaaaaacagtttcatttctgtttgccctttttctatatattctctacaagctttcccttcaccccctcccctaaaccctcccccatcttccagtattctaatgggaaaggggctttatgtctagtccctggctagagatagttaatcatagaagtttaaagctgaaagtctttatattctagaaagcatggcttgtgagagagtatatagcctttgaagtcaaaaaagagacatgtttgaattgaagtttccccacctactcgttatgtggccttaggaatattatttctttcttttgagctgtatgccttcttcatagttttgttctgatatttttcatgtaaagtgtttataagtctgacacataacacacgatcaataaatattaagccagaaatgtttgttgaatgaagaaatgaatgaatgatgccatccttttcatcccatccttttactttcaaaagaatcggaagcctcaggggattaaggacacatatttgccattgagtacaggctctctaaatgacaaagaaatagttacctctcccctacgctacccctgccaatgtaggtggggtgaaaataaaccatcaggaataagatacgatattgtaattgcatatttctgtttatcttacttattagcttatgagatccccaaaagcaaggacacagattttctgtctgtttccgtagttggttcttagcacacctttctgtctatttgtggagccaaattgaacgaagcagtctgaaacacgtacagtggtgcccgtgggtctgtgtgtgcagtataatggcaactattcttggggagacttaagtacaaagaagcatacgacctgccagatatgcaggaaagtcaaccaaagcctttgtggggtgtgtttctgataatgctgatggatagactttctgaaaggaccattctgattttcttatccgaatggagattgaacacaccgcgcacaagagaaagtgatttggagccaattctgagagagaggaagttgaagcaagaaataagtgtttgaaataataatctgctgctgatccctaaataatctgaaatgagagcacaggaattaatgaggctcctaaccccttgtgacacaggaatagcagacttgtgccagtgacacagcaatttccctggtggtctgctcatgagccgcgagggagcaaacaaaaccattgtctcctttgaaagcaaagctattttaataagggaaatgtggcttctcagatgaaagctcacaaagtgccagatagtgcaaatgtttttcataaagcacctggaaaacctcaccaaagagaaacatctcaatagagaacaattgtcagattggatttaattgcccgtcattctagagatggagcagttttgctgagaaaagttggcattttaaaaaagaagcaatctaaaagaaatgacccttaattttttttttttttttttaaagctaggaagatggctgggtgccgtggctcacacctgtaatcctagcactttgggaggccgaggcgggcagatcacctgaggtcaggagttcaagaccaccctggccaacacggtgaaaccccgtccctactaaaatacaaaaattagctgggcatgatggcgggtgcctgtaatcccagctactcgggaggctgagacaggagaatcgtttgaacccgggagacggtgtttgcagtgagctgagatggagatggggccactgcactccagcctgggtggctgagcgagactccatctcaaaaaaaaaaaaaaaaaaaaaaaaaaaaaaaaaattaaaattaaaaaaaaggcaggaagatgcaagagggttgcatctctattctcagctctgtcagagatatgctttgtgacttctggaaagcccagaaacctccctgttttttgattctcagagaaggtaattcttgtcacttcccatggaggatgttgcatcctaaggcagtgggctttgaaaaactctttgataaacctcctctcggaatgctaaatagtagaagatagcagagtcactggattctgggagatattttgaaaaaaatgaggaaaggcaaggaaagttgcttgcaatgactaaacagttattgagccctgggtatgccttgccagaacccctgagaggaggccaggcactgttgcttcacctctgataatggccaaatggccagagtatttgatgtttatgcaggggagtacactgtttgtgcattccaggatgatatcaataatagaacacagtacccatttctcataagaatcctttgaggaggttggtgttttgattcagagtgattttggccttccatacacatgagaattttatggaggaagcatggctgcattatacctttcatgggccttaggcatgtttgtcttcatcaacccctttctccataaaaagacatttaaaattatatttctccactgccttaatatgaaagcaaatgtattgcttttgtatattaaaacattctctctgacctaaaagtttatttcttttgattttcatagaacttaaagcttttccgtgggtgcctgaaagtattgtgggccttataatactgagcctattgtgtccaatggataagttggctctgggaggaaagctttgttcaagtcgacattttttttaaatctaaatgtatgaattccaatattttgaggaaaaaggccttgtcttaaagatgaatatccttatctgaaaatagtagaaatttgtaacgtaatactaattgattactgtggattcagaatttgtagttataacttatacttcaggaataacatggtccacatggagcacagagccctcgttgctttgactttttcccccttatgcaagagccatcctttctttttttttttttttcttgttgcccaggctggagttcagtggcgcaatctcagctcactgcaacctccgcctcccaggttcaagcgattctcctgcctcagcctcccgagtagctgggattacaggcatgtgccaccacacctggctaatttttgtatttttagtagagacgggatctggaactcctgacctcaggtgatcctcccgcctcagcctcccaaagtgctgggattacagatgtgagccactttgcccggccgagccatccttcttaaggacagtgtttccacattgcatttcagattgtcttattttttaaaaactcaatatagtcaccacaatttaattattttatgtgaatcaaggcaaggctagtgaatgatgacttgagtgctatgtgtgtacgataataaatttgttctcatatgtttttgaagtttattaaatttcaagtagtcctttgattctgttcttcagttgtactaaaacgcctggtctatgcattctctcactcttccagatgttgcttctaagcctccagcacctcctcctcatcttcaatcagaaacgaatttcgaaaccacatctaccatccacacactcccagcttctgtgcccacatactccaccttattgcctatcactctaagtgaaaaacttctactgttatcccaggtaaagcgttcacctgtgtgcaacatcacggtcccactggtctattagaggttgctccaggaattctacctgcctgtctcctaaatgaaccattctttgattccttctcgcacaaaaacctgctgttcttttccctgacttacattcacccacttcttctaccagttactgccacattcctttactacaatttgcagccaatctcagaagagctgtctatcacattgcttctgattactctcccccattttctcataaacacaatccaatcagactttcacatatacccctccacataattgctcttgccaaggtcaccaatgattactatgttgctacatcataattgtccattctcagttctcttaatgacccatcagcaacatttgcaacagttaatcactccctcctctttgacatactttcttcatttagattccattctaccatacactcgtggctttcctcccactgcacaggtcactcctttcttctttttttttttctgtttatagttatttgacccttgtggtcttatggtccctctttccatactcctttactgctttctcttcttcactccaagctcttaataggaaagtgacccggggctcaattcttgatattcttttctatctacatttattccaaactggggattttctccagttccacaatgttaaatagtatgtacatggcaatgactcccaaatctgtatctcgtatatcagacctgtctcatatattcagctaactgatcagcattttcacttatatgtcaaacacccaaagtaaactcaacatctcgaagactgaaattctgatctgcacacacacacacacacacacacacacacacacacacacacacacacaccctgctgtttttacagcctaccccatctcaatagatagtaactctctcttagttttcaatccaaaaatgatgtcacttctaacccctctgtttctaccacaccctgcgtgtaatccatcagcaaatttcaagactgcccaccccgacactctttccatccggacgggctgtaatcgtctttcccatgcaatcttaaagtgtattttaagtggtctccttgattcggttctgccacattcctttactactctttgcagcaaatctcagaagagcaatccttttaaaatgtaaattagatgatgtcatctttccctcccaaaacaatgcaatggctatttcactgaaaccaaggtccttaaaatcacctccaaagccacacaggacccaactgtctccttaactctctgatgtcttctcttaaggttgtaactttgctgccttcattccagccacaaagtcccccttgctcttcctagaatgtgccaggcatgctccttcctgagatctttgcaccattggcttcctcatgcagcaggtattggaaagattaaatttcccaatttacttaagtagtttttttaaagtcactttctcactgagctttcctggatcagattattcaaagtattcatgaatggccttgcactcttctactttctattttttttttcttttcatagtacctaccaccttttaagatattacatacttaagtttaattagattccatttgttaatttttgcttttgttgcgattgctaggggcatcgctgtcacgaaacctttgccagttcttacgtccagaatgatattgcctaggttgccttccagggattttatagttttgggttttacattcaagtctttagtccatattgagttgatttttgtatgtggtgtaaggaagaggtctagtttcaatcttctgatatgactagccagttatcccagcaccatttacaccatggaatactatgcagccataaaaaggaatgagatcatatgagccctttgcaggatcatggatagagctagagaccatcatccttagcaaactaagacaggaacaaaaagccaaataccgcattttctcacatataaatgggagccaaacagtgagaacacatgaacacaaaaaagggaacgacagacactggggtctacctcagggtggagagtgggaggagcgaggagcagacaaaagaactactgggcactaggcttagtatctgggtgatgaagaaatctgtacaacaaaccccggtgatacaagtttactcaaacaagaaacctgcacatgtactgctcaacctaaaataaaagtttttaaaaaattaaacccattatatccaagtacttactgtagataaggcactgtatcgccctaaaaaaggtgtcagatacttagacattatgttaactgtttaatgtctgtttatctcagccaaaatagaagctctgtaagggcttgatctactttgtttgctgatacatttcaagcccttagaaccaggcttagcatttagtaagcaccaataatattggtcaaatgagttaatggatgtactagtgaataaggctctttgcctttgttcttccggcccagggtcgcattcttttaggttctatgtctcttctcatgtattcccagctcccatatggtaggctgtctttctgctcatggtatcctccatttatggtgtgagataatgacataacaatgtatgttaagaatgaatattcattacaggaaaaagaacctgaaaatttctcctactggttctgctgctgtttctactacaattattactctgcacaattttctaaaatattttattcaggaccccctattctggttacactgctaagtgttttctagtcacagataacttttatctctataggcttatgaggataggtattattaagcatgtttcatgaatgagaagactggagattgggagtggaagtttaattagagtgcgtactatcaaaccataagtagtggaataggaattcaaactctgggctactcgcttctacaatattcttaaccacagatgtacacagtctctcacctagggaacaaagtgcgtgggtttcctgacagtatatcagtcatattgtgatttggttatgtgtacttttgctccataactttagcccaaattgaatggaacttgaaaagacatacgaatgggggtatttctatgtagtgtaattgaacatatgagcagggacatgctgagtgatgtgacataatagaaaacattatgatatcacaaataatttaaagtatggaactaggatagacttatccaaggtttttattttcaaaatttttaaattgatttttttaaggaaagtcatagaaaagtacagagaagaaagcgagcaatgagtatcacttgtaattaacgagtgttaatattttgtcaaatttacctcaaatcctctttttttcctaattgcattcttctccctccatctccagaaataattgcgattaagaatttgatttatatttttctagtccaaacttatctctttgctatgtatgtgtctataaacaacatatagcactcattgtatctttcttattgtgtttttgtaactggacatttgtaatttgacatctatccctcttaagaccaaggctattatttctaataattctctactcctaaaattgccactgtgtggcaaatgatggccagagttaaaggccttaagttctttttgtcactttttcaggagacttttttcatctaaacatcttttgtaataagcagtatatgaacagtattatttagcacatttaactctgtcaacagttttcagtggatagtgtgaagaccttttttaaaaagtcataactcgatgcctctggatatgctgaaatcctcatgaagctgttgtctctattatatgtgaatacatccattaagtgttgatagtaatggttgtaaggtcctttggtttatagctctaaccacatagggaatgatatattttagtggagaattagtctctggcattgctgaaactgattacttatagcaccactcaccccatgtatataacaagtgctgatggtgtagtatttcagctgtgatgacataagaattttttttaaccttattgagccagcttctgccttctattcttgaactcctttttgactttggctgtatgtgactcaacaactctctgtaagtcaacagctgccagatgctaagtgtaattaaggctttacatgtatttgtaacctacgacatgtgtttggaacacaggaagcaaggtaggaaaggaagaaaaggaaaactcttgactcagtttcaattatcctctccctgcttaatggatgctaacacgcactaggaagctatggtcttgccattttttataagctcaatggctggaggcttagtatggttttagacaagtatctacatcctaactgtaattggtgatgaggcagttgatttaaaagaattcttttacaaacaagagtatatcattaacatttcccctcaaatatttgtggtctaatatacggtgtgattacttactgaggcaaagtatctgctatacatatattcacctgctgatagactgtgatccatccatctcactagatgtcagaatgtagatgagttaattaactcttgagatctagaataattcttctgtgataggaaagtcaaagtgttttcaaaacatcaagcacatgatggaaataggcaccttggtgagtgctgtaaatgcaagtgtcatgtgccttttggttaatttcagtaatgttagcagcgtctctactgatatatcatactttttgtatttttatggaaaagtaagatattgcattacttaatggaataaacattaaatatatctaaatatatgcagcttaactaaaaactgcattttatttacattgtggcagaataagctgaaaatagaaccccatttcattgcttatcattttgtagttttatatttactattaagagtacaataataataatagtaacatgaataataatagctaatatcgatcgacttattggtgtgtgtgtgtttgttacacacacctacacacgtatttattgcatgtgaccacaagatgcaagtactattattcttccattttacaggtgagaaaatggaaacagaagtattaaatagcttgatcagaacaacaacaacaaaacagtcctcacagcaagtaagagaactctccatccaggcagatttaaaacaaaatagaagaagaaataaaaataagcaaaagtcagaaatctgagcattgaattgttagcccacagtaggttttcattgtgagcaaagactgctaccagaactgcaattgggaaatgacctgaggcttagagcaacaaggacatgaaactgagatttctgtagtaagccaggaaacctaaaaagaggtatgtgttcaacactaccacatgcacattgcctgtgtagaatcaaatacaaattttttagccggcaagaatcccagtttaggcctgtgtgatttttgaaaattaaaataaaccaacatatctaaaattaaatataattaagtatgtaaggatgggcacggtggctcacgcctgtaattccagcactttgggaggtcgaggcaggcggatcacaaggtcaggaggtcaagaccatcctggttaacacggtgaaaccctgtctctactaaaaatacaaaaaattaactgggcatggtggtggacgcctgtagtcccagctactcgggaggctgaggcaggagaatggtgtgaacccaggaggtggagcttgcagtgagacgagattgggccattgtactccagcctgggcaaccaagcgagactccatctcaaaaaaaaaaaaaaaagaaaagaaaaagaaaaaagagaaaaaggaaacaaaccttcatagttaagtgtgagcaagtccataaataattgattttgacctttaaagttttaaaacattagaatttatcatttacatactattaactatgtataatagaaaaactaaacaacaattgaaaagcaatatcagttttataaatgaaatgcaaattgttgaaattaaaaaaagtttagtacataacagtgaatatgagttcaagcacaattaaagaaataataagagtaatcataagaaatcagcaacagactgcacagagagaaaagacataaaaatacaacagaagcatttagagagaaaaagggtagcgtaagatcagctgagtttaattggtgaaaagaatagagtatggaagtgaataaatatataaaagaggcaatgactgagactttttttatattaagaaatcatgaatttacagaaatagaggcacaaaatatatcaagtaagattagaatgctaaatagactggtacaacatacgtattgtagtccttagagcaccactaaaaaatctgtgaaaagatagacaaaaagcctagacaaaatttaaatgaaaattttaaataatttattaactgacaacaattaggcaaagaaatacagagggaggaaaatgcagggagcacaaacaggaaaacataaataataaacctaaatccagtcatatcaataattacattaaatataaattgactatcataccaattaaaagacagagattgtcagattacttaaataacaagacctaattatatgctggctacaaaaggcatatgtcaaatgtaaagacaacagaaaagttgaaagtaaataaatggaaatagatgagtcacacgtttattgcttacaataaaaataagaaagctggcttgactgctttatgtaaggcaaaatagactttaagatcacgagaattacaagagaaaaagatgagcatttcaaattgataaaagggtcaatttattctagggatataaaagtctatgtgcctaataacatagttttacagcgagaaagagaaggaataaaagacaaagcaaaattaacaaaaataaaggaggaaagagaaaaaaaaactacagatttaactcttttctcagtaactgaaaaaatatctagacagaaatataggatatagagaatttgaaaaacgttgttgaccaccttgacctaatagacatttataggacactacacacgagaattctcgtatcacattatttttcaaggaaaaactctgcaatatattctatatgttgtgctataaaataagtctcaataagtttcaagatggaaatcctggagagtttgttttctgtccaccaagcatgtaatttagaaatcggtatcaatcagacaagtcccagatatttggaagtaaaattacacacttctaagtaacctgtgggtcaaagaagtagatgagaaatttaaaaattttggaactgaatgatttgcatgcacaatacattcaaattttgggggtacagataaagaggaaaatattataggtttgcaaatttacttaagaaataaagaaaatatttcaaatcagtggtctacatttctaccgcaagaacctagagaaggatgagaaaaaaaaaactcaaattaagtagaaataaataagataagtgcagaaattagggaaatggaaaataaacaatacaataaattaaagccaacagctgtttgaaaaatcgataaaataaaactccagtaagaatgatcaatttaaaaaaagaaaggatccctcatatcaaaaatgaaagaaagaatactgttagagatttacacatattaaaaaaagtcataaatgtttgtgaaattgacaaattccctgtaaaacacaattaatattagaaagcatatattacctcagaagtctttattagggtcaccatatattgatgataaaatgttcaatccatcagaaagctataatgctaagcttacaacaggtacctataaaataaccttaaatagacacagagcaaacattgacaaaacagtattgagaaacacccatcacagtaagaaatttcaatatgtatcttacaattatagatgggacacaccaacagcaaattagtagtaatgcataaaatgtatagcatgaaatgcttataataataaagaagaatggctgaacattaaagacataaaggatcaaattttgaaggtatagaaaacaacaattgaatgaacttaaagaaagaaataatttgtatacataagggtagaaattgataaactaaaaacatacacagacagtaggtagagtcagaaaaacagaattttttttcttttgaaagaaaaaaaattttattggtgaaaccaattcagttaagaaaaagaaggcacaaataaatattatgaggaatgaaaataaagacagtattctacaaacctagcagaaatttttaaaaagcctaaacaatacatggataacctattgtatttatgtcaacctatttgaaagcataaatgaaatgggcacattcctagaaaatttattgttcctaaattttctaaatcaactcatgacaaaatagaaaatagtaataattctatgtaaagaaataaagcaagtttcttcctctgtagactgatgatcatcataatagctacatttgttttttggttattctgatgcaggcaacaatctaagcattttccgctgctttgtgtcattcagtaccctcctccaccctgtgaaagtaggtgctatttttatgtcccttttataaatgaagtcagcagaagtaattaattctaagactatctggtcgacaagtatttttaaaacagacattctaactcctgattttcttaaccttaggctatatggtgactgttttgtagggctgcttttttaattaaaaggggaaactatataaaagcatttaggacagtgcttgacacattttgaagccttcagtaactgtaaactaacctagtagccttgcagctaactcactactctctctttccctctctttctctgatgaaaaaaattgtttatggaggaagagtctcatatagtcaggtgaatgtacatgtttgtaatgctctcacataggataactgattggtatagtttttaatactgaaattgatttttaatttcgttggaattttcatcagcagaaaaccatctccaactagccaggctcctggacatttcatttttatttatgaactgccagtttttcagcagaacccttttgttgtggctgattttgggttttccaaattgggctttgttcagattggaatgggaaaatgccaccacatcagaggagaatgccaccttcacctttttctttgaaagttataagcttacaggaaaacctaggatactggaaactcttctgtcttcactagccatcttggtgtttccttgatttagtatgtgtttattaacattggaatggttctagttacaaattgtaaatgtttggacacatcagaagatatttatatagattaaaataatgagtctaaaagtttacaaatatcaaaatatcaatctcttaggtgtcatatattaaaaaatgtaattcttaaagcacacttctgaaatataaatatttggcttaaacttttatgaataataatgcatgtacacttactctgttgttttaagccagaggattttgggtgaacagttttatcaacatttgggaaaatatctaaatatgtaaaaacagatgaactttaaaaggtcattaaaagagagtttatgtgaagacttttaggatatacaagcataaaacattagtattcataaatacttcctctggtgccttccaaaatggtgatcattaaatatgtaaatatgtaggcttttatatttgtataaaaataatattttagataatgttgataacggttttaaaccgattattttgtatggctcacacatatctacaattggccaacatttaaatataacatatttaaatgcgagataacaatttggcatttcattttgatttgtcaaacagaaataaaattatattttatcacttacaactgctacatttttcttgataactttctatgggcaaaaacttaaggcatcatgtcaaatcacttcaatttctttgataaaaagtactataacgttataatatctatctttttcttaaatatctgctagaaaaaattgtactccatattcattcttgactttaaaatgtacgctctaacatttgcacaagaaaaatgacccatgtttgtttacaagggattctctttgttttaggatgaatgattttagaaaaaggccgcttaaaaaaggaatcaatattcaaaagaacaaatgtttcaaattaaatagtaaaaataatttattgcaactgtatcttgaaaaaaataaacctaattatcaaaactatatttcagtttgtttaatttcatttactattagaactaggcatattttgcatagttcagtttaaatttaatattattcactatttgaatgatgcatattttttttcaaagtgataaagaataacagtttgggggtggggcatatatagtcatgttacagcaaaattgtttgattgtaccacattatatccttccctttaggcttgcattttgcagcaggatcatagagggtcattttttttccaaaaaatacttgatgagttcattaattttcctaagggcttctcattaaccttttatttaaataattatcaagttgagattttcttggtacgcgatatgaccaatgatttttttactatatcctggccaattgaaatattacattatgaaaccctggatcgtatttaaatcttctgttatagtaagcctcttctgacactgagccgatgggaatagtgggatactgtgtcttgacagccaggtggatgtaaaggtgtactttgtgtatactgtgtgtgtattttgacaaggtgaggaagggggtgcagtgaaagagcgctgcttcgtcgcggcagggcagagttgagattttagaaccctcccctacccccaccccaggcctctgctgatgacaacctcgctgagagggagagagttacctcctaccattcccctcaggtcctcttctgatcatggtggtgaaattatatttaacatttagccttctctgcccccagcaaggagagagggagggctggggataaaagtccgggatccccgcgctggtctccacggacaacacttggtcttttaaaattttactctggtgtgtttgtaaaagtgtagggatggggctccttgctacagcaggctgtacttggggcttgttttgtctgctgccgtttccaatttgcaggtttctctagcaccaggtttggaacatatgaggcaaaaataaaccccagggaactcaccaccatgtagttcctgaggctccaggaccctgttaagtctaccttgtcctgtcccatttttcagaaactgcttatgtgatttttgtatgtaatgtccaggggttttagctgtacttagtgggaaaagtagaaaaggggaacactaaatcttggtccagaaccagatgtctgtcaaatcagattttgaagttcccatcgtcgtgaccacactatttctatcttctcttgttaactgacttaattctgttagattttcgttattctgtgacctttttgatgaactattttttttttgcataatttttcttgacttcatgaaaatctgcaacttcccaagctttacaatctaattatagattggcaccatattactttctgctatcagcaagtaattaattacttagacgttgatacggtagttgatgtgagaagagatactaggagaaagtgggcagggatgggtagggattaattttataagtggtcattcgtgacttttcatgttattacaacttttatttctctgtataaaatgacttctcttaaattcagggtgcttgcataacaaacatttagacaatgaaagttttctgtattgcatacagttagcttttatcttcttgcccttgtagtataaaatctgttccaatgctggcattttcagtgctatttgtgtatcctggtattaccatgacatgataattctgacttaactacatatgtgcttttcctagttaaaggttatttcaaagttggtaaaaacttagaaaataaagccatgatcacaatgcaaagacatatctctccttaaaattgcatcccaaatagaattagtgggtcaaagaatgacccttgaattctgttgcaaaatttctctctaaaaaaggcatggaggctgggcgcggtggctcacgcctgtaatcccagcactttgggaagctgaggtgggcagatcacgaggtcaggagatcgagaccatcctggctaacacggtgaaaccccgtctctactaaaaatacaaaaaattagctgggtgtagtggcgggtgcctgtagtcccagctactcgggaggctgaggcaggagaatggcgtgaacccgggaggtggagcttgcagtgagccgagataacgccactgcactccagcctgggcgacagagtgagactccgtctcaaaaaaaaaaaaaaaaaaaaaaaaaaaaaagacgtggagaggatctggattatacactgtggttacgatcaagaaaagacaatttaacgtccaagatatttatcaagagagttattttaagacttgtgttcccctcttttgatcactgaacagtttttagacattaacattctctcccaaccttaaattacactaaaattgctttatgtaaatattatagattgcatgtaatcgtttatctataaaaatattgattctggccttgataatgtaccatggggccacactgggtgagttatcggcaacagccatagagcacatacctgaaataaaatgtattggcacatcatctatatgcacttttatcagtgatatcaggagactggaggcagatagaagataaataatacatatgtattccatgaatactgatatattgtgcctccttgttatctttctgaaagatagtaaagaagaatgaagggttcacggctttccactagaaatcttagcttggagaatcacacaatgagtagtttctctctttcattcaaagctgccacagagcttactgaaaacataattatgcgagatgaattagggcaaaatcagtctcccatcgatgagcaaagtaagtgcaaaacagtaagttgagctagtattaaaaatgcttccatactaatttacattctgagaagtctgtatagaatgcagggcttcttgctgtaagataaaatacatggaaaacaatggttggaaatcaatccatatagaagaatatttgggaaaactgggtatggtatgagcaaactgaagtaggtatgtgtgatagcttctcaatagagtaaatccccagtcctttggagtgttcaccccaaactagatgaacagctggtgaacaggctgtgaaggcatgaggcttccttgcacctccttgacctgtgcaaggcatgaggtcaccttgcaccacgatgtgacctccatggctccctgttttttttttttttctttcttttcttttttttttttttgaaacggagtttcgctcttgttgcccaggctcaggctggagtacaatggcgtgatctcagctcaccacaacctccgccttccgggttcaagcgactctcctgccttggcctcccgagtagctgggatgacagccatgcgccaccacacccggctaattttgtatttttagtagagatggggtttatccatgtttgtcaggctggtctcgaactcttgacctcaggtgatcagcctgcctcggcctcccaaagtgctaggattacaggagtgagccactgcgcccggcctgttcttttcctatgtaatatttatcactgtatggattgcactttgtttatgtgattctttgattaatgcctttttccccgattagactgtaaatgtcatggactatatttttataatgcacactgttatatccctgatgcctcacacagtactaggaacaataaatatttgttgagtgatttaataactggatagacccatttttatttctttctcctgagtatatggctcaccagcttcatatgttaagccagcatacctggaaaaagcttggtccagaacctgttccaggtattaatacttacaatgaggttcctattctttaagttagtggagagtagaaagataccaaactaggaattgtggggaaatggtggcattggcaaggagtgaacctgttggaaagtgaagatgaaaaggtaattttaaaaaaaaatcaatattgattttagaggaaaatcttcctttctatataccaatgtaaacatactcatttagcttttcctggcaaattcagcacagaccttccaattttctttacaatgctgttcctttgtggctcgggggctataagcttgaaggtgaaactcttaaagtgcactttttcttttctaacatttgtggttactttttaaatgtatgcaaatcttacttgattcctgaagacctcaagtttgttttctcataaaaataagatttcaatttcttatctcaagtaattttaactaaagaaggggcactgtgtgtactccatgtcctcccatggccctcagcccactgttacctctggaacccaggccaaaaaccacatgcagtgctcttcacaaagcctcctgtcctcatacaacttttccttctttcctgaggaggtctttgaaactagttctagataatgagatgtgggaaaaccatgttaaaagttgtcttaatacacacccactccattttaaatgggattacatagctacaaatcctcacatgtggaataaaaatatgtgttttagtttgggttttcatttattgtgggaaaatgaagcaacatatcttatgactctgtccagaaggaacttgctctctaaggacaagatggaagaatattaatatcaaatgactttttttcaatgacttaaggatgagaaaagcaacaatagaaagatcttgtaatattgtgtatacacacatacacacatactcagtaacttcattttcatagactactgagactgaaatataaattttaatgtataattatgagacagtaccaaggatgcaaactggaacagaatactctgggcagagaatttcagagagcatgataaactgtacccagggaataaacagcagcacttagcagtgtgctgatggcagagaggacttccctcttcactgcacaggtagtgggtaatcaccccatgctgacaggaacctgcacttgggttagctctccaatgaataagtttcattctgaagagacaattatgtatagaattgggcttgattccatttacacaaccaaattaggctgggaaagctcagtgttcagtgaagacaagaaaaaagctcagaataaaaagacatatgtctattacaaattaaagtcccactaggttaatgtgagctacacagtggtttggtggtttgtaaaataaaaggtaaaaaatgatatcgagtatgtaggctaccatagagtgtcaagttacatcaagagtttagagacagaatgataaggaatgatcttaatgtaatagatatacgtagagtgggtaaactcttggctttggtgttatttatgaggttttctccactcatagcagagaagtacatttcttcactgcatttttttcattgtcataaattggttaaagacaaaagaaatcagcattatacatcagtaagtagagtggaccacatgattctatctgttttgcatggaaatcttaaaacatcttttaaggagccaagtagtaagcacaaataaataaactgcaccaaaatgttgccaggtttgcttttgctggagactgctgacactatagaagcagcacaagttgggagtctgcaggtacagaggtgaacctggatctgctgtgtgcccaggtgtgaccttggacatggtgtttaacctctctttgtaaagtggtgatgtcaacacctaaaatgctgggctatgatggtatttaaatggcataaagcctaaaggtatctggcccattttctgacacctaataacacacgtttatagaacatgacaacgtgttcaataaaaacctattctctttgctccctgtcagatcatgagttccccctataggtccccatgtgcacacattcactttccgtaagtgaggccaacttgtggctttaaattgtgttagcaaagagagattctttgataccatttagaaaccaaaggactagctcttcatccctaggatgctgatttcagtgacacattacatatacatacctaacataacctcatttctgccaatgatggaccacatatacaacatggtcttgtaggattataatactgtatttttagtgtatcttttctatgtttaaatacaaagatacttgccactatgttactttgcctacagtattcagtacataacatgctgtgcatgtttgtagtgtaagagcagtaggctaaacctaagcctaggtgtgtaataggctagaccatctaggtttgtgtaagtcactctgatgttctcagagcaaacatcacctaaggatgcattgctcagaacgtatccctctctttaagcaatgcatgatagcatttattaaaaacgactagtttggcacatgttatatgaggcacacaatcaccctgagaaaattttaagagataaatgcccagatattatagatgagaaaattggggttcgtggagttaagggaattaccataaatgagacttgtcagtggaaactaggacgggcacccaggtcttctagctgccactcgtattcattagagggttaacgctgtatgacctgaaccttaatctgatccctgcggagggatcagatccaggtattgcgaccatcaagatgcatggccttggataagtgccttaaatcctctggtccccggtttcctcatctacaaaaggattacagtaatattatcatcttcataaagttgcaaaacattaaaaaatataaaagttgcaaagtaaaatgtgcacaagtaagcacttggtgtatattagctattttgatacgttccgggttttttcagctacatggagctacctagacaacagggtcaacatgcctaaaaatctctgaaataaaatctgagcattttgtcctatcatcgatatttactttctttcttttgtttgtttttcaaaggtatcccactgtcctgaatactcttgtccaagatctgtttctgtacaccatggtgaatttgatgtatctgtcagatgggaaaagtggctgcttttttgtaaggataaattttaactttgtaaagcatctcacaaattttaatcagcttctctgtcactgtcaccctaggaaccaacttcacccttgccgaactgggcatctgtgagccctccccacaccgaagcggctactgctccgacatggggatccttcaccagggctactcccttagcacagggtctgacgccgactccgacaccgagggagggatgtctccagaacacgccatcagactgtggggcagagggataaaatccaggcgcagttccggcctgtccagtcgtgaaaactcggcccttaccctgactgactctgacaacgaaaacaaatcagatgatgagaacggtaggcctgcttcttaaataccttttaacgttctgtgcactgcaccacgtggggctttgaatgtttttgttttttaatgaagcggcgtcataaaaccattcattttctttgaaatcgaccttgtctacccagtgtgagctggggggaagtaaaccagcaaccctccagcacacaagaaatgagaagagaatttaaaaatcacattctgatgataacacagcattcaggtgtagtcagttggtcttattagcaagtaaattacattgcaaaagaggcggcttgataaactatgacctatacctagaaaatgtcctctctccacaagtttctaggtctttgtattgatttccccttcccagtaaatggaaacctgggttattttttttcgtgacgatctcttaagaatcccaccttatcttagactttcatttccaggcggcaatgcctcatatccgtattgaagatcaaacttggaacaggtgctctggagcttaataatgacaaataggaagagacttgtcttcagaaaaagaattctttatatgtttacttttccccttggcaactatgtaggttaatggtttcccccatcttctgtcacaaatcactattgcctatccatcagctttctaggtggattttaatgaaactttgaaaattaaatccttccgatcattaagcagtaaatatagagaagcctaagcaaagtcattaaagagataaggtgcttttttgtgggtttctgagcaattccgaagtgtgtttagtcaaaaacatttttttaaaaagataaattgcattaggttacagctgatttaagacgaaaacatcaaatgctatgtggtttgttatgaatagatggcatgtttgctaaaagaattaccattaccattaaaatgtttacaaatagatcagttaagaatgtttatataaaatattagaaacttctgccagagcagctttaagtatttcctttcatttaaaaaagaaaaaggaaatttgcaggtggacagcttgttgtgaatgcaaaagcatagctaaatatcatttaatctcaaaactgtgttgaaaatacatcatttcctgggtaagtcgcacatactcaaaaagatgtcacttttttgaatttaaatttatgtttaattttgaaataatttattctacagtggggacaaggggatgtgtcttacttatgcctccgttcatgtagctaatcaaggtgtactctcaaggaaaaatctgtacttgactccttttgaattttaacaaaattctgacacttggcacatttgacactctgaggtgcttatttaataggaaattacttttagaagtttccataaaagcatacgttgaatccatttactggtgtcctttttcagcttcattgtgtgtgtcatatactatttaaatgaaggcaatttgattgcctaataaataaaatcacttgtaatccaagaatttatggcacattttaaacaaggaattttagcaagtccctcatagttggtattcttatacctatagagggaaccgtctatacagagttatttatacatatttatagacctgcaccttctcccatttaagttatatgcatctaaaaaactcatctaataagggagggtttctggtgaagccaagggcacaaaaaatgcttgccatgaatttacctaggagagttatggatgaaaaaaatctgaaattcatcatatatttggtagaccaatagtagtttcatttttttcatattatttgaaacatcgtatttgaataatttttactttctgcgagtctatgtaaatccctgcatactgataagaaataaacccttgatatagtgtcctgattctttcctacagtactagttgcaatgcagtcagaattacatgaagagaaatgtacttagaagcactaagcaactctgtatgtgagtgtggctggcaaggcacaaaggaggtattgaagccagagttcaaactaggtgagagatgcttattttaaaatatacaggtagaatgtctttgtttttctttttaaaacattttttcaatattttacatattcaaaagaggtacataatgtatcttctgttctcattcttggccagaaataaaaataagaaattttacacatcacatcataaactctttaagcaaatacaaattgaagtgtgagcaactctgcaggcagaggtgttaacttcagtaaacttcttgctctttctctctgacaaattctgtttagctcacaaagaaatcaatgctttttcacatcactgattttatgaagtttgggaatgtattatcatatagattgacagttgccccactggttccacaccacggcatggacacttacaaagccatcattaatttctcacacttgtacccagtgatggcttcctccataataaacactgtgtccttcagaaccaaatcaataaccttttaggtatgcctttcttgaagaggaagtaacaggaatctatactttgagaaagaagctctccaatttgattttaggttttaaagatacatggtcagaaaatgaatcttttctgtggggttccatatgttttaatttcatttcttggtgggattttgggataaatggatttttcaccgtgtttacttaaaaatctcccttaaaaaattccagttgtgattttgctaagcatagttaatgagtgaagacagatctcagaaaccaacttcctttttggtaatatgaagtgtatattcagtctgcaaagtcatatagtaaaatctttaattttgccaacagttctccctagatcaatgttgattgtgcttcctacatgctgctgtgacaaaaatgacccattggataacttgacagtcccatcaaacagatgaacctgtctttcttttctttcttcttcttttttttttttttttggtagtgtagacaccatagtgcttcatcctacactcattgatttagcctctgcattaacattgtgctggcttggattgggttgcttcaaatatataaaactctcagattcatgttatcttttcaggttctttaatcctatcttgaagtcaataatgatttggctagaaatggcaatgagagttgagaacagcccggccaagtttttgctgctgtgaaatttgaaagggctttcctagtaactttaaattagagtccatacttttgttcaataataaatgtcccacttaaaatatgtcctctctaaggccatttgtattatatgagttatggagaaaaaggggtagtcagtaatacagaagaataactaattgcctccttaaagatgcaaagcagcacaaactaaaaaatcttgtctatgttctcttgactcccttaggcgatttcttcaccttgggacttaaaaatttccttttttttttttttttccttccagcagaattctagtttcagttattttattggaaatccagaaagggaaaaaacaaaaaaacaaaaaacaaagaaaataaagttggtatgaaataggaagctagaaatggcagtaagtgaaatctggtgttggttaaacatttaagaaaattattcttcccctcccctctccatgtccacccaaagtaaataagtacaatgttcattttcatctgttgtaattgggaaatttacaatcctcataatgtactttgaggttgagatataaatgttgggttaattccattgcatttcacaaaatgcatttataaaacaagctggctctgggcacgtaatggatttatgtaaagcgtatttgtgaaacacagattctattagattgagtccttttggcaaaaggtctgtagcgtatctgtctcctcggcagagttccaacacacccaggtactcactgcttgttaactgagacatgaggaatgaagcctgagggaaggaaggattttccttagcaccggggacaatgtccttagattgttactgccaaccaagttgcattcatttgtcatttaaggtgagttacttaaatttttctcctttctctccagaaagcggcctctcaataaatctagcattggagcgtttcttaagtaaacacaaactaaacatgcgagtggaattctatttctactcccactctattactcttacatgctcaaattaactttgtattttataacccactctactcctttcttctccctaatccctcacgtaaaatcacagagaatgcctggaacagacataaaaacttactaagagctccagacctagccaaaggcccataattttgctgttaaggaagtgaaaagtcagtggtaagaatagtgaaagaggtagctacaaaaagcatacattcatatttgactgtgcttgatgttgatatgggatgatttcttttccagccacattttatgaagccaatttccatggaacctaaagaaaattgtctcaatttcttaaaaacaaaacaaaatttaaaaacataccaaaaaaaaaaaaaacccagaacaaagttttaagccatttggatgacattgatttcaatttgtgtttttaggctttattttatatacctgtacatttaaaagaataccattataaagaagagtatgaaatgagttatcatggatttaaaaaaacgaaggacacagacacaaaatatcataggttctgtgttttccattcctaaatgaaagaatgatctcctttacatttttctaattcaattccctcaaagtccaggtattggaagctatagagaaaacttatttttaaaaagtttattcatgggagtcttaatatatgattactatgatgctaaaacacagctgataataacatacaaccagaggcaaaatgtaagaatatcacattgtcacatggcatgatatgaaagctagaagtgaaaggattgatgttctgcaaatggactcgtatgagactttagaggtttacgtttttggcaaattaagcaattcttacgttactgtaaaggagaacagagtacttcaaggagcgtaggagcctgtgccttatttcagtactgcactttccagattataaactttagtggcatggtctttagttatttatatatttctttctttcctttggtagtttctttcatgtttgttaatgctcccaggggctatcaaggaatggctccattcaataaatacaataaataaaatgaagaactaagccttccttttggcaagggcagcctgattattacatgtgtaatctccaggccttcagggacacattgggcttggtggataatcatttggttttaagctgctgagttcctgatatcagtactttaacttcagttgagttgctctttttactgcgaaggcagtaaaatggtaagaagcaaaatgtttttgtctgttcacgattggaagcctcttcagtcagaaaactctttttttgcttattgttcagtcatttttttaagtttagttgttgtttgtcaatgatcaaattaagtttatctaataggtgggagagatgtgccatgcattgagaattaaggtcataaataagatgagttaaagctaaggaagttgatagtataagttttctacagacaattgaatcagaagaagcctgctcagaaaataatatcaaagtaaacgggttagagaagaatgtatgaggagtaatgaggcacttcaattagccattcggaaactgagacatagcaggtagaagaaaatttcaggtattaataatagatttgtaaataggatggaaattccacatatgtggccattatgtatataggcttatacatgaaactaaaaatgttacttgtgatttaattttgagtattatttaagtgctagctgtgagaaccttctagaaaattattctttcttgctttccatcaactcagtttgagtaatgttaaaggagtttaaggtgtggctaagtggcttatgggatatttaacaacagaagttaccaactgcatgttagtctacaggctgaatccagtttgaattgtttaatttgcttagtgcagtatcaaacatttttagattaacaaccaacattttaaaagtaagagattttatattagaaatttttatttttggccgttctcaaaacataagaagattcagtcacactggttcaggttttggttgggacagatcagattagaagcagtagcagttctggatagattccatgtctttgaggtcacctgatcttcctccaggctacactgttgtttaaggtctgacttagcctttgtagtcccttgagttatcaaccctgacctacatacagtctttatggaaatcagatataaaaattgtagaaagctagaactcagcaattttatgggttcatgtattcagagctagaatgttacttcttttggtaagtttgctccatctgcaaagtgggtttaattttgctctactaaatttctaaaatggttttaaggcatttagatttaaatgcttcagataaaattaaatcaaattacaatcaatttaatttggaaagtaataaaatgattgtatatgtggggggtgagtttaagtgggtaatatgtcaactccattttccgaagtagtagatgccctgaagtactgaaaaattaaggtcagagtatttgatttaacacataattttaaagctattttaatgtaaaagtatttaggtggactatttggaaatagatggagggaaaacctactttaaaaactttagctacttcagctgattgaagaaaaccccagggcttttcaggaggaagccatttaaagaggaggaaaatgactttgtgctaattatgttcagttttgatccagcaaatggtttatggggtctgtaacaatgaagttggagacaataaagcgaaggctagaagagagacatgcagtgatacacgaagacctccagtatgccaagagagaaagacatggagcaatgttagctaatgctgaaatgggaaccagcgagtcagaaacaaacagaacagcgagtgttccacaaaccaggaatgttcttcaaccagtggataagcaggatagccaaggaacattcaggagtgactctcactccccatcctcatttcttatttgtgaagaagaaaagataactgaaatatgagcatgtttcctaaggaaaggggactgaaatatttgagtaggcattctttgaaaaagagtaggttaacagataacctatgcagagttataccattctgaggggaataaaaaagataaacaccatggcagtctttccatctgtgttaatcatgagaaaaggggcctgaactcacttacagtgagaaagttaggcactggaggagttttgggaagtattttttgtagtattttatgcaagaaatagactatgacacattcaataatcaaaaaggatctttgaaaggaatttttaaagaagaaaattggtgtttgaaaggtaccacactatgcttagatatgaacattttaatatgcacacaaatatataaaactatgtgttgttttattcaatattggtgaaaaatagaaaagtactctcagatgaagagttgtgttaatttggggtggggggacttatttctgaaaagatttcaagtaattgctaattgctctgcattggacgaagccattgtgtgtatgtctctttgtatttgtgtgtctgtgttgtgtgtgcatggtggggaaggtgctttgttgggaagagggatgttattgagagggatagaaatcaataaatataaattgaccaaattccagggaaatgaaggccatatacgaaaatgccaaaatgagcaatgtagacattttgtagcatatagttttggggggagagagagaagagaaacctgtgttgaccttcgtgggtcttgaactctatgggtcatcttacatcaaggagcatgccctttaaagccttggatcccttaaaccaatgatgctgtctcacccatgtaagtcagaatccacagaaaaacacccatgttttctcaagtcccacagaagaactcttgcctctggggagctctgaaccagttcgaatctgtcagataaatatttgacttggtggggaatccgctttccttgaaatatgtccctcttcctttcccaactttcgtctttcccccaacatcttccctccccacctgcatccagcagggcctaatcacctactccatgagctaatttttttattattacattctgtcctctcgttaaaactagtgagatcatgtctctaagatatgatttgagcatcatgataaactggtgcaggataaaaaaaaaaaaaaaaaaaaaacttccgtataaatgtaccttcattttcccttgttctttaaaattttaacttttgaatatgttttatgatgcaagtaatttattggtatatgtatatacacacatacacttgcacacacatagcatatatgaacaggttacataaatacagaaatgtatacattggagatgtgtccaaaaggcttatgctgattgttttagaccttttatttcccaggtctaattaagcctaagcaaccactcactcctcaaaatatttggataattcattattttgtggcaacctgtttggttgtctttgtattggtaatgaccgtatgtgctaatgatacctaactatgttatagtaaaatttgtatttttttcttctaattctctctgctgactttcacttcctagatgaatagacaaaaatattgactttgttgtttcttgaagaaaccaagcactcctatgcatttacagagacattcctgtctaacctcaatagggagagaagaaaataaacattatatatgttagcatactggtacagtaagggaagctttgagaaggtatggttttaattaggttgtaaataggggtcgggacttttatgtatggaaatgagatgatggatattctaaatgaagaaaagccagagtgtatggtggttggagaatgggaggtgaggtgaagatgatgatgatttttcaggggacactttctagtctagaaaaaattccaactccagtcaggataatgggaatatagtgatttgattgagtagcagtagaaatagatgaatagatgtgtagcaatcagatgaccaagagctgtgagcttcatcttaaggagttaaagtctgatcaagcagataatacagaactattgaaagtttatgtgagcaaagactgcaatatcttaggaagcatctgattaaaacacacagatacagcgcgtgcacacgcgtgcgcgcacacacgcacacacacacacacgtttggatggaaagtaacaaagttagaagtgatatcagaaagagaagcagtagtccaggtagaaggactccagaaacccttataccacaaagagtctacctgcttcttagcatttcagtagcagaaattaacctctgactaccatatgaatgctgaatattagtaactaagatgataaaattcaaaaagcatataattttatgctgaatagcaggaaaatgggaggaggtacataaccccacactcccgcagtacagggagtgttccttacagtgcaatctattctgcttacatgtagaatacagtattacaacaattagactccagtgtttataatatttaaccaaatgattaaataataaagtagcatcaaatattgctttgcacaaggaaagaagtcataatattatttttaagggcacagtaagtgtgttgtaggtgaacgttggctagaactattccaggttgattaatagtttcttgaatattatttctgcttctatatccttgccgcttcttcatgagtcatattctcatgcaatttgtttaattgctcctgtaactatagttatgtctcccttcttatctctaatcttttatatttttatctctcatttttttaatcagacttgaaagagatctattttttttcaagctttctgcttgtctttatttactttaatttttctttctcattacattcatctttattgtattttttaatttcctcattttaacttttggagtatattgtggggtttttttaggtttaatttttttttttttttacttccataggttattggagaacaggtggtgtttggttacatgagtgagttctttagtggtgattgtgagattttggagcacccatcacctgagcagtacacactgcatcctatttgtagcattttatccctcagccccttcccaccctttccccctgagtccccaaagtccattgtgtctttcttatgcttttgcatcctcataccttagctcccacttataagtgagaacatatgatgtttggttttccatccctgagttacttcacttagaataatgctgtgaaagctattaattcattcctttttgtggctgagtagtattccattatatatatatgtgtgtgtgtgtgtgtgtgtgtgtgtgtgtgtgtgtgtgtgtgttacagtttctttatccactcattgattgatgggcatttgggttggttccacgtttttgcaattgtgaattgtgctgctataaacacgcgtgtgcaagtatctttttcatataatgacttattttcctctgagtagatacacagtagtgaaattgctggatcaaattgtagttctacttttagttctttaaggaatctccacactgttttccttgctggccgtactagtttacattcccatcagcagtgtagaagtgttccctgttcaccgcatctattatttttggattttttgattatagccattcttgcggcagtaaagtggtatcacattgtggttttgatttgcatttccctgatcattagtgatgttgagcattttttcatatgtttgttggccatttgtatatcttcttttgaaaataatctattcttgtccttagcttactttttgatgggattattatttttttcttgctgatttgtttgagtttattgtagattctggttgttagtcctttgtcagatgtatagattgtgaagattttctcccactctgtgggttgtctgtttactctgctgacttttccttttgccatccagaagctctttagtttaattaagtctcagttacctatctttgtttttattgcatttgcttttgggttcctggtcataaaatccttgcttcagccaatgactaggatttttccaatgtcatcttctagaatttttatagtttcagatcttagatttaagtccttaatccatcttgagatgattttgtataagatgagagatgaggatccagtttcattctcctacctgtggctagccaaatatcgcagcaccatttgttgaaaagggtgtcctttccccactttatgtttttgtttgcattgttgaagatcagttcctgcaagtatttgggcttatttctggcttccctattctgtcccatttttatatacctatttttataccagtactgtgttgttttagtgactatggccttatagtatagtttgaaatcaggtaatgtgatgcctccagatttgttctttttgtttggtcttgctttggctatgctgacttttttttggttccatatgaattttagaatttgtttctaattcagtgaagaatcatggtgatattttgatgggaattgcattgaatttgtagattgctttcagcagtatggtcgttttgtaatattgattatacccatccatgagcatgggatgtgtttccatttgtttgtgtcgcctatgatttctttaggcagtgttttgtagttttccttgtagaggtctttcacctccttggttaggtataatcctaagtgttttgttgttgttgttgttgtttttgtggttattgtaaaaggggttgaattcttgatttgattctcagcttggtcactgtcggtgtatagaagagctactgatttgtgtacactaactttgtatccggaaagtttgttgaattcttggatcagttctaggagctttctggaggagtctttagggttttctaggtaaacaatcatatcatcagcaaacagtgatggtttgacttcctttttactgatttggataccctttatttctttctcttgtctgattgctctggctaggacttcagtactatgttgaagaggagtggtgagagtggcaatacttgttttgtttcagttctcagagggaatgctttcaacttttccccattcagtattatgttggctgggggtttgtcataggtggcttttattattttgaggtatgtcccttgtatgctgattttgctgagagttttaatcataaagcgatgctgggttttttcgaatgttttttctgcatctgttgagatgatcatgtgatttttgcttataattctgtttatgctgtgaatcacatttattgacttgcatctgttaaaccatctctgaatccctggtatgaaacccactggatcatggtggattatcttttttatatggtgttggattcagttagctagtattttgttaaggactttaatatttatgttcatcagggatgtcggactctagttttcttttttggttatgtcctttcctggttttgatattaaggtgatactggcttcatagaataatatagggaggtttccctctttctgtatcttgtggaatagtgtcaataggattggtgccaattctttgaatatctggtagaattctgctgtgaatctgtctggtcctggacttttctttttcggtaacttttaaataccattttaatctcacttcttgttattggtctgttcagggtatctaattcttcctgatttaagctaggaaggttgtaccattccaggaatttatccgtctcttctagtttttctagtttatgcatagcgttcatagtagcattgactgatcttttgtatttctgtggtgtcagttgtaatacctcccgtttcatttcttattgaacttatttggattttctctctttctttagttaatcttgctaatggtctatcaattttattcatctctgcaaagaaccagcttttgtttcatttatcttttgtatttttttgttgcaatttcatttaattcttctgtgatcttgggttttttctttcttctgctagatttgggtttggtttttttttgtttctctagttccttgaggtgtgatcttagattgtctgtttgtgttctttcacactttttgatgtaggcatttagggctatgaactgtcctcttagaaccacctttgctgtgtcccagaggttttgataggttgtgtcaggtcattcagttcgaataattttttactttccatcgcgatttcatttttgacccaatgatcattcaggaacaggttatgtaatttccatgtacttccatggttttgagattccttttggagttgatttctagttatattccactgtggtctgaaagagtgtttgatataattgtgttgtgctttttctaactttttaaagatgagtactaagttttattactctcattctcccttatgttatcagagtaagtatatttatcaggtcctatagaatttgataaaaaatattgttctctgtgttactttctaaagatcctcagcccatttggactctcaaaataaaacagaatcctaatgctaccagtttttcactttaatactaacaatttctgaaaaagtccaatttttattgttaaatctttatgctgcccaaagtaagatatctatatgttttatatgcattatttatagatatacgtttgtattaactatataacatagaattatgcaaagcatatgtgcgtatatatatagtgcatttaaaatatatatatatatatatatatccatgcatataggcatgaaaaagaataaaaatcacctataatttgacaccaacaataactatggttaatattttgatgcatatatccttcagtctgtgtgtctatctgagagaaagtgagagggaaattaataattttacagagttggcatgttttacatgccctatatagcattattttttttggaaataaactaaaatcatttccccatgacattaaatattttctccaatatttaagagggacatagtactcctttaatgtaatccatttcctcaatttcctttcattgtacatttaactaatttttattttagttgcagtaaagagcaatgtgatggataaaatccttatagctacattcctgtggacatccctgactgttttcttaagatgaattcctagaagacttagaacatacacagttatgtgaaattgcaatccttttcaaccagtgtcctcagaggaactcttgcaccagcactgtgggaaaatcaacaggcacacggaatccttgagctcaggagtcactgggaatgatcattaatattttaccaaattacggatcgaaatatttttattctggcttcccttcactttaatctgagcaactcttcatgtattcattgtctacgtgtattttttatttcatgatttgtatttcttctccatatggaaagatagtgggacgatgcatctcactttttagtttgtattagctttttacaatgtctacagtgatcccagatcaatgtctacagtgatcccaggtcctattgtaccttattgtttatacaaatgcttaaaaagtgttcacttattggtgtgaagatcacttggctgcattttcaaaagcatgcgacttattttctgtgggatagaacaccaaatgtatttacggagttgatttggtttatcagaaatcagtgctaactagaaagcaatttaaaattgttgcactgaccaaagaagaaatgctagctctgagtagagtggggaatttctttttccatattaagtatgtcagctattgtttggaatgcaggactttatatcagattgttaatttataacaaaccaaggatagaattgcattccacatgatgaaaggaaattcacatctactaagacagtctgcaaggcaccttgaggagacagaatcgagtaaattatgtattaaatattcttaaaacttcctccatctgcggtgcctttgattcaatgaggttagtaatcataaacacagtggtggccctgctattggtattttcacaaaataggtagttctgcaggcaagataaatatctcagtacataagaaaagactctgaaaataagcatgtggaagcaattactattataataagcatatggctctgctaatatacagtgttgcttaataattgatatagaaaaaaaacagtagaaacatttctatattctggggcattcccttgtacatttagaatggaaaagaccccagtgaaatgcagaacaattaagagagtacaggttgtcttccatttccactgatacacatttatggctatgaacaacaaggcacgtcgagaaagcaggaagtatacaaatcaacttaatctgtcccactgtggtatttcaggccctccacaatatagtccaattttatggttttagcccttgctcccacttctcttctaaatatattttcagctccagctcaactgagctacttattttttttccagagcatactctcttcctctgtgtcgttgttcaccctgttctttttggctgcagtggtatccccaaacccacctacccatcacatacctatccattatcaaagaattatctaaggtgccatgtcctctatgaaatcattctgttttccttaactacaggtgtactcccactcctttgaaattttttttaacattttatttatccatttcatcaagaatttaggggaaatggtgtagccttcaccaaagtagagaagtaaatgatttgagatgaattttggagctagagtatacagaacttgatgatagtttgaatgtagtagttgagaaaagaaaagcaagagctcttgggtgggcatagtggctcacgtgtgtaatcccagcattttgggaggctgaggcgagcagatcacttgaggtcaagagtttaagaccagcctggccaacatggtgaaacaccgtctctactaaaaatacaaaattagctgagtgtggtggcttgtgcctgtaatcacagctactcgagtggctgaggcaggagaactgcttgaacccaggaggcagagtttgcagtgagccaagattgtgccactgcactccagactgggaaacagagcaagacttcatcaaaaaaaaaaaaaaaaaaaaaaaaagcactctcaaggatttctaactttagccactggatggattcctaagtattaagatgagaaatacttgaagaagataggatttggggcttattcattttagacattgttaagtaagacaactaagtagaaaggcaatgtggataattgtgtaattattaagactggaacctaggaaaaagatctggactggagatgtcaatttgagaatcagcagcataggagtggcccatatatatccaggaaagtagatgagcttacccaaggggaaaggtagagagagaagaggagggagccaggagcaaactctgagtagtccttaagtgttgggtggagagactgaaatcagtggtttgcagaaggtagttctttgttcattcttgttggtgtgatttttctttagggttccctgatggcttccggtgttggtgtggcttttatcatctctcaacccacagtcttttttcctttccattattctgtttcaaaggaggcaagactggctgagcctcatcagtacaggagaaagagaaaaggaatttaaaaagggatagggtcacaggaacaaaaataaataagataagagttctcatataattgtaaactagtttgatggttgattttatgtgtcagtttgactggaccgtaggatgtccacgtagctggttaaatgttctctgggtgtgcctgagaggttgttgctagaagagattagcttttgaattagtggactgaggaaagtcaatggtctcccccagtgcaggtctgcatgatgccatccactgatggcctgaatagaacaaaagatagaggaaggttgagtttactctggctgattgtttaaagtgggacagcggttttctcctgccgtcagcatttctgtctctcaggctttcagaccaaatctataccataacctctccaactctcaggccttgaaactacactacgggttttccccagcttgcaggcagcagatgggatttctcagtctccaaaatcatgtgaggccatattttataatatctcttcattagatatatattctattatttttgtttctctggagaagcctgactaatatgttgtctgtaatttcaaaatgtatcgagtaattcatggcaataacatttaactacaaacttttattgtactcagaatatttatttagttagttattgggcatctattgtctattatgcttagagtatattcattaacaaactagaaacacattttcctctccatgcgggtggatcaggaggtcaggagttcaagaccaacctggccaacatggtgaaaccccatctctactaaaaatacaaaaattagccaggtgtggtggagggcacctgtaatcccagctactcgggaggctgaggcaggctaattgcttcaaccaaggaggcagaggttgcagtgagccaagatcatgctactgcactccagcatgggcgacagagcaagactccatctcgggggaaaaaaaaggaaaaaaaaagttaatttttattaggcaataaaaaatgaacttgaaataaagaaaaaagagagaaaatagaagagagggagagataaatagaagggagggatgaaggaaataaagaaaaaactatgctatgtagtgataaatggtatgggaaaaagaagacagtagaaatagataggagtttgtgattgtgagagttttgcagtagtaaacgggagtcggagggccaaggaaaactttattaaaatgctgacatttgaatgaaaacctcaaggaacagagaaactagctgtgaaagggaattgactatacagatttcaggggtgtggcatttcagtcaggtggaagagctagtataaagattttaatgcaggcacactcctgctgtatttaaggaagttaatgtgattgcagcagaatgcaaattgggcagaatagcaggaaaccagaacagagaaatgaaggtgaagtcaggtcatagagggtgtcacagattatttaaaatggtggcctttgctctgagggaaataagcatccagacagagttttgagcataagaatgtcatgatctgacttcccatgtaaaaggatagctctggctattgtgttgagaatatagtggaagaagacaagagtagggagaacaggaggctattgcagtaaccaagacaagagatgacagtgtctgtctgggacaatagcggtaggaagaagtgatctgattctcaatgtattttgaaggtaaaggtaggagtatttctggatgtattggctgagaagtgtctgcaaacaattccttgaagattactctcaatcctgtgcacattttaaaataaggctatatggttttctgatattgagttgtaggagctccttatatattttggatattaactccttaactcatatatggtatgcaaatattttctctcattccgtagattgcattttcattttgttgctagtattctttgctgtgcagaagcttttgagtttgaggtagtcccacctatttttgcttttattgcttgtgcccgtgatgtcatgttcaagaaatctttgccaagaccaaagtcatgaagttctttcccaattttttttaggagattcacagtttcaggtcttacattttaagtctgtaatcatttcacatttatttttgtgtatggtgtaaaagataaggatccaaattaatctttttcacatgtgactgattcttctgacatcattttttgaggagactatcctttcttctttttgtattcttggatccttgttgaagatcagttgactatataaatgtggctttatttctgggcattttattttattctattggtctatgtgtctgtttttatgccagtatcatactgttttgaacactattttgtgtgtcagtttgacacatagacttataaataaatataaataaatgtatgtatgtatttatttagttagttagttagttttgttctttggagacagagtctcactctgtcacccaggctggagcgcagtggtgtgatctcggcttaggaggcaacctctacctcctggggtcaagtgattctcctgcctcaatctcccgaatagctggaacttcagactcacgccatcatgcccagctaatttttttttctatttttacagacagggtttcaccatgttgcccaggctggtctcaaactcctgaacttaagtgagccaccagcttcagcctcccaaaatcctgggattacaagtgtgagccatcaggccaggctgtaatgtattttaaaatcaggacatgtgatgcctccagctttgttcttctttctcaagattgctttggctttgaaccaagattatggttctacgtggattttaggattatttgttctatttctttaaaaaatgtcattggaattttggtagggattggatgcattggaggtgtagattgcttttggtagtatggacattttaacaacattaagtcttccaatccatggacatgggatgccttctcatttatttgtgtctcttttaatttcttttataaaagttttatagttttcactgtacaagtcgttcactgccttgagtgagtttattcctaaatatatttttgctgctattatagtgggattttttcttagtttccttttcaaatagttcagtgttagtgtatagaaatattactaatttttgtatgttgattttgtatcctgcaactttactgaatggtttatcagttctaacaggttgtggggttgggatatttttcttttgtctttagggttttctgcatataagattgtgtcatctggaaacggcgatagcattacttcttcctttctaacttggatgccttttattcccttttcttgtctacttgctttgctaagactctcggcattatgttgaatagaaatggtaagagcatgtatccttgtcgtgtccttgatcttagaaggaaagtttttggtttttacaaagaagacattcaaatggccaaaaatatagcaagtcttcacttaatctcatcaataagttcttggaaattgtaactttaaggaaaacaaagtgcagtgactcttgaatgatgccattttgtttgacatccctagggtataaagttgatgagaaaaaaaatgatgtggttatacatcctttcacttaaactcagtttccaggaacctatagataattttaagtgaggacttgctatatatgaaaagacactcaacatcactaatagccagagaaatagaaatcaaaactacaatgagataccatctcatacccctgttaggatggccattatcaaagcagtaacaaaagagataagtgttgtcaaggatgtggagaaatcgtagcttttatatactgttggtgggaatatataaaatgatacaaccactatagaaaaaaatatggagtttcctcaaattaaaaatagaattaccctatgatctagcattttcacttcttggtatttattcaaaagaattaaaatcagaatctcaaagggatagatgcacccccaaagtcattgtagcattattcacagtaaccaagatgtggggagaacttaaatgtccatcagtgtatgagtggataaagaaaatgtggtgtatacatacaatagaatattattcagccataaaaataagaaaatcctgccatatgatacaacatggatgaaccttgggaacattatgtgaagggaaataagccaatctcagaagaacatatacagcatgcattcaattatatgaagtatctaagataatcaaactcataaaagcacagagtagaatgaaatttgccaggggttgaaagaaggagaaaatgggaagttgttgattaaataggggtgtcagtgaatgacagcaagaataagaggtaatgtggtgataaaatctgatggcaagagatgcaaagctgaggatgtctacagagcagtgaagcatcatgctgtatcaaggacaagaagcagtgtgtatctcttttatatattcagtgccagtggcatgagggcacagggaggaaaaactgccaccacctgtaactactccagggaaagtagtgtccttaggaagaacaagatttctactggagcgagaccatgaaatgagcatttggagaaatggttaagacttttttcagtgattgacatacagagggacagtagacatgacaagggcgaaggcagacagtgaaggtaaggctttgaatgtcaagggctagggagagatgcatcttgggcacctttcttaactcctgatgatggatggggttagaagaaccagcaaaagtgtggttcagtcctggtggagagtttcattgttgatcctggagaaatatccccaatctatttctcaatgaaggcagtgataaacttttgatgctggagaagtaatggaatcttcctttaataaaaagagtcaagatgtccttggtgagtgcagagagaaagaagaaacattttctaacacactgtaagaaatcttgaatatagggacaacatcttatttatgtgtgtttccaaaggctaccacgttgcttgtcagaatgagtcacaaaaccatggaagggagggagggagaataggagagaatgcaggaaaatgaagaaaggaaagagaaaggaaaatagaaaggcaaactcaaaaaaaatgaaagataagaaaatattatcttgttaaaaccatactcatcaggagacttaagtccttattcatttaattcaacaaagtttttctcaaaataatcacaaaaacattctgaaaattaactaatgaaagaaaatgatagtgaaatcatttataaaacaatgtatatggacccgtgattgataggttttgttgcaaaccgagcattgagtatgcgtgtgtccatgattcaatataaaactgacccttctcattttgaagagataacaattttcttattttgaagagattaataatgtggtgaattaacaaaccatcatggaagagattgagagaaccatgggaaggtgattatatcataccttgtaaagaaatatgtatcttattcatagggtacaagatactgtttctattcctgctgaaagagtaggttaagaaatggtatctgcaatttgaagataccagaatagcaacttgatctcatatatctttgtttgcttctctgaaattcgcatcaagaaaaagtctctaaaacatgtctcagaatcattttctctagaatccactaagtgggctttacagctttaaaaatatcaaagatttatattactatctctcctaggaaaactgtgcctatgaccatagtcttgtttcaacttccaatgtatttttatgaagaaaatatgagaactatatatactccatgcactgtgatgatgtaacatactaatgggagaggtccaagggcttagtagaaaaagtctagagatgtaatttcttgtcctagctctgcgactaactagctatatggccattactattccaagggcaacagacctaaatctctctgggtgtcaatatcataatttttgatatgaagacaatcgaggctatagtgcagaaattttggagtcagatagacaagtgtttaaaccttaattctgtcctttatcagctccatgacattggcaaattaccaataagatctcaaaacactagtttcttctgcaaaatgtggataataattgtccccttcccttattctttccttctttctttccttctttctttctttcctttctttcttcctttctttctttctttctttctttctttctttctttctctctctctctttcttactattttttttttttttgagacagggtcttgctctgttgtgcaggctggaatggagttggcaccatcttggctcactgcaacctctgcttctcagattcaagtgattctcctgcctcagcctcccgagcagctgagatgctgagattacaggcatgcaccaccatgcccagctaattttggtatttttagtagagatagggtttcaccctgttggccaggctggtctcgaactcctgacctcaagttatccacctgcctcggcctcccaaagtgctgggattacaggcgtgaggtgctaggattacaccagcacccagccccctttcccttattcctgttatgattattaaatgagatgggctagtatattaagctcttagcgaagtgcctggcacgtagtaaacaattcatgcatagtaccgattatttttggtgttactgtttttaaaataatttttgccatatttagtcaatgtagactgctttgaaagcttatagatttatcacatgcaaatgattaaatgtgatttctgtgtctccttcataacccttggctgtcaggtccttgggcagatatgtaaatccctgctcttgaatcgatccgacattaaaggcgatggggattagataattttcacttaaagtgactgtcctctttttctgggaacctgtcacaagcgggagttctgcctcgtatatcaaaaaggaattctagaaggtgatttcatttttgctttcattttgttcttcaaggaaagggagttaaatattaattaagaagtctaatccagtaaatatagagatgcaaccatcccagactcacagagttgatgataaaaggagctgtgaaagggatcaaagccaataataagccaggatgagcagagcgaggagcgagcgagagatgtgggatcaaaatatgcaagaagcccaactgcaggctgtagtgcagagcgcctttaactacagcagaacgctgcagcatcactcattctgaacacaagttatcaaacatttattgaatatctactacatgctgagaactagaaatacaaagataaatttcacaaaatccctgcccccaagtaattcacatcctcagaagaaagtcctaaatggtgacaggaggtggcatagcacaataattaagcacatttctttggaatgagactgtctgggtgtaaagctcagttttgtcacttcctagcttttgggatgtggaaacgacttcatctctctgagtagagttttctgcactggtatgatggaagaaccaagtcatgactttattgtgaagagtaaattagtaaaatatttgaaatgggctcaatgtagtatctactacctggtataggcaacattttacatagtatgccatgattaaaggttgcacaaagaagttaatatttgggcctggctttgagctagaagaacattgttcttgtaaagaaacagaatagatcacatcttaagctgagaatacaaagatactgtaaattcagagctcttacatggtatgatcgggaaataaagaaatagtggagtgagagagaaattgaaagtgagaaaggaaaatactagaaagttaatcctgagccagctcttggaaaatgtagaattgcatagcaaagtattttgactttaccatggaagcaaatgtgggtcaccgaaggttattaacaaaggagtggattgattaaatttgcatttagaaaaattattctaaatgtggaatctacactgagagaagcaggacttgaaccagaaggaggaattagaatgccaagagttgataatggtcccatttgggcaatgagagtgatgggaaggagtgaggtggaggagggaagtttcagaggcaacttgacagggattagcaactggtccaagtgggtagagacaggttcatagagagagggaggattctagagtgggttttaaggactacaagtaggatgactaggttagagtatagtcaataaatgagatggagggtaggaggagaacatctgactgggaaacaggaagtttggttttgaaaaatatgaagtatatattttcttgggcttctgatgaggatgtggaaataggcacttggaaatgtttttatggaaataatcagaacgtgaatctggaaattaagataagaaaaccatcacccatagattataaatggggctacatcaggggatgagatgactggcagagggaatataaaggtaccagggccaaggacacgaccctagaaatgctcccttttaggggacaatccaaggaaggtgagtcagtggaagagatggagaaaggatactcagagaatagaagggtgaatctatcctcttcttggcagaagggactattaagtagagcaaggtcaaccatgccataagccacaaaatatttaattaggatgaagaatgagaaaatgcctttggatttgacactggtaacatctgatggaatattctaaagtgaggtccttgtaggtgcttgattaaaatgcctaacaaaggctgggcgtggtggctcatgcctgcaatcctagcgttttgggaggctgaggcagaaggattgcttgagcccaggaggttgaggctgcagtaaactgtgattttgccactgcactccagctcggggtgacagagtgacactctgtctcttaaaaaataaagaaatttttacaaaacctaacaaagaggagggtataaaaaataaaagctgagcgaacactacgtcctgtacatatgtagagatcttgcattttctgtactaatgcctcatatacagtagacaatcgaacggtgtctgtcccatgctgtacatatgttgaagttttcaacttcactcctttgcctaaggagtgatgctaactgacaattttcatcatattctgtccaggaggaccttgatccagggcaaggatgcttatggacaggagctgatgcttggaattcctcaaattataattctaaaaattgtgtttgttgagaatcatgagcagccagtaagattctcataatttatatagcatttgaggattattattgaacaagaagtctttaaatttttaaaaggacaaagtgtaaaatgttctgaataaaaggctaacacacttagcttaaaaatgtagtgcctctgcaagcttaaaccgtgaattttaatcaaagccactgccctctttgagggagttactcagaagttgcatcagattgttgatgataaataggcttcagcgattcatttaaataatatttttaaatctaagaaaacccctattttccagctttaggtatggaaataaattatcctattagaacactgacattctaaattttgagaaatagcataaaactcacggacgaaatcagtttgtattattgttggatagttagggttgttttcagttgtaactttctcttgtctttgtcatttccctaagtgacagaggagaaaggaaggtggataaaaacagaacttatagaggatatattctccttcccaccccatgtcacctccccaaccaacaaatgcatatttaatggcccttccctcctttactttgattatttaatcatcatatagtgctacagcttttttaacagtccctttaaaataagagaatattgtcagtaccattttttaaaataagagaagcagttggttttgaattgagacagacctgaatttgaatcccatctcttctaagtaaaagctgggtggtcagctgattttttaatctttctgagattctccttggtcaccagttaaatgacaaaagagaatataaatatccattttaaaaggttgttgtgggattatataagctaatgtattatatgagcactgcatcttccttgggttctattctcaaccaggaggtaaaatcataatcataggtagaaacatttacccctgacaaatcccttaaactggctctaaatttgagaatgcatgggttcatgcatgcagtcctattcagtgagaagtatgtatgaaggtttaatgcttataataatacacagaacataatgatgtgaacatgtatcaagtatggatatatttagagttttgagaaacacatatggtaagcaagagttagaaggaaatgacatgtctgacttatgaagagattaatgtctcccatccttcattttggctgaagtgtagattctctctttctccttctcccatcccctaacatgagggaattttccagtgcacatagaatggacatcatgatacaccaaaggcatgccacagttcctagcacataataaatggtaaatagccattcgtatttttaatgtcttttattctcctatagaagggattttcaaacgaaaactgctctgtagcttaacaagggtttaaagagacttcagagccagcagcatcagaacaatgagacatgcagccttgttgcctaattcactcttgggtgaccagtcttaaatgatgcaatgtgaaatcatttcaattaattttggtctgtctctgtagtcttctgagggccttataaaagaagtatatgcttaaagctaatacacaggaaggcctgaaagctccaaactgtgcagcttttggtggatttgaggtaaaccctttatgaggaacaagagagaatggatttgcttatggttatagtttctctctctaaagatttaccagcttagaaaatatgtatatatgcacatatgtgagtgtgtgtgtgtaagtgtgtgtgatagttattattttttttaagcaaaacaaaatttccttaattcatccctgatattgagagaataatactaatacatttgggccatttgtgacttctttctcaaaaatgctttttgggatgccaaaccaagctgaaatgtctgccacccttgatttttggtagtaaaaaaaaaacagtttgaagtagcctgaagacgaaacataaatcaatgttattcatagcttacttatgctatgctaatatatttgccataggcaagaagtactcctaactaataaacttactttaaatcattagttgaaatgtctggatattccttctaatgatttccccagcttagttttgtcaatgcttcgcaggtcttcatgccttctacctgaacgtatgggtcatggtagatagacagaacaaaaaacttttataacattttaaaaactgggattagaagatcctaaaaccttgtctgagtgctctgctgttgatttctcagaggagtaaaatatacgtggcaacttcttcagaaagaacatattaaagttgaagtataaggatttttagatcaaaaggataatgattttttaaaatctttactatgtgataaattattctgaaggcattataaagatgtacaagcttgcaccagggaataacacagaaagttggtggtgactttgaaattagtatagacataacactaacctccttccttccttggccaagtttctttatagcatgatgccacaactgttttttttttttttaagtaattttttcttatcaccaaaagattttctttttcttctttaagtgatatacacaagaacggctgcatgttttaaaacatgtggaacatgataggctcacctattttccctctatttaaaataatggtttcatagagaattgtaaattatttctcctcttaactttcatgaagaaaatgacacttatattttaaaccaatttaactctcaagatgtgccatctgtgcctctcctcttgtctctaggccaagagagtgttattaagcttgaggatgggtagaagagaagagtggcagagagaggcactggaggtgtttgagagaggcatgaggggagatgaaaggcccgtgcaattggggaatttcctggtgcatttccctgagaaaaaaactaatgatggtgatttggggttatgaaaaatgactgaccgtccatcagcataggataagatcagaagattcttcataacgctagatacaggactcctgaaggcaaataatatgattgactatcacatgggtctcatgcaaggagagttcatacgagttaaaaggataaaagccctggtgtagcccactggggagagataaacctttgaaggaagcccttttaaccacattcatcagtaaggccataagggacttccttggaagtttatcacaattgcttttgcatgaaactgtatttttcaccatggtctccaatgaagataaacccagtgctgctcatatcattgaaatctacagtggagatctacaatgaccctctccatgcgtgttggtcatctctttctgcttcttcatgccctgctcatgtttcttcatgttcctcctgcgacttattttttgtaacagcatgattaagacataattcacataacgtgcaattcactcacttaaaatacaaaattcaatggtttctagtatatcacaggcttgtgcaaccttcagcacaatcaattttagagtatttttatcaccccaggaagaaattcagaactcttagcagtcattcccattcccctccacaactgccagtcctaagcagcatccatcaatctactttgtgaccatagatttgcctattttagacatttcatgtcaatagaatcatgcaatatgtagtattttctgactggagtctttcatttagcatgatgttcttgaaattaatccgtgccacagaatgtgtcagttctttattcctttttgttgacaaataatattccattgtatgaatatagcatgtttattttttttcattcatcagttgatggatatttgtgttgttttccttatgggctgtttctttgattttttttcttcttggcatcgtgtatgatttccgaatagcatggtgcaaaataggccttgaagtttcctgcatctgggtgcaaactccagttctgctgctgataagcaatggggctctggtcaagttatgtgacttttgtgatcctttatttctcattttgcataaatggacagcccacagggtactgctcatattgccccttggcccaatgtgaggatataataactattgaacatttttttcatttattgaatgagtaatcacataatatgagccttcccaaggagctcttatatattgtttataaaggtaatctgggtaatgccgggctcttacactctattttaaatcaagcaagtgaaggcttcagagacatctcttcgtattgacagtgtgctctgcaaaagattcagcaaagctccatgagaactgtttctgttcatctcttcctaactcagcctcaccctgtaattttaggacataagccccacagacttttaccttagatatagtgcaattcaaacacacacacacaaacacacacacacacacacacacacacacacgcacacagagatgccaaccattcctgagaaggaacttgcagaatcttccatttcatagcattatctgttgagacagaaataatgtgattgatttgccaggtcatccaggatttcaaaaacccccaaactaagccattttacattttagatccaaagtgttgtttatcataggctgttaagactttctcattttaatttcaaccagagaagaatacattgaatataaacagggcctcttagagcagtcagagagcatactgagagtttctctagtaatagagtcaaaaatagtgactaaccaagtctttaagtagaaatgctacccctaaataaatgcttctaaatgagatggcaaaaacgaatagactcttgtttaattaaaggtacttgtaaagtttgcttagagtttgcagtaatccaccttgtcagttctcatccgggatgtttaatgatgggtttgctttagtttccaaatggaaatcagctgctgcttctttacagcctgacattaggcaccctgtggaaattgtattattctccacatgcatattcatagaattaagtattatcaatggacttaaagagctcaattattttttgcaattgcatgcttagttgcttattctgaagtagagtagattgagtatttcggggcctggtcaaatccttgaaatataaatgtgaatgtatatcagcagaaaatcaccagctttactttatcagttggattgttaagacaattgccaacaatattatcccttgatttatagttcacaaaatgtcttctgttataatgagcatagtttttttcctcacagaactctgtgaacaaaaaagcattctacagatgaggaaactgattgtcatccaagaagaatctcttatctaagattgtataagtactgaagcaagattaaaatctagacattcctgacttctagttctttattgcattttctgcatcctattgcttccctggggaaggtcttatttctgtatgtttggaaatacctacttactttagatttttattttagcttgtgtatgtgtcatggtggtgtcattttaattaccaggccactgaaccacatggacatttggtaatagacagaatgctgcatttccagatgctagagttagtgtaattcttgattaataatttaatagaaaataaggtgtttgtttacaatgttaactaaacattcaaggaaaacacacagcagcaattgagatgagaaaacacagaatgcaaacaggaaaacaaaagaaatgaggatggattaattctacatgcagttgaaatataccacctgctttgcccttgcttttgggacattcaagttcatctctctttctccagtatcattgtcattgtgttagattattactgtggtttgtagagctatagggactttgtgagcagtgatctcaaactcaaatatctataagaaccagactaaaaatataaataactgggtatatgctggttatagatacctgtatctatgttctgcaagtgatggcatctttagcaaactagaacataggtactagttaaaggagctgagctgtgttcccagctggttgttgctctcttggaattagtacagaatttcccagatcttgtaattttccaagtaagtccagatatcaatatattttttaacactgtgaagtctcttactacctgaattaattaaatctaatgaaaaagaatcttttgtagaaaaaaaaatggccagatgtggtggctcatgcccgtaatcccagcactttgggaggctgaggcgggcagatcacctgaggtcaggagttcaagactagcctggccaacatggtgaaatcccatctctactaaaaatacaaaaattagctggtgtggtggcacacacctgtaatctcagctactctggaggctgaggcaggagaattgcttgaatgtgggaggtggaggttgcagtgagcagagatcatgccagtgtactccagcctgggcagcagactgagactctgtctcaacaataaccacaacaaaaaaccacaaactggcagaaattggcctacaggccatttatttccaacttcactcaaatggaccttcctcctagaaaggaaaaccatcctcatttaatattaagggactaaaaatgaaaagaggtgtcagtatatacattctgatcacatccgtacttggaagttcatacaatgaattcatcaaactctcattcttcttctggggaaatatctaaactccattgcatttccttattccactgtggcccattgtggattgtgtgttatatttgaatatatcaaatctagcaaattgacattgaaaaccaaacatatcagagacaaactatagaaacacaatagagaaaataaatccacctctgccaaagtatgatctttccaatcatttcaactcctaaaagtagaaggaagcttggaactggaggtgttaaggagtttgcttggaaaaagcaatgaaataaatattgctgtctttcaagaatatatatgtctaactcacctcagggtttggacctgggtgttgaatgaactgaggatctctttggcaagaagctctagtagatgacaaattcttactcttgttgtattgctcaaagaatgccccctacttcttgatagcatttctgaggtgccagagcttcaggtgataaatgacatttttattcttgacatgttactctttattatatcattgagaaataaagttcaataagtgacttctgataatactttactgcggtctttatgaaagatcgattccattaagtaggtacatttcagttgctattacttcaagtgatgccataatgtacttgaaattcagtctttagttaataatagcaagcttattgagtgtattagagatgtgctaaagtacttacttttgggcctggtatcagccaagacatagtattttagacttgcaggctttccatgtatttcccccaaaatcttatacatatatatatataatttaatatgtatctatagtgtatatatatgtctaatatatatatgacagagtatcttacatatggcatagcattttattatatatgtcatggtgttttagacctgtatgctttccatgtattttctcccaaatctaatatatatatatatatatacacacacacacatacaatttttgaaatgcaaatatgtgtgcaatcattttttagggtattatcatttaatatactaaggtaacctcattgattaaaacttgaaatatgactttactcgaagtcacttgggaaatatattgatggtcatgctattcataaaaatgaactcaagtctacctgtctagaaactgagcaatgtcacttgaaaagaatacagcagtaagaataagaaactaaaccaattatagtttttacaaataattattcttatgatcaggagtaatagttgtgtgcagtgaaaaagggtgtaatattaactaaagactagagtttgatttctctcagcttttagcactcaagaaaatgtgatgagaatgtctgggctaagcaggatggataaactttaacaaaaaagttgtaaaaacagtacaaggaactttcatatcctgaaggggcaattttaaaagtaattgtgaaattttaataacatagggaagtactcattcatctattgttaagttaataagcagcctaaaaattggcttacacattatagaaccaattaagctttaaaaaaacaaagagaaactcacacagaaaggagactggaagcatgtgctcaaaaatattaacagcggcatgcatacataataggattatagatgattttatttgtgtttttcatttttctgatttgttaaataataaaaaattcctgtatgcaaagaaagcatgtttaagtaaaagtatattgtattggtagtgttaaatgtgcttgtgccatttttattcaggtaggggtgtgtgtgtttgtgtgtgtgtgtttctgcacattgataatagcaaaataccagttgtatcagtgatccatgatgaaattgttaacactgatgatgctatttcactgtggaattttcttgtgatgttgagaatcttctttgttagtttttttagaagtaaaagcttatcataaggaaagtatcaaaaaattaggatttgaaatttgtaattaatattaatttaataactcaactaaacaaattacaaattttaggatttcattatgatgtagcttcattgctttagcatgaatttctctctaccatcagaaaataaacttcttacctgtccagtatggagcatgtagacaattttgtggccagcatgaaatttttacagtgatgataccagcaaacacctccaagatataatgtcagatctggttaatcagtatgttaaaatatgtttgaatttgtcttgattagaaaaatagcaatcaaagcattcaactcttttcacttgttgagacagatggcctatctttatgaaggcaaatatccaaaaacaacaacccactaccttatctttcaaaatatggtgctcagaatcatcttggaaaagagctatttaagcctaataagccatatgcttgatgaattgatttattccattttgtagtatagacataaaaatcttctttgcagcatctttatcatatctgcattctctgcaactcatttataaaaattagcaaaacttccaaataaggaataaattattatagagaattcagcttctgtgtcttacaaaagaaaaaaaaaaatgtgtctaagtgaacagtctctgatttgccagatattctccccataaagttctgtgtatttgaagagcaaataaactgacagcttccttggtatgcataaagcaggtctaaaattattccagaaagaatccctcagagaaatgcaacttccctgtcattcttatgtattatttaaggtagagattgaccatgggcatagaagaaatatacaatgtttctgggtcctaaaagaagagagttcatatactttttaattttatgtattttaagatatatgtcagtgcattgtatttagcatggaaaagaatgtcctatcaaaataagcagctactcctgcatgtagtttagtggcaaacccacctattaacctctagccacaaccaaataaccccacacttgaaacctgaggttgattagatgaacctttgttccccataaaattctttaaaattatacatttcattaaaagaggaacatatttggtcaacttagaaacacattgttgtgcaatagaagagcatggctttgttattagatggagatgcattctaaatcggaatccaccatttgcttaactgggaactgctgggtacattatataaactccctgaggctgagagaggataggaaactgtgatgaggtaaaaaatcaaaactaaattttaaaagtaaagtatacttgacttttgcatgggatattatacttacataaatgtggctatttctgatcatctgaggtactggatttccaattattagatcaattacaaattcctttgcccaataaacacataatatttgagaaagtctttctttccactttaattgtgaagcataaacaaaagtgtaacctttgtggagtacgctgagtctttaactgaaagagatggcgtatcattgttagaagagagaccaagaagttggtctaaattatcagtctccaaaggctatgatatttgttacccaagttgtgtctgtgtttgtgtgtgcatgtgtatatgtaggtgagagtgtgtgtgtgtgtgtgtgtgtgtgtgtgtgtgtgtatgtatgtgagagagagagagataatgaggaccaatttaagacttagcttaaaatatctctacaggattccaggagattggatgaagtttaagttatgaagtaatctaggaaacattaataactctctctgttggtctgcaaaatcatgttattaaaactcaaaccatttggcaagaatcatcatcaatgtatcgaatgcacctgaaacaatcacgagttaacttttccatctttcaattatcatattcatgtctaaatacatttgtgttgactgactgctgatcaaactacatgtgtgcggaaaaggacaaaagatagaaatgtgaatgttggaaaaatacttactacttaaatgcaagtattttgataaaaaacattatcagtgagctcaccaaggaaatgttatctgggtgctggattggtaaagaaatatctagctatcaaattgggtacagtgggatttaagggttcacctggaagctctatcaaaagtttgcttaactctagcagaccaccaggatccctctggttccagtgggcttttagaatctccaaagctcttagacttgaaccacatttcgtttttggaaacagactcagaaagaaagaggaacaggagcagctaggaagtgtttttagtaatggttcagaaagtggggtcccaggagcagcagcattatagcctgaggagaaaagagagggacttgttagatatggaaattcttcggccccactccagaccacctgaatcagaaactagggttagcaggccgggcaaggtggctcacacctgtaatcccaatactttgggaggctaaggtgggtagattacctgaggtcaggagtttgagaccagccatctttcagtaagaaacatgattactggaggatgtggtataccacctaggtttgtgtgcaactttttttgccgtgataagattatctattactcaatcttagaagtagcaaaagaaattatggaatgctttttaaggcatacttcttccttgaatcagtaatcaaggaaaaactatggcagggaaaatagaaaggttaggcaatttgtatttcccaatggtttgaaaaaacagtggctgttgcatttctgctaaaggctgctaaatccaaattgatgaaacttttggcccagccttgcagaattccctttgaaatgttttgtcatgtctgtcagtttagtcatagtttaagatgttacatgtttaacttagggagatgagtgcagagtctgaaaatatgtcatcgaaagcaaaaaaaaaaaaaagtgacttcaatttatgacaaaaatacagcagagggactgaattggaatcttcagagagcatgagtatttgagcccctgccaaatgttaatccctttcaatggaaagaaggattagaaatgtacattggccctatatcttcatttaattcaggactactagttatctagaaacatttttgttattgtgtctaatttcgcactatttttggcatcattttcaaaaacctttaccctggtttatttatttattttttggctctgatcatcagtattaattcaattctatttgttttctacataattaaattgttctatgtgagcatcaatctattacagtgttacaagttagttcattgtttcaaggaggtaatgttagtatatctctgaaataacatgtaggtctctgattgagtaatgaaatacgatgtattcaatttcttctctctatttaacctacctggaaccatgtttgtcagactaactcaccacagagtgagcatggataaacttgtatgaggtcaaagcccataccactgaggatactaatataaaagattaccaatttgtgacaccttgctattgcattattatccatgcttacgaggctggttgcagtgagatgtctaatttgaattttctgaaccatgcctttaaggctcacatacctgaggtatttatccaaacacattgtaggtttacctccctcaaatatccagccatccatccgtttccttctgagcagagcaataaaaatcaagccagaccctatgctttacgtatagaaccagtaagatttacagccaggctgagtataaaatcataaaactttcagtacgtggttaatatataaccatcaaaataacagagtgcaattctaaatttatgaggctgaacttaacactgaatatcaaataagaatcacattgatctctgtagcggatgacttaaaaacacattaggtggcataaactgcaagacagtacattgatttaagcataaaatgcatagcgctcaatactttaccacctaacgtttctcagtaatgaacaaagctgttgtatattgatgaaaggaaaattatttgttttgttatattacagtgctcacagagatgccttgtatttaggctaggcaaacatggtttgaatcacatttagcaaagggtcacattggatggacattttactgaatttatacttgtttctcaaaataactgtacagaagcattatcacgatgacagttttctcattttctcttttaacagaggaaagattcataccaggtagatacggactttttgtagaaatacactttactgtaagttttctgataaaggcaattacatggaattttaaggttgatctctctaagtgcatgaaatgatcttgtaaaattaccatattcagaaaatctaaaagcatattttaaaaagaaacaataattttatggtaaatacatattttataaaaatctttactgtagaaggatctttaaaaaattgattggaatgaggaatattaggaaatgttaatagctacaggtgtgtccatgtaatatagatagcaaaatggataaaattggttctgatatggggtgaaaaacaaaagctaacactcggcaagtgatttagggtgatttatggcgtgatttatggaggtagtaggggccctggttcgctagagagagagcacccacttctcagcttcctctatctgattgttgtgtctgggtgtatgaaaatatcagatcttgggatctgcaataaaagtgagacatacagatttatctgtgaagtctcctgattttaaaacactaacagatgatttaaatgggaaataagaggtactgatcaaatgtaacctatcttaggtcgatttccagcactcacactgctggttaaagatcactcatcttcaggcttctgggaacgttgcttcatccagaggagcaagagttatcctttctgttggtggaaaaaataatcagtggaagaatccgatattcaaattttcataatttgcttgggaaatatcaccttggtacatcagttaatattttactaaatgagctgtgttgtattataagtttccatcaggcgggtggtagcttcaagactttggtgagaaaagctcctttgcaagttggttctctttcctcacaagtatccacaggtaaagaattttgccaggactcagagaacagcattcactcactgaagtgttaatggcaaagcaaatctaggtgcaaagttggctgacaggtccgccacaggaagatttctgtctatcaccatttcaactgtaggataggtaagtcccttttcatgaaacagtgctgggaggaaattgtatcattctttccaataagtgactctttaaatgaaaaaaaactactacagctttaactttacattcaaataaatgatatatgcatatttgtagcatgtattttacctgttgtacactttctagcattatgttttcaggctagttttccttcataataaattaacttattactcttcatgacatgcaagatggactgtgatgttaaagaataatgttttctaattatcattgacatttgcagagaagattaaaatttaataaaattaattgtccattcttgaatggcttactttgcagttaatcatagaactctgatttctcttactcttatgaaaacttctgaatttcctgtgtcttattaatatccatagtaaacccagcacttagaaagtaagttagattttttccttctgttgacattgttgaagcaaaaaaaaaagtactgattttgaaaaaattctatggttgaagtttttcaactgaaacctttaccagtaatctcacccatcttattaggaaaacctaacttctggaggttatgttgaatggtgaggaatgtatcctcttcgccgtggtacatctctagtaatataatttgaagtgctagggccccttgcatccatttctgaatctattattagttgattaaattagctggctggatcagtacagtgagaagagacgcagtaatgatattatagaattagtatgctatgatgaattgtcaggagaagtaattgtgacagccctgtggccatatgcacttagccatgcaatttatagtcatttggagagccaaggacttttcagtttgggttaggaaatttgctcctgcttttgacatagtttgagggatatgtgtgtaagagtgaagggggtgcttagcagcgattcaggaagaaatcaaaagtctcacttcttagccattggcatttggatgattttcagggaataagccagtgtgtggatgcctttattgtaacagtgccaattcctttaaatagatttatatgatagtgccgttactttatggttgctgaagataacgttactttgggtaagataaaagtaaatgcaatctggtatcacaatttcccttgttatggaacactgtaaattctcatccatgtactgcatttacagcaatcctgaaaacattgctggggttgttttgatttaaatacatacggggctcctaattgcaagtagtttttaagcaacttaaaatataacgttactttttgtttgtttgttttgcaactatttgcaagataaacggactgtcaggtgcctctaaaaggcttatgatgacagcagttggcaatgcaaatattggcacgacaccacattagggcaaatttattgcagaattaccaaaacatgtataactgtgaagtcacctcagtacaactattatatgagaattactctcttgctgtttttgtttttgtttttgtttttgttttgttttttcattttatgactaccaggctacagtaatattcagtagtacaatgaacatgcttactgacattctaactccaaaccagattcatgcagaaaactactcctttttcttttagctgtctatagatattttctgtgtataatcgatcgcttttatttctcaaacaggattttcatttgattacagatgattgtttcgagatcattcaaatcaatcaaatgatgtttgattacatagattgtttcgtttttcttttcttctcttgtcattgttttatccattgttaactcaatgtcaatatttcaaagataatctataatcaaatattgtcttaggatcttattttatgtcttagccccttctccatgtccctaatcttaatcacccagaattacacatttagaaacacttcttcagtaattctgtagttgcacatttcactttgaaggtaatagaagggtgtctgtcacttcttcatttctgtgtccttccagctcactagcactcttatctgggagttatttttgactctcctccttcaccttccaagtctaatttaacaccaacacttgctgattccttcccagcacagtccatccctggcccctgccatcattctatactggagtgcagtgctcccctcttagtccatctctctgccatctcttcccagaccagtagaacctatatatactgaattgccagatggatctcttaaatttttattatagcccctcatatttcctccatgtgacatgaggccttttgcttattcttattccagcctacagaacttatgtgctttttctctcctctatcttaccctttccctagcacacatagatggctaactataattgtaatttataaatttttgtgccaggtactgtgctaagtgctttccatacattatctagtttaagcatcatggcattcctacgtggtaagtggtgtgattccctttttatagtcaaagaaacagaggtgtgaaacaacttgcccaccaaagtgaaggtgtaagaggaagagccagggcccaaaagtaggtctgtctgactttgtagtgaaaccatcaactaccgtgcagcactggcaccctggctacacgtggttgtgttgctgtttccctggtgtggatttgcattcaatattcatctttttgataatttgtgttcctcctcccctttgtgtacatttggagactgaccccacctttcattttgcattttcatatttgttttactgcattaatttgcattgaataatgtgtcactaagtatttgtgcttgtacacgtacatcctcacctagaccacaatcaaattaaactgctttggagagctgggcacggtggctcacgcctgtaatcccagcactttgggaggccaaggtgggtggatcacctgaggtcaggagttcgagaacagcctgaccaacatgatgaaaccccatctctaataaaaatacaaaattagcagggtgtggtggcacatgcctgtaatcccagctacttgggaggctgaggcgggagaattgcttgaaccccggaggtggaggttgaggtgagccgagattgtgccattgcaacaagagtgaaactgtctcaaaaaaaaaaaaaaaatattgctttggagaaacgtatagaatcaaaatattttccattcttcaatacaatactttggacttacagtccctaatgaaggtggacattcaacttactaattgttcctctttgtcagggtgactttgttgctatattatattttaatattttcatttggtaaattgcaggaaaattagattgtcttctatgaagcttgagaaaagctaagttttgcaaacaagctcctgaccatacagcagtagccagaacaatgaacaggacatgaacaataaagaatctgtgaccaacaggaagatatggagatttgcatacttttaaaaccttatgtgattaatattagattcaatctttacatttctttttacaacattttgttccataaaaaatgtcaagcgtgtgtttgctgggaagaggaagagttcattattcttatggttttcttcattatattttgaaaagccaaggatggggaaatcaacattggtaaaagcaattagtgatgtgggttgaggtgcgggaattacatcctatcccttggcatcaagaataaataccaattattatcatatatagaagtgtgcctgtgtcgcttaaaaaattatgattgcttcaagatagtttaaacattatcatctaataaaagcatattgagaaattagataatttgactaaagtatataactatactaagcaacctaaacttaaaattatgtatatatttacatatacgtttcatatcataaaatacaacatactatatgtatatacacacacacatgaaaacttagatgtgtatgtagatagatagatagatagatagatagataattatttaaatatgttggtaggccaggtaaggtggctcatgcctgtaattccagcactttgggaggctgagatgggcagatcgcttgaggtcagaagttcaagaccagcctggccaacgtggtgaaaccccacctctactaaaaatacaaaaattagatgggcatggtggctcatgcctgtaatccctgctacttgggaggctgaggcaggagaatggctgagcctgggaggtggaggttgcagtgagctgagatggtgccaccgcactccagcctgagtgaaagagtgagacgtcgtctcaaagtaaataaataaatatagatagatagataattgggcagatgggtatttagaacgacaaaatttcatcagcatcttttcccgtttcacttaagcttctgaaaagcccttcttggtcagaatgactgaaacaaagtgatggccttttcaaagttacataatatattttcagcacatcccctgactaacactatgaaaagtgcatccattctagagtcagacaggcctaagttacaattctggatttactcatcactttctgtatgtttttaaatgagttatgcaacttctcttcagtaaaccaagaataaatatacttatgatatgaagttaagattatccgaaaagggaaaactcagccctcatttgaactaaaatcagcttaaaaggcaaattgtaagtaacaagaggggacttccaatagtgagcaagttctaccaatatagtaagcattcctggattttgcagcagcagagagcatgattggaacatttcaatgagaatttatttggcataaagggagttagaattaagttgaacttcgaagtaagtgtaataattaaaataataaacgaaaagaaggcaaaaggaaaagatgtaggtatagagttttatactttgcaaaaggtcaccaaaattcctggtgaccagttgcttaataggaatagggaagccagatgcaggagtagtttgcaacttggaaagcacgtgtccgtgaaaagtggagagcttattgttaccctgtgtgaaggaaattgtaggctatgagaccttttaatttttctagactatcttaaaatccagttctcaaaaacaatctgatttttaaatgatgtcaaattattcaagctttctgggaccaaataaactatgtggactccgggatggtggcctctctactgtactgtgaatgaggacatgtatagctggtaataagtatgatggcaagtggagtggagtgggctttacacccttctcagcaggggagccctggaagttctatgacctcacctcctaccagtattcttctcactcactcactcacttccagccatgcggtctttgaataagccaatcccatttccaatttagggagttttgcactaagtattcttcctgcctgaaatgttctgcctcaggtatcttcatgtctaatgttgtctccttcaagttcagatgtcaccttctcaataaggcccaccctgaccattgtgtaaacttgcaactgccttcccatccctgttttatcatgatacctcgtctttttccgacagcaccatcattctctactatagaatttactcccctatcacaatttcttcttattatcaccctgtccctactggaatattagttccagagtggcaggaatctttgttttgcttactaatatacctagaactaagcctgatatgttgcacacactcaaaatatttgttgcataaagaaatgagtgaaggaaggaattaattcaattgttatttaaagaccatagtaaaaacgtggacacatacttttgaagcacaagactaaactaaattaattggagacaagaggactttaacatttaggattggaggcaccagcatagtaagaattgggaaaggcttataaaattgtaaaggtgttttgaggtcgtggttaaacagtaatacgtctatgctaaaactttaagagtatttgctaattaactaacctcatatggaacaaaacccccacattgttgatatctcaaaagaaatattagtctgacttaggccactgatccatgctactcagtgttgtttttctgacaatagcaataaaggtaattatatttgaatattaatggttgttttgcaaagcattgttctgatagagtagtcacttatattgaaattaacatttccagtgtacacacgttaaccttgtcctcagtcaacagctaacttaaattaagtgcctattagagctccatttaactagagatcagaccagcctcggcatgggtgttgtccctgaggtgtttaaagagagccaagcttctgctcaacaggtggccctcctctttgaacttctagtgagagctccagtgaatatgtggagatacgttcaatgggcattgtaatgtggcaggacagagtgtggacgttggcgactaataaactggatttaagatggctcttccacgtccattagctctgtggactcctagatagttcacaataaacctcagcatccttacctataaaatagacaataggaacatctactacataagattcttgtgaatataacatgagctagtatatacaaaattccttatcacactattttgttggtagtattctgttttttgtttgtttgttttgagatggagtctccctctgtcgcccaggctggagtacagtgccatgatcttggctcactgcaacctctgtctcccaggttcaagcaattctctgcctcagcctcccaagtagctggaattacaggtgtctgccaccacacccagctaatatttgtatttttagtagagacggagtttcaccatcttggccaggctggtcttgaactcctgaccttgtgatccacctgcctcaacctctcaaagtgctgggattacaggcgtgagccaccattcccggccggtagtattcttaagaatgttttgtctaccctctccattaataggatatatttatgacttttacaagtaaacgtcgtatttgtttggcacttgcaatagtggtgattagttcgacaaatagcacaattattctgcttcagtaggatgtaacctcatatcttaaccaaaatataatgtggctagcaattttacaatgttcaaaatacttcagaaatccacaatgtgcagttcaacataataatttctcattttctccaatcagcatcccaggagatctagttattcatgcagatcaacacgtccatgatttaagccgtgagcttttaggaacttcactggcccaaagctaataggtgaaaagatatatacctaacattttaagggattttcaactcttgatgtcttattttgcaaaagagctttgcagcaataatttatcaggcagcctctctgtccacattggagtattctctagaatgattcttatgtttattttacatttcccttccctgcaagaagacaactccaggtaaggagaattgtgagttaataagatgcatgccactgatagcaacagtctatttgatgtctatttccaaaagaaaaatgcaaagtggagtgtgtaatcccttaacgtaagatacctccatgaatcccaatgcctccacgtgaatcctgatgccagagctgcaaggagcatacactgtcagggtacagaaaatgaagacctctctgcttgaaagtttaaatgccctgctcagcaggaagtctagaaagatttgttcaactgaaatgagcttataatcaggctttcatccaaagataaggaaagacaacatccagtagttttatgatgcactcttaccaggaaaacacaaatagttttgtccatgttgtgcagcgttgactcctgtatagcatatttcaaactgcaatcatgaaaatgttccatttccgactaagaagaaaaagtcacccatgaaacttgacaccgtaccttcattttttttttagcaatgaacaaaaaatacacattgttagtgtcacccattctattttttcattttctttttatgatttagaggtgttcctaagacttgcaattatttaaataaaattattgtagcatttttaggggtcattggtacatttactcagcaaagttagctgcctgaaagacagattaactgctaatcagtgcttaatgagggctttgccacgccatgtttgagcacttgtcagtataagaatatcgattagtaaagccaccttttggacttattgttggtaaactgggttgatttctgaggtggataaaatgcatggctagatattctgtccactgtgctgttggcaggctgttgtttatcacaaggttttagtgttcttaatgaactgttaataagctgtcaattatagtgtttatgcaaattagggaaagagacattgaaggattgatgtgcctagcattaaaaatgccttcttgatacgttataaagtaaataattccccttttaataattgtccttaaacatttgctcttctttgccactgaagcattcccacgttgggcaccctggaaaacaatagtccaggacttctttaagcattatactgagaaaacaagacacatctatctctaggatgtactttgctttatgttagcaattctggaatcattttcattcaccctcggccgtaagtgaagttcaatatcaagtgttctgaaattcatgggtagctattctatgattctcatgtggggcatccatttttgcctttcttcccactggagaccatcgaccatggcgaagcaacctcctcaaccccttaaatgtcctgcgctaatggtagctgtcccaagtcccatgtgctttgtagtgcctcagattatctctttagtacaaatcctttgtgtggttataaattgtcaactgaaactatttcttttaaaaatctgcttctctgcctctgtcccggcagaaatacctgtctttggccagaaaatccattaattttctattctgggtttttgtttttttatttcatatgcccttgaatgtgttgacctaacatgccccacctgacgtccttcaaggacctatacaattgtcttgttctctcagtcattcttccggccccgtttacccaggcagaataaatcagttcctttctgcagcagccccagagtactttaaatgagttagatatattccagcaccccccacccctattctgcacacacacacattcagaaattgtgagctctttcagggcttggcctgctatttattcatcttcagaaatcatgtcattcaatgttagaaaatagctacctcaagacactctggaagaaattctgctcagatttccattttataataaaactaaggttattaaatggttcccaatatttaaaaggataataattttgccgcaatctcgtcacttttatttttaattgttgtgatcagaattctatccagatagttattatgggagaacaattcctgaagaatgcttaacctctcaatacaattaaagtagacatcttttaaaggctcttaatattccccccagaaatgtaaaattacatcttgttttgtattgtggaagtcatgttttgattatatgaaattggtattttacgtgaaaaaaaaaatcttctgttcagcttggagcatgaaggtttgtgcagttgttagcacattacttattccaaaatcattgaaaatattattcttgcaggtttggggttttttctaacctcattcgctcagctctgggagttataatgtttcataaaggaagtatcataatctacagcaaaaatcatgcatccatatcagttgaaatgatggattaagctgttttattataagtatatcacaaatgcaataaatatttgccaatgaaatgcagttatcataaggttttgcacagtgcaatttcatgttaatgtccaagtagaatatagatggctttatatgtttggttatagtacctgctttgcagtttgaaaaatttatttgtaagtgttgaaaatataaatatgagagttcaaagtatctatgagttatttctaaataccacttaactcctcccaaggcagatgaggatagtataaaactgcaattctcgtgactgataaatcaaatgaaataatccaataaactggaagaaaaattgtgaattggtcttctgagaggcaagagagcatgctggtaagagcttggactccgaggtcaacaagtatcttgaccttctggcaccttcgtttgtaagtgtggagataacacccagctcctaggatggccttggagattaaatgagtttgggataacaaatagcactcagtgagggcttactatgtgccaggtactatccaaatgcaaatttcaatttctaaattttaatctctctctttaatcaaacatacagcttttgatatttgatatgcattcttgtattttcctcttaggtgcttttcagttatcttcctgagaatttgtgcattttatgtagaaataagataaaatacacaagatataatatcctactggtccttaattccacagcttaataactgtatgaacatgggaaattacttaatctctctgcgtctcagtttcttcaactataaaataacaatgctgctgctgctgctgctgctgatgatgatgatgatggtgaagatgatgacacctatttcatggggctgttgtgaaaattgagatgatccctgttaagtatttagcagagtgcctgacagtgagtgctcaatcacttattattattgctggtaatactgtcgttagcattacttttgctgttattaatgtagtgtgatttatttttaaattagggtcaattgaaggaactgggaatattttgtgagtaagggtttttatgtatatcacattcgttcttctcataacctgccaccctcctcatttttgttactgggaatgaaatcgacttcaaaataaacctaagaacccggactcccttggatctgacactgaccccagacgccaagccacagaggagtatgctgcagtcattctctctttgaaattctaattaaaaatacattttaaaagttttttaaatgcatgtttttcttgaattctgatatgagccatgcaatataaaatggcactgtaacatctcttcaaatatgcgcacttctattcacaatagtattttaaaaagtaatcttacaaaagttttatttaaaaataccttgccaggtgtggtagtgcatgtctgtagtcccagctgttcaggaggctacccctcttgggtttgttttctctaaaataaacctgtccttaattgtcaagacaccgttcatgtttctttcctctttctttaattcttacaggggtgggaagattgcttgagcccaagtgtttgagaccaacctgggcaacatagtgacaccttgcctttacaaaaaaaaaaaaaaaaaaaattctagatttaagcattttggtaatgcttccatttcactgcttctttcttaactgttttggtgtgattgcgatccattttgtagttcactaatttggtatttaactgaactgatctgtcagatctatcaaaacatgggctgttgatacaatttgagctatttcttcatcgtacctgtgtttactttgagagtttatcagcgaatgtttatcaggaatttggaagcctagcagcaaggtgaattctagaagaaaaaaaaatcaacaacatatgctctacatttttttcaatactaaattgatcatctcaaacattattttcactacaaaaacctccatgagtcacataaatagcttgtcctttcaagatcatagaataaaaactacaaggacagatgtgctctagatgtcatttcccagctggggcactgtgagcaacatggcaggggtgaaagaacaacatgtggtcaggatgccttcgtgtgttcagtttttattttcaaagaaaaagtaaaaaaaaggatgaaagaagtggggaaggaagagagggagggagaaagaaagagaaagaaaaagagaaagacaaaacaaccaaaagaaacagaaaggccgggcgcggtggctcacggctgtaataccaacactttgggaggccaaggtcgtggatcacctgaggttgggggttcgagataagcctggccaacagggtgaaaccccatctctactaatgatacaaaaattagctgggcgtggtggtgggcacctgtaatcccagctacttgggaggctgaggcagcagaattgcttgaacccaggaggtggatagtccagtgagccgagatcacaccactgcactctggcctgggtgacaagagtgaaacatctcaggaaaaaaagaaaggaaggaagggaaggaagggaagcaaggggaggaagagaaggaagggaaggaagggagggagggaaggatgggaaggaagggaaggacgggaaggaagggaaggaaggaaggacgggaaggaagggaaggaagggacgggagggaaggaagggaaggaagaaaggacggaaaggaagggaaggaagggacgggagggaaggaagggaaggaaggaaggacgggaaggaagggaaggaagggacgggagggaaggaagggaaggaagaaaggacggaaaggaagggaaggaagggaaggaaggaaggacgggaaggaagggaaggaagggaaggaaggaaggacggaaaggaagggaaggaagggacgggagggaaggaagggaagaaggaaggacggaaaggaagggaaggaagggaaggaaggaaggacggaaaggaagggaaggaagggaaggaaggaaggacgggaaggaagggaaggaaggaaggaaggaaagaaagaaaaagagaaagaagccaacaataataattcctggtttcagtatctggtattctagtgtatttttccattcagattcactaattcagaattttctctattccctcctttttttgtctgttactattaatttatgcaagtcttttactatctcaatttaaaatgagtattttctttctataaaaggcaaaatgctatagatacagagatcatgctgtctcctcaatagatatatgagttttttaaaaaattaattactattatggctacattgaaatgattagtaggaaatgaatctaaattgcttctaaaacaataaagtttaagtgcctcagtaaccctatcctttgaataaatacaaccaaattttagttaggtaaattttgttttgcaaacttctacaggttattgaaattcttaaagactgctattgtgtttttttaaaaataacattttggtcttcaaatacgttactaatcagcagcattcatttatggtatacctaaaacatgctagtaaaactgtaagcttctttcttccttttttattttatatatgctcattcaaatttgactacttcaaagttttgaaattgagaaaaaagaatttgaaatttcacatgtgcctttgcaaaaagtaaaatgattaatttgcctgcaatgcttttacagtgtgtcatactgaaggcttgaaggatgtatttgatcttatcttaaaattgagtggccttgttttagtatataactctgaacaatgaaaaaaaagagcattttctgtatcccaggttgcttttataaatgatatccaccttcaataattgttcaatcgaggccgagctcagtgcatagagacaagaatgtatttcttctctttcttaacagtggtcagggccttacacaaggatgtgttcatgttttgttcctttgggcttcttgaggctcatggtagttcactgagaacatgttccatcactattaaaaataatgtccttcttcatcagtaacatcctaatgtcctttaagtgttaaacccatccctttctgcattcccagaaagtatttttatacacgtgtgtttttttctctctcctggcaaatctataaatggaatttttgaatggaatcctatgatataaatatcttttaaagctttctcatagttttacctgctttgcaatgagccattttctcttcaaaatcaatgcctctcattaagacaacttctggcagggatgaggatctagcatcagtttatagaaaagtggtcatgattttgcctctgggtttgttttaattgttcctctccatgcagcaagctctgtggtttgagtagcagagaattcatttgtaagcttgcctcctatgtttctcaaaagattgttgtgaggactaaattaatccatccaaaattacttactgcacatctcctctgtgccaggccctgctacaggtgctgcagacatccgtgtaaacaagccagtccctgtgttcatggaatgtaatttggaagtagggggagcctgaaaatgaacaagacaaaagcacaagtgaggactgaagaatagaaaataaaatataacttgtggggagagccgtggaggtcatcaggaaggtcagggaaattctctttctctctctctctctcttttttttttttttttttttttgacttagtctcactctgcccaggctggagtgcagtgaagcgaccgcggctcagtgcaacctccgcctcccaggttcaagcgattctcctgcctcagcctcctgagtagctgggattacaggtgtccaccaccatgtccggctaatttttatatttttagtacagacagggtttcaccatgttggccaggctggtctcaaactcctgacctcaggtgatccaccctccttggcctcccaaagtgctgggattacaggaggaaactctcttaaaatacatcatgtaagctgagaggagacttacaaaaaggagatagccacaaggaaacctgggagaagatagcatggccaaatgtcctgagaagaatgaatgtggagtgctggtagaaggaagggaatgagtggctgaggtggagggcagaaaagattagactggtggggagagtacaggggcaaaatcatctaaggctgtgatctctaaggagttttgattttattttaagtggcagagaaaccaacggagaggtttgtctggaagggaataatgtgatatactctacattaaaaaataataattatgtatgtaaaaatctaccaagattgaatcctgactctgccacttacttccctaagcctcagttttgttatctgtaaaatggccatcacgatcaatcaaactcgtacggtagagattaaataaaataatcaacgtaatgtgctttgtccaccataagtattcaacagaaggaggtgttcatttaggtttttcttagaagtccccttggttctccagcctgggccgttcattagtttattttgtgctctcctcctgtcccttaatatctgaaatttttgacaattttctctgagattcctggcatttgggcttccggagatggcggggggtctggtttgctgtctgttaattttagctattctccgctggaagtgccatcacaactagaataaccagagagaatgggaggtggtgcagcctattaagtggccccatggggctgccctagcagcaaaaatcaaaacaaacaaacagaatcccaaaacaggtttgggctttaggggttttgaaaaatggacatttttcccattaataacatatccgttaaactctactgtgacagctctcacaaagtttcttctaataacaacatttctaatccaaaatcattcattctgcctacaaatgtcagagccaaacaatacctagcagataatttggtccacagttttcaagaatacagggagtagaaaatagaaataggtaatctactgctatgtcatatttccaatgtttctatgcaagccaatcactttatggagcctgaaaaattcaagaattttaatgattcgaaatatctagttgaatggctggtaatcttctctcttatttggggaatcccaaagctaaagttgtacataaagaaagaatttaaacctttgaatatagaacaaatgatctacgaatctttattgttagcctagccataatattactatgaaattttcatagtgagggcataacatttagattttaggtcattaagacaattatcaatttctttttatctgaaccattacatatggaagaaaatgatgtaccttatttcattgcttggttaatatcagcctgtgaaagagaaagatattttcagaagagatacaaaatgacttaggttagttcccccatatttaggttgatagcaaagaaggcaggaaaaatatttttagaatgttaaagctgggacaaaagtgtatcgcaagtaatttgggtatcaaggggaaaaacattaaaaatctttgatagaaagtgaagaaaattattttaaaaatgagagtacttcttaacaaccaagattcaggaaaagtttgaatgaaaggaaatttaagacagttgttttgcattacattattatatctctcctttctctttgcctagctaatgttgtctaaaaaatagattgcattcaatcttgaaatatatatgtatacttccctatctacatctatctatatacacaacaacagacatttatcgatttatatatccatgtacatattaatcataacttaggaatgacaagataaacttgtttttcctaccacccagtgttttttaaaaaggcgttctctgttaatacagaataactgcaaataatattttcatgactatgtcatatgaataaaataggaattttaatcatttatgtatttacagtgagaatcattatgaatttatgattttacatttagctcatgattccaaggtgtgatatatatatatacatatatatatacatatatatgtatatatatatgtatatatatatatatatggaagttcaatgctttctgtaaactggaattttaagtgtatatctacacttgagaaaaataatggtcaagataagagaaaaatatatggaagttaaattctaatgcagtaaaaacccccctggaaacaaactgttacccctggtcaattactcacttgccaccatagatttttaggagagattcgcaatatgggaaagcacagtgagtggtttacctccataaaacagctcatcatcaacgtgaactcgtatttaaatctgaattaccagcatctgaatttttcagcatgaggcagcaaaagattgaaaagcagtgttttctgatattgctctaaattatgatttccatagatataacctttatcatttcttctccataccggaaaaataaaaaccggttaaggtaaccccactgcattcttttcttctgcttgttgtacacttcacagtcacagagtgaatcagctttgctaaacgcattcattagtgcccaatttgtttctcttcatctctttgaagaaatcttgcaagctgttggaacgcttattttattttgattccacagtggaaaattgtattcacataagtaagcatataccaaacagcaataaatcattatttctcagatgaccaatatcagcaggaatctcatatacttctctgctggagttgatttccaaattcattgaataattattggtgctgcttttcataagtgaaaaacattttttcctttctattccagttaacttttaaatgctacctttctccctcatttccaccgcacatctgagaattatttgtaaaggagggaaaaagtcaaactttgtattcagcaaatgtcaaggtggttagatggaatataacccttgacaactgccccaccagccctgaaatttagacgttcatagtatgtactttggtcaaagattgaatatcatgttagactgttgataaatgaaataaatacacgttattgctttaatgttttaaggaaaatctgagaatttattagagtgctttaaaatgcaacatttagactagtaaatttctgttttcttttgctctgccaaaagacaacaatttattgttgtttcacttcccaaagtattaattggattttggtaataaatattgaatttttttttttagtaacagacacatgcatttctgtattttttccttaacaaagtttattaacagcaggtaatctgtatactttgacctgaaaatgaatttataaaatatctgttggtgtcaagtccattttaatacagattaaatatcgtggccatgttctacaaagtgtgagttctctactcagtatatttttaatggcttctgtacacactgtattatgttaggtgttgttataaggaaacaaccaaaaaagattttaaaattaatttcagaacttagacttgagaagggtaacagtatcaggtggagattaagactaatatgtagattctttctgtttatgctgttactctttcaaagattattttcccctcttatgctttttattgctgttcttgatttttttgagctactaattgttagctaagttaaagcaatttaaaggatatatatttctaaattggtttttttctttgagttaaaacctgaacatagctaatacttgagcataaagtaatgtgacatttgtactattggtatcgtcctatcaagtatatagtctttctattaatctccacattgatcttttcctcctaaagtgaaaatatggtataaatatttacataattcaaaaaataatgataaactctaagaaacattttcgtgtaaaacatcattgttcacattatgatcttatctttttatgaggaaagcctcctaatctttaaattgatatatttacaaaaagcacaatatagttcagatctttgaaccatccagggtaagtcaatatgatatttttaataaaacggtatagatgtaactacaaaattatcaatgtaacatatctttgtattatcttgtgttgagatcctttagcttctacaaaaaaatttaatatgaaaatgagttttaattagcataataaacagcttacatttcagatatcctactacatcttaatataactcttattaaataagtatatattggaatcatattaattcattcagataattagggctgggcgcagtggctcacgcctgtaataccagcactttgggaggccgagatgggcaaatcatgaggtcaggagttcgagaccagcctggccaacatggagaaactccatctctactaaaaatacaaaaaattagctggatatggtggcaggtgcccgtactactcaggaggctgaggtaggagaatcgattgaacccgggaggcagaggttgcagtgagctgagatgtgctgctgcgctccagcctgggcaacagtgaaagactctatctcaaaaaaaaaaaaaaaaaaaaaaaaaagacaaataatttaataatataggaaaacatttttaaactagacaagacaaaatttttaatgtttattctcaaaatactcaaccaaattgttttcaaaataagtattttatatttcagatgtaatctcaaaaaatgaatttttattcaattatggagcttctgaacttcatacattcatttaaaaatcattaaaaatgattaagaagtccacaacacaatactctgtcttgtctgaattttatgtggatttagtataatgaaaactttagaagtatatgacaggacattaaattcatgactccatattaataaagtagctaaggcttaaaatattagaatatacagccataatatattattatttatggacagcatctattctcatgcaaagaaaatacacacgtagttcaaattctgtgagtttctttgaccttatggaaaagaagaaaattatagattcagatgtagattagttattgagttgaatatgtcaaattacccaactaccttcttgttcagaaattaacaaaatagcagatagaaccacttgactggagataacttatctagtagttgatgccaacgtagtggcaatatatatagcattccaatctagattttctatacctcatttatggatcacctgtttattttcttaagcaattctccaataagcagagtcattttctattgtacatcttatcagtagtttcatgggggggaaaggaataatgtaatcagagagatctggagaatactgtgtagtcaatgccttagatactgatatgatttagctgtgtccccacccaagtctcatcttgaactgtaactcccacaattcccacatgttgtaggaggaacctggtgggatgtgtttgaattatgggggcaagtctttcctacgctgttatcgtgatattgaatgagtctcacaagatctgatggtttaacaaggagaaacccgttttgcttgactctcattctctctattgcctgctgcgatgtaagatgtgcctttcaccttctgccatgattgtgagggctccccagcagtgtggaactgtgaatctaattaaacctctttcttttgtaaattacccactctgggggtatgtttttatcagcagcatgaaaatgaactaatacagaaaattggtaccagtagagtggggagctgctgaaaagatacctgaaaatatggaagcaactttggaactgggtaacaggcagaggctggaacagtttggagggttcagaagaagataaaaaaatgtgggaaagtttgggactccctagagacttgttgaatggctttgaccaaaatgctgataatgatatggacaataaaatccaggctgaggtggtctcagatggggatgaggaacttgttgggaagtggagcaaaggtgactcttgttatatttcagcaaagagattagcagcattttgcccctgccctagagatctgtggaactttgaacttgagagagatgagtcaggatacctggtagaagaaatttctttttctttttttttcttttttttttttttttttttgagacagagttttgctgtgtctcccaggctggagtgcagtggcaccatcttggctcactgtaacctctgcctgcctgggttcaagcgattctcctgcctcagcctcccgagtagctggggttacagttgcccaccaccacacccggctaatttttgtatttttagtagagacagggtttcaccgtgttggccaggctggtcttgcctcagcctcctgagtagctgggattacaggtgcctaccaccacacccagctaatttttgtatttttagtagagacaggattttcccacgttggccaggctggtctcgaactcctgacctcaagtgttccccccacctcagcctcccaaaattctgggattacaggtgtgaaccactggccagaagaaatttctaagcagcaaagcattcaagaggtaatttgggtgctgttaaaggtattcagtttcaaaagggagacagcaaaaaagtttggaaaatttgcagcctaataatgcgatagaaaagaaaatctcattttctgagaagaaattcaagctggctgctgaaatttgtataagtaacgaggagcctaatgttaatctccaaggcaacggggaaagtgtctccagggcatgtcagaggtcttcaaagcagcctgtcccatcacagacccagaggactaggagaaaatggtttcatggactgggcccagggttcccgtgctgtgtgtagtctagggacttggtgccctgtgtcccacccactgcagccatgactaaaaggggccaaggtgcatacagctcgggctcttccttcggagggtgaaagccttaagccttggcatcttccacgtggtgttgagcctgcaggtgcacagaagtcaagaattgaggtttgggaacctccgcctacatttcagaagatgtatggaaatgcctggatgcctagggaaaagtttgctgcaggggcgagccctcacggagaacctctgctagggcagtgtagaagggatatatggggttggagccccctcacagagtccctactggggcaccgcctagtgcagctgtgagaagagggccaccatcctccagaccccagaatggtagatccaccgacagcttgtactgtgtgcctggaaaagccagacactcaacaccagcccgtgagagcagccaggaggggggctataccctacaaagccacaggggtggagctgcccaagaccatgggaacccacctcttgcatcagcatgacctggatgcgagacttggaatcaaaggagatcattttggagctttaagatttgactgccctgccagatttcggacttgcataaggcccgtagccccttggttttggccaatgtcttccatttggaatggctgtatttatcgaatgcctgtacccccattgtatctaagaagtaactaacttgcttttgattttacatgctcataggcagaagggacttgcctcatctcagatgagactttggacttgtggacttttgagttaatgctgaaatgagttaagattttgggggactgttgggaagacatgattggttttggaatgtgaggacatgaaatttgggagtggccaggggctgaagatatggtttggctgtgtccccacccaaatctcatatggaattgtaactcccacaattcccccatgtcataggtagaacccggtgggaggtcattgaattacggctgcgggtctttcctgccctgttcttgtgatagtgaatgagtctcacgagatctgatgatttgaaaaggacaaacccatttctcttgattctcattctctcttgcctgctgtgatgtaagacatgcctttcaccttcagccatgattgtgaggcctccgcagccacgtggaactgggagtcgaattaaacctctttcttttgtaaattacctaatcttggatatcgttattagcagcatgaaaaccaactaatacagatacattgaagttctcagagttccaacagagaacacatctctttaacacagtgtctcccaaaatataatttaataatcattacttattaataatccacagaataatgcagtgtttgagattcctccatataaaatatagtctactatgaactatctgataatccaggttaatttgtaatctgctttcaatccatctttccgactttagtttcaccaggaagtctatactccatccaaaatgaactatgtacttttttccgcaaggatccaaaaagtgttcctctgatgtgcctttttttgcttatgttttcttcctctttatggaatgcctatcgcctctccctttttacttttccatgttcaaaaccaaaagtgcatgtaggcacttcacagacatatacacaaaacagtttacttacaaaatggtgttcttctaggtgttcagctttgcaatcaacatactaaatggagcttgaacaggctggagtgcagtggcgccatctcggctcactgcaagctctgcctcctgagttcacggtattctcctgcctcagcctcccaagtagctgggactacaggtgactgccaccacgcctggctaatttttttctttgtattttttagtagagacggggtttcacgctgttagccaggatggtctcgatctcctgacctcgtgattcgtccgccttggcctcccaaagtgctgggattataggcatgagccaccgcatctggcctgaacaaacatttttaatggtgtccgtgcaaagtgtatctaagtagtaatcatgtcaggtactgctatgaggaaaacaggtaagcgaagttttttgtttgatagtttgctttttgagacggaccttcgctcttgtcacccagactggagtgcaatggcacgatctcagctcactgcaacctccgcctccggagttcaagcacttctcctgcctcagcctcccgagtagctgggatgacaggcgcccaccaccacgctcggctagttttttgtatttttagtagaaacgcgtttcactatgttagccaggctagtctcaaactcctgacctcaggtgatccacccgcctcagcctctcaaagtgctgggattacaggcatgagccgccgcaccgggccgccaagtttttacacatatgccatgtgagagagttggtattgagtttttcaaaggaggcagaggtgatcaggttagttttaatggagagggtagggcctacatcatatcttgatgaaataatgtaggctgataactttttgcatatatgattagaagctttaaagtcattggacactgctctggatgggcagacttggaaaggagatggtttgctctgcagagatgctcaaccttttttggcttagatacatgaatggcgggttgcttcctaatacgtgatttgatgattgaacaactgttaagggcaccaaattcagtggtgtaaacatctcaaatcgaatcctgcctttgctcattgttacttaaccttcctaggctagtgtcttcctctgacaactagaataacaatgccaatatcttaaagtcaaagcatgaattaataatacactgcatgtattcatgcatggaccctaggatatatgcagtgtattattaattcatgcatgaatataatacactgcatataataataatgaattaacatgcacgaataatacaatgcacataataatacactttacataatagattggcatgtagtaactttctatatgtggatactgttatttacattatccttcttcatctgtttgctactcctcctctcagacaaagccaggaagaattctatggcattttatccatattcaccactttgaaagtcatgaagcattcttaacaacctatatattttatgaaaagaataaaattataaatcactaccgtggccacattttaaaagatataatattttatctatattgcattattgccaattcaaatttagttatataataaaggaattatataatttaaactgttgaccatctcttgtagctggaaaaatgtcctgttttacatggtagccctaacctttcccagattaccacagtctgatgttttcagacataattcatttgcagtaaatagattttatttttaaaatggtctatccagccctttatatgttataaccagatccagttttaatgagataactatagataatagggtcatattttcatgtctcttaaataatatattgagatcattctacttataacaatgtaatgaaaataaatgtttttttgttattgaatagaatttccataatacaatgagtttcctgagataaaagcttcaatgctaagtgaaatgtagaactaggacaatgatcctaatggagagatggctaatagtgttcatccaatgtgccaacttcagcccattggaaatggcttcctggatccccgcattgaaaaggattatgaagcataatctaggcttggaaacaaaatgtgtcacattggttattaatataggagctgaaaatgagggtcttctgtacatatcatttctgttcaaatgaaacatatatataatgtccataataactagagcatgaaaacaaagaagaaactagaatattttctattcaatattgtggtaaatattggacatcctgaaaataaaaaggcactatgtaatatgaatcctgggcaacctttgatccttcttttaattttcttttccttatgtcttctatcttcccagtctccccccatcctctcttctctttccttcttctgctctgtttctgggtctctttctctttcttttctcctttttccttccttcttctaactttttgtgcatctacagtgtgcttggatactaagccaggagcccaagtaagtcaacagtctgtggcagattagaaaggcagcgcagcactgtttggttgtatccaatcggtcatttgtaattagtcctgatcacatagaggactccagctggcttttcctgaccagcatatggatgttccaaactgctatttgctaacctcctccccaacttcccagcaagctaatgacccaggaggcagccatttcccaccccactcctagaggtaatggagagcaggctgcgttgaaaatgcctgcatgctcagccatgcatagaatctttctaggactgctctcattcatggagagttaattgtcctttgggtttcctaggtattaatctaatgtctacctgaatattaactcttttttcaagcccagctaaaggcaccttttgccataatactgagcatatgctaaaagtaatctttatataccagtttgaagggaggcaaagtgatattccaaggaaatttagcattaaccactggctgttacccatctctacattagccaaagctgataattttgtatcgtttggattccctcaattcttcatttttcaagtaaaattgctctataacgctattgataaatgtttttggaagtcactcatcaaatatcttgcatactttatcagcgtgtgcttcattaaatgtaatttgggtttattcaactgtttttctgcttttctatcagctgaaacccagaaatcctcttttatcatattcaatggggaaaatcaattgcaaagtaattttgcttcctatttcatctgcagataagttgctgttgctgatatgtagtcctgtggtatggtcttaaccctttctcttggatggaaatgagaggaagaaaaattacctcccgctttcatacgtatgttgatgaagggctgaagaagtctttctctacttcataataattttatttttctccttttggaaatgagtttatgtgcttctcttgcgatgatgggtaaggcagtgtagaatatcttctcttggaaggatgtgcaactatagagaagggtcacagctggagcatcccttgctgagtttgcctagaatctggtgtcttctttgccacctacttggcatgtgttcttgggtaaaccccctaagctttctgggcctcgggtttttgctttaaaaatttgtttatgccaaagaaaagaagagaaattttaaaaagaaaagaaaagaaatgcattcttctttttaaaattaggatgttgttgaactattttctccaccatgaaatcttgcatttgaaaacccaggccccttcctcccctttcaatgggaaattattttaataaatttttatcattctttgactcttttttcattcagtgatattttctgagatctgttcttatcatgttgacacataactagatttgattacttttaactgtttctagcattacattacataaatgaatattttattcaaccagttactattcatactattatttgcaatatgtctttattatacaaaatgctgtgataaacattcttgcacatgtgtgtgagtgggctctctaaacccataactagaaatggattctagattatagaacagtttttaatgtttatatatattgcccaattcccttctaagtagtaatatcactcaagttcccaccagcagcctaggaaatgtccatttcccatgatcttaccaacacttgatattgttgataggaaagttgaacttttcttgccaattttatcagaaaaaaaaaatccttttaactagtatttcttatttccatttttatttaaatatataaagtggggaaattaacttttctaataaaaataatgaaaattgattttaaaaagagcttaaaatttattagagatttaagagttctctgaagcatttttcagaaatagcattgtttgcctgtgtcatggaattattcattcagtaggttaaaaaattgcataatatggtcaaattttcagtgagagctctcactcctaacatccttagtgcaaggggtctgctatttatgtgaccgttcctgttgaatttatcatgggtcagttatgaaaacacaggaaccctgctccaattattcagaagtcattgacttggagttgctcaatttgcttatacaggaaagagttgttaaacattatcctttctgggctaaaaatgaagttgcagtgtgtacagaagtttgccaatgcacaaaaggtcacactgattgatgggctttgaaaattggccatttatgtcaagaaggagatgatgataaggtttattattctgtgaaagtcttccaagtggtgaggacatgtcaatagcacaactttttctccttttgctttatcctttgaaataatgagtcatgaaaccagagagttggcatgcagtatggccggcttcctcatgcacttcataatgctgatctagtagtggttggcaaattagtgctcgggtaccaaatccagcttcaagcctgtttttgtagataaagttttattagaacaaattaagaaaatcccattcgtttatgtattgtctatgctttcttgtcccacaaagacagagttgaaaagttctaacagaccatctgatgctaaacttagaatttttactctctggccctttgcagaaaagggttactgatccctggtggaacctgccgtagacttcatttgaaagtttgattgttaatagctatgtgaattctgtgcttttattaccttgaaacatttaaagaacttttagtaattctcttagcagatggattataattgttggaagcttataatgaaattctaagtttataaaatatttttgtttgtcctaaaagaggtgaggataatagtataagtacttctgaaatatgttttgcctcacagtaaacattaatttaaaccatgtattttgtttcctatgttttctaatttattattaaaataatgtcacctttaacttgaaaacaggggacttattttacacagtaactctttaacttttaaaattaaaaaagacagttaaattatggtttatggatttttgtagtgtttaatttaatggtaagaaatctgtcttatgattacgcaaaacatctgtttttttatcccagtaagttaattcattaagttcaaaaagtcttacttaaaatagccctaaaatattagcatattcattggcacataaatgtttaataattatattttatatttccttaatttgtagtgactattattatggtggtagataagtaagatagtctccagagattctactgattcaagaaaatactacgagcctcatattttaatagcatgtctttgtcataaagaagaaccaccatcaaagtcttgagaaacacaatattaactttcttttatatttctacacttccaatatccagtagatatgtctcaaagtcatacacatttgcttatgcacacatgcacacatacacatacacacacacacacacacacacaatccttaattctgccatgacaaaaattacattggtgactttcacatgtaacaaatgaacaagctgttaactaagaaaattcagacatttggggacaactaaaagtcagtataaaactaatgaattgctggaaggcaaatcagaaattactgttggcaaatatctaaaataagaacagaaataatcacacctgaaacaaactcaagttgaaagatgcatccctacttatacttcacgtagagaaagaacctatagaagtaggttactgatcctacaatgaataaaaccagattcctcttccaaaacttgttgcaattcaccaattcattagtttttactatattgtttgtagtaattttatgctagtaagagtttatgctgaaccaggaatatgatgggaatctgtgtcttttctaatctgtagcctacgtacctggcactgggtaaaagctcagtaaacttttgcaataaatgagcattggggcaagtattaaaacagattattatactgaaaatacgattctaggaaacggcccccaagcaagtgtgatcaaactcagtacagacactttattatacacattttctcatcacttacacatcaaagtgatcacaggttctaagtctgtgagcctgttttcccatttggaagaataagtacaataatgttacctatttgctagggttgatttgagcattaagagttattatatattaagcacttagaaaagcctggtatgtagcaaatagctcaatattacctgcttgtaatagtagtagcacttgtagtggtagtagtattgatagtagtagtatccaaaagcatcttttgatatccctacatttccccatttaatgtgtaaataaataataccaatattagcaaatgcattgtctagagcattcatcatcagagataagtgtaagccaatcatgtttgttcattccgaagatacttactatatgtcaggcttattataaaccatatgattatatatatatatatatatatatatagagagagagagagagagagagagagagagagagtgtcaggtgttgtcttgttgttgggcaggtagattggagatgagtaaagctcttgtcctgcccttgatgtgcatgcagcccaggaagggaaacattatgtaagcaagtaatttcaaagccgcatagcaattttatccaatgcaaagttatagactatgagaagtcagcagcaaataactaaaaattgttttaaatggaacttgtacatacattttatcctcccaataaccctacaatatcagtctcacctatgagaaagctaaaaggttgagtcacaaccctagaatatcctataggcagtgtaaaaaaggcaggattgaaccaggtcttaagagtccacagcctgtggttttccagcccctctgccattgcttgtctgggagatggaaagttttggctgggacatccctcactcaatggtgtaactgcccaaaccgtccctggtctggacgccacaaatggagcagaaagagaaagggagagaagccatttcattgtaggactcttgaccacagtctgttcagtctggcctggtttcttcttggtgcttatgtacgtgctaattgccatggctaaatggtgtcattgtggataataatgctgtgatgaaatgtttaatctcccctagggtttggtggacattttcagctgctgatctagtgataagctgggcaatgggagggaagctactccacttcaaaaattatcttcttgtttccgggtaatcacttgttggcaaatatattaaataaagactgatatttaaataaaagtgctttgaactgggataaaatatttatacacagtttgaatttagtgttttgtcaaaggtttttctcctcctggactctgaaaggcgagtgaacactgaaagactgtctctctcatctctcacctattgatgagatccatccagaccaggctgaaaaatcttgtgatcagtgcatgtaagcattccctcctggtcctctacctctaaagcctggaagagatctacacatacaaatagtggcccagcaccccattttctctgtttggcattgattaaatcactccttcatctagtttggaaagtttatcatctaaagctgtatccacacatttcttgggccagttacactgttaatttcttataccattctaatatgtgacttggaactgatccgttgctgtgtataagaagtccagaaaactaccttcactttgttttattcttagtttgcctgaactgttacccataacattttatccccaacatattttgttatgaataccttcaaacatgcaataaagttgtaaaagttatggagtaaacctatcaacttttttggggggggggatttgtacccatgtgatgtctaacttttgtgacttagctagtgtcttaattttttactcaccccatctcagtttttgaaacacgcacacacacacacacacacacacacacacacacagacatacatacagatactttctaggtattagttatgggttgagtatcctttatttgaaatgcttggagccggaagtttttcagattttttataatttttagattttagaatatttgtataataccagttgaacatctcaaatccaaaaatccaaaactcgaaatgctccaaatgagggttcctttgagcatcatgtggtgcttaagaagttttggaattggaagcatttcacattggggttttcagatttggaatgttccaaactgtataacaaatgactgagtgtgtggaatttatattgtactatacctggatctaaagcttctgtgtgcctctaggttagcctcagagcctccctcagcctcaatttctatcctatgaaatacagatagcaaatcccattctaaagattattgtttgaattaaataaagcaacatgtgctaagaatctggcacaaaccctggccctagccctggcacttaataaatagtagctgttttaaattattactatatgatgtgtacttggttatttaaatatgttaaaagtacatttaaattattctacattaatgtgtattaaaatagtttggacctgggttttgttcgtttgtttctctttgcttgtttggtttttcttttccgtagagaatttaacaattttacttgatccttgaagaactactgagttgttacaactttgacttgggtgaggatctcttacgtgaggctcagccagtaaagttttatttccagtaaaaggggccaaggagtgctttgcaaacctgaagagtaacacctgaccccattcataccacatggaactgcttccccctggaaattctgggctttctcccaaatgcttcatttgaaggtgaatgccttgtgaaaaatgccacatatgtgcctctctctctactaaacagttaatgtagaataccagaaaagatcccctgcccatgctgtctttcttaatgaatggtgacaatgcactaatttaagtacaattggcccagcatctctcattgtgacagaggcgtttccaccgaggaaagtggcaagggtactctgagattgtgggcttgtccagggctgagtttgatttatgaaatgagacctaggagcctggattgaacagattggcttgcaagagacagctgtactggaggagctgctgccaggtatgggtagtggaaatagagaaaaatgaacagtgggataaaaattcctttcccagtccctacttatcaacatgaaacatctgcttcagctacagtggttcccagtggcagtcagaattattgatatggcaaaatcgctgcttatatgcagcacaatggcatgtccccccacccctactggctgcattgtaataattcattactgtaccagtgcgaccaaagacaccatggatgtgaaaggggagttagtgccagggcaattgtgcaaatggtgagggtggtggaagaaagttttcaccacgagcaataaatttctgcctgctgttctattttattgtggctcgacacagtgattatactggttggaaaataagcaataagcgtctgtctgtctccagttgtttttaatattcttgtttaatgggagaacatagcttttatttaaactaaacataacggatgcattttaagatttggatcggtttttgaaaaaaaagtatcttgctatctcgtatgttaggtaagcatatgctgctataaataggaaaacaaatatgcttagttcagctttttgttagataaaatttgattagggatgtgcaaaagctgatgctgtcagccaacacatagcaccaggaagcaatacatactatgttagaatgaaaattaaatgcatttattaccagggaaactggttttgcaggaacgtaccgagaaagtttacatgctcaaataaataggaactcgaattccttaatttcagtaatatcactttataatgcatgctggtaaacttgtgtatgagtttccatggtggctgaaggatgattagaaaaagatttgctaagccaagttcttgtggttcttaacctattctaagaagcggggcaatgcaaaaatataaaggaaaaacaagagcccacacctgtaaagatactttactttcatatgtgtccttactgtttttaacctataaaggaattttagttgtgccttcttatctctgtgataaggcatttatttgtttctaaatgttgacagtaaaaaaaaaaaattggtatgcaaaaatagaaacttttaaattaattttccaaataaaattgtaatgtggccaatttagatgtaaaagctaaagcttgtaggcaagtgtgatatttccttgctgcttttcctgcggtacttagcactagtccttgggatgaaaaaaatattgtttgatgtttcagacaacaatgaaatgaagcattggcaaattaataagcagatcttacctgacagcctggtcactgaagaggttaacacactccagtgctgacaacatgataatgaggatttatggtgagcaggaggtgaaggtgggtgggatgcttccaggctcccatgtgcggtggctccagccccctgcagacataacgcctcaacaagagtgaaggttaccttctggactgtaacaatggctgagctatgtttgtggcagagtgtgcataccctaaagatatgcagatagatagatagatagatagatagatagatagatagatagatagatagatagatagataaagacagtttttaaaataattgtagtcttttatagtttggtgctttctaatttcacatgtatactgagtgaaaacagaattttataatgaaaagaaaagaaatggggccaggtgcagtggctcatgcctgtaatcccagcactttgggaggccaaggtgggtggatcacctaaggccaggagttcaagaccagtctcaccaatacagtgaagccctgtctctactaaaaatacaaaaatgagccatgcatagtggcgcgtacctttaatcccagctactcaggaggctgaggcaggagaatcgcttgaacctgcgaggcggaggttgcagtgagctgagatcccgccattgcactccagcctgggcaaccagggtgaaactctgactcaaagaaaaaagaaaaaaggaaatgaagcattccctttgttgaatataaggtatacagttggtgggtggatggatgaatgcgtggctagatggatggatggatggatgatgggaaattagtttacataacttttaaatatctttatattctttcccctgtctactgttctaattttaaatattatctctcttcttttttctctctatttaaaaactacttttattttcctcaaaaaatgcatgctcattttttgttcaagggtcttggtacctgctttcccctatgactggaacattgttccctggattttcataagacatgttttgatagcccttgagtagacagttcaaagtctcttccacaatgtcagtatcccttaacacatgcagtcatatttcccttattgtttattatttccagaacatatttgtttgtctgttaatgacctctctccttctagaatataagccccataagaacaacgactttgtctaatttctcgttatttcacttgcaccaagaactgtatctcttatttgatgctcagtaaatatttcttgaattcatggtgggtatatatagaaagtaaaactctataagcttattctttgacttttttatatatgtctaccttatatttgaggtccatggatggttctaagttagttaatatttaaaaataatgaatggagggaggattagaaaaaaaagcaagtataatacttctagggccccaaatgatctcagctcacaaggaagcctcaggtttaaatcagcatgtatgttctcaactttcccctcattctcagtcagcattagctcagtttagttttcatgactttcactctgtgctacattagataccttactgggtggtatgacttattagtcaaaagctaaggatgtttctctgtgggatattactattaatatcacatcatatttcactgttctgactctttaatgtgttgatatccgttgttaatatgatattttgcaagactgtacagtctcttatttttttatcataaaaatcattatttcaaaaattgttataactgttacctttgtattacaaaatgaatcactaaactgtttcgtaaaatgtatttccacttctgtacaggatgtccattaaataatgaagatgtacttggtaacagaagtatttatctgcacactctaaattcaagctagttctgttttccctgaggaggcaagttggtgtgccgtttctcatatttaagcgacgatatcttgaccccaagattgtcagagcctccccacaggactccgccatgagattactcagaaggagcctgtaatgagccctctgcacacaccacatggtttcaattacagttttatatgactagacagtgtggtgctgggaaggagcgattgaaaacgatgcaaagggtctttgtcttcgtgcttcagttacctgggcctctgctttcagaatgttcttctacttaatattattcagatttatcttatctgggtgaaggaccagtttctgaagttagggattctgtgttgaaataagagaaacagaaaagaatagtccaggccgcattcctaatcttgtcatgctattcccctttagttttcacacttgtccgagacctctgggatgacgttttctatctcaagggtgctttcaggagcagatgccctatagcaactgattttttttttttttcttgagacggagtctcgctctgtcacccaggctggagtgcagtggcgcgacctgggctcactgcaagctccgcctcccgggttcatgccattcttctgcctccgcctcccaagtagctgggactacaggtgcctgccaccacgcccggctaattttttcgtatttttagtagagacagggtttcacagtgttagccagaatggtctcaatctcctgaccttgtgatccaccctcctcggcctcccaaagtgctgggattacaggcatgagccaccgcgtctggcagcaactgattttttaaaaaggtggtggtgagtgaaagtttcctcaaaattgggggagaaaggtgatggagttttctataacttaaaaagaactatatcagagcataaaacattgcctacatagttctttgtagataaataatagtgacttattaaaaaaataaagtttagacttaagaaacgatctaatagaattggaaatattggctcaaatcagctatgtacttgcttctggcttctgagtggggtgacggacaacttatttcaacatttcctgaaaagctgactctttacaaatgtatgtttattgaatgttagagatgagtgtggtcctagactggaaggttccgtgggaggagggtctgttatggctctcttgtcttctctcactagtgcattatacgcaagtcagggatatagttgtcagactcatgagtaaagaaatgcccaactttacctcttctcttatggttgggaacagaagtccagaggaaagatgtgggtttcccagggcgacagccagtttgtggctaagagaagcctagaatccaaggatgccatagttttccattgcatcagtgacaattgttatgtgatgaaagtgcagtgttctgagaattggaaaggagaactgaatgtatgtctttctcaaaatggccttcctgggttactgagaacaagaatgcatggttgtttctagtttaacacctcttttatgacattcaatcagattcactaataacgagctcagattcttattaacacacaccgggaattgaacaatgagaccacttggacacaggaaggggaacatcacacaccgtggcctgttgtggggtagggggagcggggagggatagcattaggagatatacctaatgtaaatgacaagttaatgggtgcagcacaccaacatggcacatgtatacatatgtaacaaacttgcacgttgtacacatgtaccctagaacttaaagtatgatttatatatatatatatatatatatatatatatttaaaaaaaaaaacactggtatggcagctgtagacatgtaaatgaattcctgtagctgagtgggtagttgaatgagaaggtgaagtttttgacagcatgtcagatttccatggatgaagagagagagcacaagaaaagtggggtgagaaatagaaaacagcccagagagagaacctgacaatatattgtaactgcctttggaagcttcagttccttacataactgagtaaaatagaaaataggaacaacaggttaaatacttttttaaatggagtttttaaagctttccagttcatgtagagactcaaaaattctctttctaatgcatttgttttgttgaaatggcccaatttttatctaagaaaacacatcttccaccaatctgtcatctcctctaattgaagaaagaaatggttaagcatgcccagtcactattgtttgagtaaaaaagacttacttgtccctttcccgggataggaagacatcacattgtgaacatctgtgaatctcattatcaaaataaaagacaggaaacttgtgaatgattgtatcatccactggttgtgtgactttggacaaatcatattgcaccttttcttgactcagtttcttcatttttaagaaaagccattaaattagagactttccaaggtttcttttacctcttttgtcctcatttagttcatagtccagggagagaacaggctctagagttcaaatttgtcccaattcaagatcaaaagaatggataatgtagggactaggcccatgaactgtaaattgagccaatgtgtaaacatcaactcagttaaaacatccactcatctcaacattcgattttcttctgtggttattttggcatgcaggaattcagattcattttggaatatttgctaggtgcatcacactctaacaaattactagcatgttttaaagtcttcctgcattcctgtctataatggttttaagctttataattttccatctcttcactacttagggacatgggtaatcaatgaaaatgtgtatttcaagaatacgcatgtcccccagattatagtttatcaaaatcacttttgaatcattccaattgaattttcacttcttgtaaatcatcagtgcccataatcatattatggggtcacaggagatcaccaagaaaggtatattaaaggcatgacagaggagtagcacaatgcccttgaatcattcctcagtaatataagaacagaatttgttcttggaaagctggtgagggtgggaacattttctttcctttccaacaggcatatactgctcattctcaaatctgtattgctgtactagtcaggatgtttactgtttaaaatgagaagaacagcagctcaaatgatcataggcatgaaagggaatttgttggcttatgtaattaagaagatcaaggggtcaatatggatggcttcaggcatggcttaaaacagagttaaaaaaataatggcactagaaataactgtgtgtgtgtgtgtgtgtgtgtgcatgtgcacacgtgtgtatgtgtctgtatttctcatctctgtgtgtgtgcatgcacacccacacatatttatgtgtgtgtctgtatttctttgtgtgtatgtgtgcacatgcatgtgtatgtgtgtgtgtctgtatttctgtctttctctctctcctcgccctgccccatctctttcccatccactcaaccgttggttctattttcctctatattaccttttcttccaggttgacctttctcaggagctttggctaacagttacatcagatctgtattctaccatatttcccacaaaagtccagggactcctacgggcttggtttcagggactattcacctctgaatcactatggctatgatgatccaagcctgagttacatgtccatgatgaaagcctgtgatggagttgtcctctcccaaatgatgttgactaaaccagggcaagggatgcttcttcaaggggaagtgaaatgctgttaccagaaataagggagagagtagtgaaagaatgcatatcctccccaaaaaagagaatttattcttttggcccacagtgttgtgaagcaaatcaatatatgatcaagaattaatccatagattcctttctgatcttaccaatgttcaaatttatctgttcttcctgtcttcatgccatgcttccaagtgttgtgtagactcattaatgtttaattctttattttgagaagcaggaggaattccttcttatatggagtttcttgttcaccgagtgaacactagaacaataaaatacctaaatagtcaaacaacaaatatacagttcatcatttggattttgttctgagctttgaaatgaaaatgcagctcttctttgaaacaggtatctcatgtcaatccaaataaaatatcgaatttcctgaaaaagattgtatgatgaaatgcttcatttctaggagtcattggcctggattatccccttgttgttgatgtatgtgtagttttttttttttttcaaatgtatctcctgggaacattaaaataaaacatttcattatccatcttcttttttattttttttccaagtgatgtctctgccagatagggaatgcatgtaattcactgttgcttttaatttgtcagtacattaattttagttgataaataagttaactgaatatgctgtcccagttatctttgatcattcaagttcatttggctcttgcttttaaaggctattctgtgcctccccaattctccttgggtttatatagcttttaagttgtcattgaccaagagaccgttcaagggtgattatagttttcaagcttgtttgtatgcaacagccacgaccttttttcaaaagacacccagctgctcttagctgcaccttgacctccaacagacatttattacaaatcaatttcatagattgtccatataataatctagagtgtctctggtagcaagatgatgagagggcaccaatttattgtccttatgaggttcaaaagagcaacaaaatcatgaattttgaatgaattttgagaggtcttactaattttttcactttgactatccttaagagggactatcatgctctaaattttagagacaacgtctctaatagattctaccatgaagtctaggtagaaagggatagaggtgttcactcttggttaatgactctaaaaaatctcaaaactggcagtatggaacaggacacatccttggaagagatgacccactgtgtccagttacttatttacactccagtcaataggaaccccaaaccactttgagcattctggggaggaagaggagaacttaatattttacattacttaattttattccataggtagttaatgatctttatgttttattctatagcaggaatttacatgtagttggtatctaataagcactgatgaatcaaattgaacttaatccaacctctaattcttttccaagcaaaaataattatctttactaagtccatttcttgttgctatgaatacacacacacacacacatctggtttttaaatgtactatgcctttattccagaggttttactgtgtattttagtaaaaacatcattttcagacaaaatgtagactagctagaggtaactgtgcttcaaagaatttatccactaggatattaatttccatttcagagtatttctttttacacaagatggatgttctgctttcaatttattagctacataaatgagcttatctatttctaatttcgacttaatataaaaagcatcaaattttagttttcatccatctaattttcattttgtatatttatttgtggtaagctgattttggtttatgccatctgttcatcaggttcaggcagataatattaaaagtatatgttctccaatatgtgaatatccacattcataagtcatgctgcagctccgaaaagcgctgtggttgatttaggctgctctctgggagaatgatgttaccacagctaaatacaagcgtgagaatttctcagtccactctgctgtttccagtcgtggtttgaagcagatggcttcttctcaccggcctttcttaccttagacaaaaatgtaaaaattattttgatggcttctttcctccttagcctcagagccatcttggaacattctctcctctctcctttgatatctctatcagtcccctctaaaatcataagaaagtagaaagcctcagttacattaggaggtgatttagttagtagaccaatcattctaaaacatatggaatcatattgcaaaaccttataagagttagataatttaagttcactgacctgctttttattttattttattttattttattttattttattttattttattttattttattttattttatttttagacagtttcgctcttgttgcccaggctggagtgcaatggcgcaatctcagctcaccgcaacctccacctcccgggttcaagcgattctcctgccttgagtagctcctgcctccctagtagctgggattacatgggtggcatgcgccaccatgcccgggtaattttgtatttttagtagagatggggtttctccatgttggtcaggctggtctcgaactcccaacctcaggtgatctgcccactcggcctcccaaagtgctgggattacaggcatgagctaccacgcccgaccagccttctgcttttaaagtctcttctctgtctccccaaacctatgcaaaatgacaaagtacttcttgaaagaacccactctccagcaactttgaaaacaatctattttataccatacacaccaaaacaatgacaacatttctgttctttttctggtaagtaaataaacatttgcctcagagactttaatctgagttagtgtaacatcccattcctaagtcattgagagagtttttactttccaggaatcttttaagcaaaatatttaccaaacatgcatatgccaataactacaagcattttcaaatgcagtcatttgggaaaaagagaggcagctaaggcaacttgatttttttttaatacgacattttactaattgtcttagacttggtgatatagctagtttttcaggtcagagaagtcagtgttgctcttttggaatggttctttacattcccaaacttttaaattatttaaaaataaacattgttatacacaataaataagaaactaaaactggtaatttttatcatttgtttaaggtcagtcaacattttcagtgccaggcacggtggctcacgcctgtaatcccagcactttgggaggccgagacaggtggatcacctgagatcaggagttcgagaccagcttgggcaacatggtgaaaccctgtctctactaaaaatacaaaaattagctgggtgtggtggcacgtgcctgtgatcccagctactcaggagtctgaggcaagagaatcccttgaacccgggaggcacaggttgcagtgaactgagatcatgcaactgcactccagcctaggcgacaaagcaagactccgtctcaaaaaaacaaaaaaaaaaaaaaaaaaaaaagacatttttggttataatgctgagtgatttcaaaatgtcaaacaagtgaaaaggatttttatggccatatctaagaaagtaaagctgacgtcatgcatagaaaactacatctcaacagaattttattagtagtaaaaacactgataataacaaaatacaacactaacaacatgcttattatttgccagacagttttctaactgctttattatataaacacattttatccttacaacacctctatgaagaaaatactattattatcctcgattcactgatgagaaaaagaagtcacagacagtttaaataactgatccaaagtagcacactgtgggtgaaagctggagccaggatccaaaagcaggcaatctagttccagaatccgtcttcttatctgctatgaaatactgtttgcattaaaaataacaagtgcattcaagttcaagtccaattttctttctttttaattatggtaaaacacataacataaaatctaccatcttaactatttttaggggttcagtagtgttaggtacagtcacattgttgtgccactgtcaccaccatgcatctccaggattctttccatcttgaaaaacaagcccttcacccatcgaacaataactgccctatttcccccttcccataccatctggaaaccattgtctgctttttgtttctatgaatttaactcttcaggtaccttatgtaaagggaatcctacgatatctgttgttttgggtctggtttatttcactgagcatgatgttctcaaggttcatctgggttgtagcacatgccaggatttccttccttttgaaggctgaagaacatcccactgtaggtataaactgcagttagtttcttgattcatctgttactgaacacctgagttgcttctttctacctcttggctactgtgaataatgctgctatgtacatggttgtataaatatctctctcatactctatattcaatcctttggggtatatacccccaaatgggattaccagaccatatgttatcagtgaattgaggataataatatgtttaattttttaaggaatcgtcatactattttccatactgatcataccattttccatacccatcaacagtgcataagcatgccaatatctccacatacacaccaacacctgttattttctttatttaaaattttctttaaagtagccatcccaatgggtgtgcagtgacaaattttcttttgtaatcagccatgtaaactgtaatacacacattgaaaacataaccaatgtgacccataagtaaatttcctaaatatttgcttacttcttatttacagtttgcaaatctctcataaactagataggtcctcagaccattctgcatttccttgtatataaagataaacacacacacacacacacacacacgcacacacacacacaacacacactcaaacgcatatatatatacaaacatcaaataaacttttgtgtcttttatgaaaaatacgacacattgagtggaaggatcatatatttcctcttccatttctaaagcatttcaattttgaaagagcaatagagatacaccctctcacatctgagtttagaatactgaggtccagataggttaagtaattggtcccaagttgaaaatttagttagagccacatctagcctgaaatttttcccaatgcagcagcccatccaatctctaaagcgcatcatccaatgtttgtaatacattatgtttatgatatcttaaatgtatagcattatgtattacattatagatattaataaaatactattggtttaaaaccattttcataccccacatagaattccaatataagccatctcccactatttttccagctataccatttgttttaggtagactggctttaatattttgaattgagatggggattcagcttaaaaactgtgaagggttcttttaaaattttatttgcactgaagatgctgagtgtgaaagacgtaagttcatctctctctaactctccatagttcttaacatagagatgatgaccctgacatgtcactgatatttttagaaataatggcaaaacgtcttttttttttttctcccttctgctgaatataccacagacaaccacagttcattgggctggagagtttcagctgtataactaaaaataaatgcctctgtaaaacaccaacaaagacaatgtcagtttccctaaaccactgaaaaatgtgctttaaaaaatcaactgaatttcagttgggtaaatgtctactccatttgcctccgggctgggcttttaagggactccttttattttaatcccttttgtttttcagatttatcacttaaggattgtatgattggtgcaactcatactattaaaatgaactgcagttgctgatctactcacaaagaaatgaaattgtaaactccactttggtttcaaaccacaaataagcgactaataaattagcacaaggcatcttttgataggaggagagcctaaactgaatgtaatttttagtagtaaaacatgggactcactatagcgccatagtactattttaagcattatgcgtcaatattggttttttgaggttttgttttgatggaaaaggtttaaagttattttgttcatattcatatatactgtggtgtttttaaatattaagatatatagaaacccagaaagttgagctcttttttttttttaactttcttttttagggcacttgaaatttcttcagggatacaattgctcttttcacacatttagaagagaataaaagagagagaataactcttttcctttatagaagccacattataattcattccttgtggtccatgtactagatggcctcaagagacagctccattccaggaggctcttctagcacttagtgcacagcccccaccctgactttgaagactcacagcaaagcctactgaagtcactgttgatggagaatggtctgacactgtgatgccaacgtgctggttacctcccggcagtctttcatagatatttaatgtttataagagatattatactgtcccgaacttgggttatttagcaacatatctacatagatggacactcagtaaagctttataaataaacagtgcccttctcttgcatgtatcttaattctgtcctaagcacaatattctaaaatcagcaaccaaggctctatgtcaaataaataaacatatggcataaaacataagcaaatgcatcactattgtagagtataaatttaactatttctggtaacatgattctaatttatatatattttgtttgcttgtttcacctaaaagttaatattcttgctaattttaggtaactattgcttgttgatcatattagtggtttacagtatatgtgatactaatttaatctcaacagatttgagggattaatggtttgtgagaaacataatggttgtaagatagagatgggaataaatcgcatcactcaaaatcagtgcatcttcaagagacagattgacaatgaagtttaagagccaattgattgatcagttttacatgcacatacatacatacatgcatacatacatacacacatgcacaaacctcttccttaaattttcttcagactaatgcattctgaaacgggagagttccctgacccccaccccccccccccattgcaggacatgcaacaggggtataacttgtctgtttggctgttgtgcactcaaaccccttacaggagggggagcatgcagacaggtaggtgcaggagccagggcaagtgattttgggctctggccccatggtagcatctacaggtgggtgcctgtgacatctgaagccccagtgggcatgttacagtgctcttttagctcttctgttcacagacggtttaagtgttaaccagctcagtgccctcttggtacttgggttcttgtccagcgtccaggaagaatcaggtcacacggacatactaaaggatggtgaatgtggggaatattattgcattgccaatggagatgactttcagccacgactgggatggatggggagctggaaaggggatggagtgggaatatgatcttcccatggccaatctcttctccaactgtccccagcagaactcctctcaaagttcagacattccttctctactgtccttctctgctgcaccactctgctgctcttctgctcttccgttcatctgcttgtggagccttgggtttggggtttatatgggtacagggactgtggcgcgtagagggccaaaaggcaacatttgagcacaaaaacaggaaggcctgttctcatttagagctgccagtttccaggctggagggtggagcgtttgctggagaaccgccttcttctaccaagtatttccgtttcctgtctttatcaattctatagggcactgaagtaaatgacaaatgcaatgaactctatagtcttcaatgagccaaaagcataacagttactagttgtaacattcaagaggatattggatgctttttctcctttttctataccgtaaggtgctactctttcatggaaatgtaagtagagataaaaatgtaaatagagatgtttataaggcatataaacatattatatttcctagttcagtatctacagattgagacttaagtttcaaaacagtgaacaataattctgtctttttcagtatcagtgtcataaattgccaatataaccatgtatgaatgactactgataatagtcattagactagtctaatgtcataaagatggcaaatggcagaaccagaattccaacccaaggttattatttcattctggaccatcttcgtcagatggtttgtgaccattgtcagttggctagtaattgcccatagaagagtatttaccccacagtaactgacttgtactcaaaaacaagttatgtcttttcagcaattatgtgtatgtgagtattttttgaatactagaagatatttattttattttatttttttttgaggcagagtttcacttttgttgcccaggctggagtgtaatggtgcaatcttggctcagtgcaacctccacctcctgggttcaagcgattctcctgcctcagcctcccgagtagctgggattatgggcatgcaccatcatgcccagctaatgtttgtatttttagtagagaaggggtttcaccatggccaggcttgtcttgaactcctggcctcaggcgatctgcctgcttcggccccccagactgttgggattacaggcatgagccactgcgcccagccgaagatatttaatgttatacatgggatattagttttatttaaactttgcaagagtgttagttgtttagtttgtttcttaactattagaaggtttcctttcatagaaggaaaaatttgaagtttgaatttagaatgtttgctgtgctgatgaggaattgggcaggtgcatgagagctctgagtttgagtctcactgaaatcttaggtgggaggatgaagatcgctgtgtataaatttccagagagatgctccaattcactgctgaataaatgggaaccagagctgcctcaggggacttaatgacaatttctcatcttcattgattgtgtcagatttaattgctgactcagaggaaatatttgttcttaggagacttgctgcctatcaggaatgagttgaagagttctagccctgaggaaaagtttatgtgagctgaagaaaagatgctttagagagagagagagagagaatgtgcattgttttcttttcttttttcaccctctctcataaagggagtagggcaatgttaagcaggtaaaccctaataccatctacaacctcgtattaccatagagtatatcttcgacaagtatatagatagcctctttgtacagatgagtaataaagaaattcacatctgttgtaatctaatcatctatctggatacacagtttttataacaggaaggggcaaaaagtaaaatcccttaatgatgaattgctgatgtgagcctgtatcacgaataccatattaggtttttctttttaatgtttcttgctatttagtattacttatagaagtctttgaattttcattataacattaagggtgaagagctataaatgcactcacctcagcaaagaaaaccaaaatatttataaatttattttcagaaattaaagacagaaccctggaactgcacaacaggcctgactgtattaacttataggagattatggtaaatttctattgtaggaaataattggatattgtttcagctttcaaatctgtttcattagtattagcaagagattaatttctctctaagtaaattttctgaaaaaaagcacttcactatgcatttgttgaaaatgtgctgaactattccaatttaattgagataatcagcatgcatagtatgtacagttaaatctaacttatggtccataacttttccaataaagtgtctcaagttcactacatgacattgatgtgtttaccgtgggaaagttttaaagcaccgttctcaaaaaatatttcacatctctctagtttggatattcacacattactagaggtgtttaagttgcaagtgatgtcaagtacaatttgtctaatatcggtcctaagcagagatgttccccacatttgatgttaggtgctaatgcatagccagaactctgatttggtgaatgttcacatatatgactatttaagcattctaatatggcttttttcccatgtaacggagtttctggaatagtgtgagatgctattaaagatgaatgtatcttattttgttttgttaaaacaatcaacagctcacacactctctcgaagtcaccttttcttcctatccttaagtgagggggagagatggggcaaaggagaatcatgagctgaacttccactctccaccaagcaccatgctctgcaatctccatgatctcactgggactctctatccatcctatgaaagtattattaatctgatttgacagatgaagctcagcctggataagaaacatgcccgggccgggcgcggtggctcacgcctgtaatcccagcgctttgggaggccgaggcaggcggatcacgaggtcaggaaatcgagaccatcctgactaacacggtgaaaccccgtgtctactaataatacaaaaaaaattagccgggcttggtggcgggcgcctgtagtcccagctactccggaggctgaggcaggagaatggcgtgaacccgggaggcggagcttgcagtaagcggagatcgcgccactgcactctggcctgggtgacagagtgagactgtctcaaaaaaagaaagaaagaaagaaagaaacatgcccaaggtcacaaaactacactatgagaaacctgggatgtatgggatgtatcagtatctgccttgatccaaagtccatgaatgtccagggcacatgactgaatattgattctggttcctaatgatactgacccaaatgtaatcttccttaagaaaaaagacctaatggtgactgacttcaggtttagacttccccctctcccccctcagtctggctttatcatctactcttcacactatatgaagtcattacaatcttcttgaagaggagataaagctcgttcctacgaatatggtttcccttatgtggcccactgctctctgaaaggtcctaaggatagtttgctatttcaatgtccagagatagctgaattcctcctcctccactccttgctcctctatagcacacttcccaagcatgggctcacgaactctcctccctacttgtgttgtcaaacacagcctcactgcttcaagttcaattgggtgttagagacacatgtcatacctatagctaacctcatagtcctacaatgtctaatatacataacagaaaagtaaattgaattaaggcagtccaaaaatctacatgtgtctcaatgcatacaatgaaacaaatttatgtgtgctactgttttcgaggtttctcattcattgcaattatcatagtggctgatatcttgcaccatgataacatcttttgaggaatataattttattgataactaaacatagttttattatgcctgatagttaaaaatacttaaaatatagtaaagttttcatttataaatgtgttgacattcaatattccaaaaatattatttttaatggaaaatgatttttccaaagtgtatctttaactttgttttgtaggaacataaattacttattcaagtaatttgtataagtaatacaaatttggccgagttctgacttagtttgtaaactgttactaatgattttctcacgtaagcaaggtctccccacgtactaatactgtgtataaggaggctccaactgcacagtgattcacctgaagtagttcggacttcgggtgctttgctgattttagccatatgtcatacactataatcaaggcatgcagcatacaacgaaacataagttgcccagccaaattggaggaaatgaatcctaattttggattcagcagtaagtttaataaacttggtccttaaagctagactcactgttatggcttggtagtatccccgctgaaatctcatcttgaattctaatctccataatccccaagtgttaagggagtaacctggagagaggtgattggaacatgggggtggtttctcccatgctgttctcgcgatagtgagtgagttctcacaagatctgatggttttataagtgtttgacagttccaccctcacatgctcacagtctctcctaccgccttgtgaggaaggtgactgcttccccttcagccatgattgaaagttacctgaggcctccccagtcgtgtggaactgtgagtccattaaacctcctttgcttataaattacccagtctcaggtagtatctttacagcagcgtgagaatggactaatatactcaccttaggtaaaataaaatttacaataacaaatgaaggtaagataggtcattattactcttgtttgagaaaaaaaaaaaaaaacagtaaccttgtgccatttcagagggatcttcaaagatgccttttaaattatcccacatagaagcccttctaaatttcacgaacccagagaaagatatttgttcctttccatatttgttacagtgaaaataggactggaattatgatgaaaataagaacatattttatagaacaccgtgatactgaataagctaaattaaaattttatgtggtaggttagtctactagccctgcttgatttatgtatatggtagaaaatttcatacaatataacatttaggtatgtatattatagtagattaagtatttggttacctcatatatttgtggatatttctggagaaatgttcgctagcaccttgatcagaagtataaacctataagctggcatgtattctattcacatatatatatatatttttgagacgaagtttcgctcttgtcgcccaggctggagtgcagtggcacgatctcggctcattgcaacctctgcctcccgggttcaagcgattctcctgcttcagcctcctgagtagctgggattacaggtgtgagccactatgaccagctaatttttgtatttttagtagagacggggtttcaccatgctgtccaggctggtcttgaactcctgacctcaggtgattcaccttcctcgacctcccagagttctgggattacaggcgtgagccaccacgcccatcccacatcttgttagagaaagttttctggaaggatggcccatgatgagcacaaacagaacttctaggaattcttgagttttcagaaacagtaatattagtctactttgcaacactagaatgtctgtgcatgctactcttagaagttaagcataaggtgaattttaataattagaaatgggaaaaggaggaaaaacaaaacttcaggtgttcagaaactgtccatcatgtgttgaaaatgggaatgaagtaatgaagtgctctgtaatacatttacatatatttttgatagcaagaataatgtgcctatgagggcatcattattattttttccataagtcttagaaaggggaaaccaaaaatttgcagagcttagaaagctagcaggcaaagttgtgtttaattctattctaaaatttatagcaattctctttttatgatggaaccaaccatcaaataccaatatgtacttctctgataccactttctctcttagacaatttataagaacctttatattgaatcattgattctcaaatgaaatatgtgctgtatgtatcccagctttttatttgtagtattcaaataattcagcagttttaacatgtgatatgcacaggaagagaaagcacagtatcattaaaaaatgtgacacttctgtgatagaagacatttctattgtactcaattgaaggtctacctttcccatgttcaaatgatgccacttgtaaacatctctgtcttcctgaataatgtgtaattaagtgtattttaattctaactttgttttcctatatttaaaagaagtacctttagatttacatagaaactttaaatgctatcttaataaaactattctgtgggatacgctacatggagtgcttaatcttgaaacagataaaaagtaaagtttgtgggttttcttttcatctgaagttaggctgataagaagatcatcaaactagggattagtcctaacgctgcatcaaaatgcatattttcatgtctatgtaattaggttttaataaacatgtttgatggttacttaaaaaacatatttttcaatgcagaaatggcatcttgtaaactacagtataaagagacttttgcaagactatttgttttttaattacagcctgattatgataagcatttgttattttcccaagtaaagattaaattaatgttataaatcaattttctaaatttaggcttaaatgcaatatgttagacacaactctggatgtctgctatagtaaattatggcttttccgacattttctagaatatttgttattgtgtataaccttttaattgtggccacagtttttaaagtgcttatgaagtttataatgcaagtgtttggtttaatgagtcattagccattaacaaatcatttctgcagttacttttctgattgcaatttaggattttatttaattctttttcctttacatttttatttataatccatttttattagcaattgaaatcctagatttttttttcagaaaaataagacatgagatgaggattttttagctgtgtgtgtttattaaaagaaactaaataatggagacagcatgggagtagtcataccttgcatcttacgtttattgttctgaacaagaaatttcttacctttcagaaaaattgcaaatgtgttttgtttcatcataatcttataaatttaccatgttagtagtgtccactatcttcctttatcttttctctatgcacatataatattttccagatataactcacttcaaataatttctctttacgagttgaataaagtccttttatatccacaataaaatgttgcaatgatcagcaagcctcaaatagtttattggaaaaagatcacttgtgtcaatcatttccaaataggaagttttcagaatgaaatggaaccatttggacagtcaggatttctaccataatgaagctttaataagccagtaatagaaggttttgcagcaatagatgatgacccagacataaatcacattactagatcttaagcaggaagttatgtttgtctatactgacaaatataattgcctatattttgtgactccagttcaattatagatcaccattttacttccagttcaattataaatcatcattttacttcctaatatgtcagtagaacctttgaaattgtaacatgattctgaaattcaaaactacagagaggtatgggcaatgcttgcttttttttttttttttttttttgcttatggaaggctattttcctcaaaatctatttgcaattaatttagtctggcttttatttttgcttttaaatttagaaaaatagattctttctgaactgtaggattaaggaaagcattataataatattttctcactaatccttggaagtaatggtctgttccatggaggtggaacttgaagaagttcctcctctactcaatgatctgaaagaggccaaatcaagaccctggtatgctgtcatacatatcacatgcctggtcatggagttgtggaggctgaggcaagcaacacaagcgaggtagccatttacaattcagaagaaaaggatcctgcaatagcatccagaaactgttcattctttaaaaatgacttatagagacccattgaaggaggtctgtcatctatatagggtttggcagcttagtatggaaatttgatgaaagagcaattgaatgatagccaaagggtctgtgttctttctctccagcctcattagataactgagtggttttaaatcagtctttagaatccctggaccttagttttctcatctgtcaaataatgaaagatagtttaaaaaataaaagtctgaaatcctgaatctgcaagactgcggcttctctggcgaggatcccctaacttagaaagcaagtaatctatattatgaaggaagatgtggctactttatgacatgcccttgcttcccatctctacatattcatgagaattcttccttgctctgttgtacactgaagggagactaaggtccttatgagttagatctacaagtacaatcattttgtttccctttggctaggagctaacattctttcccaagctatggctgtgtaattaagtagagttctctgaatatttgtaaaagaggaataatctgtagcagttttctaaaaaggaataaaataaaaataaaaagcatggtaatggagaagaaggagttaatacaataacaaaactctaagaataaaagtaacgaaaggtacaataatgtaagaattcaagtttaatcaggtacgctgaagtggcaatcttcaataaaaaaaatcagttctgaagaatacagaatattaaatttgataagataattgcaattttattatttcaagatagttgtcatctcttagaagtgtcaaataattaccatacacattcaacagaacagcgtggcagactatataatacgaatgtgtcctatgacattcccacagctcttgttagacaggtaggtgtgtggtgatagacgcagaagtatggtatctacatcagtgcaaaaagtcaagagaggctttacgttgaaaatctggagaggggaaaaatgtaatctccaattcacagcattgcagtatagtggaaaaagaactagattaagtgtcaagaggctgtggattgagtcctggcagtgtggtataaggtaaatccttttctttctctgagccttctttttgagaatctcttccttggtatgcaacgccattgccagttaagctggcttgagccccaggttgctcgcctatcttttgctccttagaccattagtggtttctggaagttaatggtaatccagccaaattgagagtagaggctcctgtttttcactagtctccctttaacttccagaacagacacttcctgcaatttttgtttccactgaagacatccaatttggaaattccacttccagctctctgtggccctcatttgagcatgcaccttttaaaaatgagagttgtgagagagaaccttaaaggaaacatcttaaaagttagctccctgaagggttttcaccaagttaagtttcccttttatacccattattggaaattatagccagtgttttaagtgtaaagtaaaatactcttcttaagcctcctttcacaagcctactatttttctagccgcaatagtttaattttgttttgacagtggctagaacactagaaattgttgggtttttattttatagtaatgactgtcctgaatgactaattttcactgctatccatcatgcctaaaattggctggtttgcttggctgaggatgttatacatcagttcaggaacagaaaaggtcttgccttggttgccttagagtgaccgggaaagaaaatggtggtggtgacagggaagtaatggcttcttccctttccctcgtatctctagtgttccatttatcttcatataaaggctttatctgaagaaaaattaaaagttagaaaaaaaaccttcgtgctaaacagacagtttaattggttctgctatttttggaaactgaaagataaatgctacgtgtgaagttaataaaccataattggaatttgcttaagagcattctttcattccacatggactcatacacttcaggaagccaaaagacctagctgggccttaggaatacataagcccctttcccaagaacagctgtgactttcagtgtgaccttgaggaatttaataacttttctatgtccccactggacaataaacaaattggggtgggaattgaaaaactaaaaacaaatacactcagttaaaaaaaaagaaactggaaactttttcagttcttggatgataacactatcgtgtgtgttgacatttgccattttcccagctctgtgtagtgcttttttccacaaaaagactttgatatttttatgattaatttttgtgttatgtacatacctatgtaggcttatcattgtgagcataactgccctttaggttttacatgttatctagatctgaatgtcatgccatccaaattatttgacaaacataatcactcttactcttattgatgttaacaatactgtttttttgtcattgtttctttactggttatatatgtggagagaaatgaatctgatagtcccaggcatggtctggcactttcagcatcatataacttttccctagacatatttaaacttgagctaaatagcacatttctttaaagaaccaaggacgaaggaaagttcattctcattctgaatttttaaaaatatatttgaaaatatcttttcagctatgcttttattgccgtatattctacctgaatctttgaaaaggaaagagtggcttatagttttcgatctgctacttgtttcatagaaatgcctatataatggtggtgagattgagcagatcgtagaagtgttattgtagattgtgagtcaatgtccagtagggggttagagtaaggacactgaatccagaacaggatcacatgtcagtgcagctagttactaattgtgtgatattggacacatctgtttccttatttagaaaattggatcaaaattgtacctatcttatggattgatgtgagaatttgatgacctgagaatttgtggttcaggactggagcagtacctgtaccattagatactcaatgagcatcatcaactcaagggaaaattggagctttgcaatgggcctgagttttaatcccaattagcatgcttactgtaagcaggttctcaaactctctgatattcagttttccatctgtaatgattttttcctagcaggatttatggattagattaaaaatctaatctaacctaaaaataaagctatttcaaggaaacgcctaccccacttacccaatgatgaaattttttaaataaaaatgttttttgtcaagtccattatgaaaacttttagagatgtagatgaagttgtcaagtatttacttacagtctaatttattagtatagttatacaagattttaactatatcatatatttgctcaaactgtaacacaaatttaatgagatacttttgtttaattttacattcatattcaatatcaacgtttttacctaatataggtgttcagagctttcatcttcacctcagtctgagggtttggggatacagcagttcatgaattcatgtatggtgttcattttattccaatccacaagaacctgttacaactcttacttttcccattcacccaataagcaaatactaatctccatggtaggttttatactagactgtttttttaaataagtagacttttttttttttgagacggagtctcactctgtcgcccaggctggagtgcagtggcgtgatcatggctcactgcaacctctgcctcatgggttcagggaattctccctgcctcagcctcccgagtagctgggattacaggcgctcactaccacacctggctaatttttgtattttttagtagagacagggtttcgccatgttagtcaggctggtcttgaactcctgacctcaggtgatccgctcgcctcagcctcccaaagttctgggattacaggcgtgagccattgcacttggcctaaaaagagatatttgaaagatttattggcatgcttatttgaaagatgtataaatccaggacaaagaacaaaatctggactgttttcaaattttgcctttcttcatttttatttactgatttcggtttaatcagtgaaccaccaaaagtttgcaaacctagtatatttttagatgtttcaggcagatatatctcctccaagtatattatgttgtgaaaaataataaaaattgtcggagctaaccataaaaattgaaaacacaaatatatgcaatatttgttttctaagggatatttcctttgagaaggattgaccttatacttaggtatatatagaaatatgtttaatgcacataacataacttatactgaaaattattgaataataccttaactgttaaagaattaaatacgttgaagaatatcacatgtacctagaacagccttcctcaaaatttgggctgcaaggtatctttacactcttagaaactattgacccaaagaagtattgtttatgtacattatacctgccaatatttactgattaaaaataaaactgagaaatcatgaaaatattttatttatttattttaaaatagcaataaacccattacacagtaacttaaataacatatttaaaaatttatttaaaaagcatataatttttttttgtttgtttttactttaagttctgggatacatgtgctgaacgtgcgggtttgttacacaggtatacatgtgccatggtggtttgctgcacctgtcaacccatcatctaggctttaagccccgcatgcattaggtatttgtcctaatgctttccttccccttgccccaccctgccccacaactggccccagtgtgtgatgttcccctccctgtccccatatgttctcattgttcagctcccacttatgagtgagaacatgcagtgtttggttttctgttcctgtgttagtttgctgaggatgatgacttccagcttcagccatgtccctgcaaaggacatgaactcattctttgttatggctgcatggtattctatggtgtatatgtgccacattttctttatccagtctatcattgatgggcatttgggtgggttccaagtctttgtattgtaaatagtgctgaaaaaaaatacatgtacatgcgtctttatagtagaaaaaagcatataaattttttaaagtatttaagtgagaagaataacattattttattatttcccaaatatctttaatgtctgacttaatacagttgggtttgttattttcgttgaagtatatgaagaaaatccagcttcatacagatatatagattgaaaatggagatttttaagaatagctttttcaggtgattatggatattcttattcggtcttacaaaaattccattagtggtagtttcttaaagactatttacagtgtagaatctttttgaaatcatatcaatgaactttttgtactaaaatccattgacttttcttgcagtttcaatggtctttttccttgtgcatggtcttgtaacagtacactttggtcattaggaaaaatgttgtttcattgaggtatgcagatcttccacatgtggacacatttcattataaaatgtcaaaaaatcatatttgtaaatcaccatcaagcttatcagaaaggtcttgaagtgttgggaaactattgtgctcatgatggcaaactgaagtcttacacaggatgaatttttgcttgaaagcttgaattgaatcactggcaacaaatactgatatagctggtttttgtttttttgtttttttgttttgaggtggagtttcactctttgttgcccaggctggggtgcaatggcatggtcttggctcactgcaacctctgctgcctggattcaagcaattctcctgcctcagcctcccaagtagctgggattacaggcacctgctgtcacgcccagctaaattttctatttttaatagagacaggttttcaccatgttggccaggctggtctcgaactcctgacctcaggtgatctgtctgccctggcctcccaaagtgctgggattacaggagtgagccactgtgcccagccaatagctgatttctttaaagtgactaagtctcttgatttattttctagagaatgttaaatagactagtctgtatggccacagttgtctttcagagattattttagataaaaataatgttccataaaaaaagtgatggttcagctcagaactaaaacaatcatacaaatacttttcctcaaggcaactatgatactttggtttccaaactaaaatgctttatgcatacttcccatttgatcacaaagaatatattttttaaatgtactcaagggccaagatttaataaaattaataatttttactgcttcgccaaaagcatttttcagtgaaactagaattttttttttctgtgagtgaataatagtaaaaaaaaaaaaaaaaaataccatgactagtaaaacaattttctgctatgcctttgactcgtgctaaggaaccagccgttttcctcttcacaaatgtcaacacaatgaaaaagacaaaaatgcataaacattataataaaaatagttatgatctccaggccctgttggcgggtggggggggaggtctcagactatgcttgaggaaccattaacagaggaaattgaataaatagtatttgtatgtaataataatagctgacatctattgtttacatacagtttcacattattgcattgttaaatgttgttatctacaaaataagtttggttaccagtcacctttttagtattcctattcagtcaccagttttctcaaagtggtaatctgcactggaccttcatgtcaaaagtgttgattggtgaggttctactaggcttattggtaagatatatttttaatatcactttttcttccttctccactttgcccaccaaaaaaatagaggatagatagatggatagatgatagacagatagacagatagataatatattaagatggaaggaggaaaggagggcaataggtgggaaagaagggaagaaaaaagcaaccaagcaagtaatgaagaaaaaaagaaggaagatatgaaagaagtaaggaattgagatgaacaataaaatgcttgttttgaagctgaagtttagttagggaattacggttcattcaatttagtagttactcataatcaccttgctaaattaaacccaggtgtagtgaatgctgttgcattaaatatattttcacatgcactcaaactgggaagagcgaaacaccaggaaaacatgaagttgcagtgtggttcttgtatatcgttgaaggactgaaacaaacaaggctcaatggccatttctttaaaaatactgactaatactttgaagaaaataaaacaatccaaatgaaaacatggcttgcaggagctgcttctgtttcctcatcttcttttctgtttgcttttacatagaagagtacagctgtggtttaactcattgtgataaaactgctaaacatgtgcctgtaactgaactccaggagaaaactctgccaggaaactgtctcctaatgatacaatctgcatattttaatgatgctggaaatgtaggaaacggcatagactctggactctgctcattctgggctttttcccctccttgtagcttgtgcattgtttgccttcattaacatatgataactggaaatgggtttcctatcaccatccaccagccggatatggcttgacattttcagagttcagatgaaatacttgtaacctttctggggttactctatattggacttattttaatgatgtccattccatcaatgagaagctggcatggccactgttttaaatagcacaaaagaaaagttatgtctcactacaaaaaagcacagctatggaagatattagtagcaaaccatttttaaaacattttgcaccttcctctctcgcttttatgatatgacttctcggttttgcatttttctttgctccaacctcaagtgccttgttctcttactcttactttatcttagccccaccccttaatgttcattgagcacctgctatgggctgagttctttgctaatcactttatatgtattattttatttaattttcacaatattgcaaaataagcatgattgcatatgactactttatatatatgtgtgtgtgtgtgtatacaggtacatgtgtttatgtgtgtgtgtatcatgtatgtatgacagtgatatcagtttggaactaaattgagtatagtagatataagcagaaacaaactttgtgaagttatattagttgtccaaggacacacagttagaaagttagacactggaccaaacccagatttatctaaacctctgagttatcatggtttttttgtaaagaccagaatacttggaaatataagcctttgctggattttattctactcaatccctaaactactcagttaaattgcatacaaaacaggggaaattccttcataagttattggtctgaagccaattatataaaagtgaaagatttggggtcctactctcccaaactattgaataacagaaatggaatagaatagattaagccttcaaactaagaatttttaaaggacaaactcattggcatccagattattttaatatacattgttcatagattactttttagaaacactgtcaagtttatagtctaaacaaatagattttaattatgaataaggaatttaggatttaaaatattattacctggaaaatcatctttaaaaaaagcagattataatactccaaaggaaaaatgggccctttacttgaacataaagttttcattttcacttttcaatgttttcatagcttcttagatttattggcatcacgttttttactctgcattgtggtagcatatttacttactagactgtaaacttgaagccatcattgcaagttcattccctggtatatggaaaccggaagcatagtaagatcagtaaaatgtttggtgaaatgcaaaatttaaagacattgaacaattcaaaagaaagaacagaatcgtgtctagggagtgggccattttaacattttaatgcatgactgtttgaatggtttaaaatacagatttctggacacactgcagggattctgagtcaacccgtctgggaatggtccaggaatctgcattttataaaggcgtctaaggcatttgcaaccacacttcaaggaatgtggctgaactgtttacagttttaaaaagtaattgggaatggttctgacttgtgccctgctttgcatatttgaatcccatcttccagcaggtaagctttcatttggaatccttgatccaatagtcagttatgtcttcttttccatcccagcctaaggctttccctggcacccctcttaactgactgcttacttcccctctctcttcctcactgattgtaagacattcccataataggagttacacaaacggctgcctggcataagcactggttaatgctcgtaatgtttttataaagactgtacacctttttatcaggtacaaaattatttctccaagtattcccctgttttgtagaaatttccatctcataaggaggtgagcaagagttgcagaattatgcatgtaaattactaaagaggaaatgtgaacatgggatgctttgcaaatggtagctattcggtgttttcctggaacaacttctgaaactctagtgcaccaaagttagtgctcttagaaataacttaggcctggaaatctgcattttgacacaaaatctagatgattgcgatgtaaatgattcatacatcacttcttaatgaactttgcaccaaggatatggtcaaagcaggtcgttcatttattttaaaacacttttcagcttctttaagcttctatcaagtattttcttgctcaaaattctccctaaccctttagagcatcttttgtgttctgctaaaggcctcaagtagccagtcaggggagaaataacacataaacataagatagagagatgaaatttgagtaggcttggtagttttatttttaagattctaaatatttgatgttatttcttaaaaggttaatataagaagtctgtttaacagcacagtttctgaaaaccaggaattcccataaaaaattcataggtctgaaagatacaacacattttggatatcggaacccttaatttctttccgattctacaagcatatcctcagaatgtcttttcaatattttgtactgtctggttgtgtagtttcttcacccataaaagaatctgtgaaattagagacgtcattttatataaaggcatttcagtttttaaaaaggatatataattacatccagggctatcacatggttgctgctgaagtttacaagagatgtgtgcctacttctagatcagggattggcaaactgcagcccacagaccaaatatggcctgctgcctgttcctgtacagtccatgagctgaaaatagatttacctcttttttagaatcctttttttagaaaaatgttgtttttatatttttaaatagctgaaaaatcaaaactggaataatattttgtaatatctgaaagcgatttaaaatgtaaattttagtgttccataaataaagttttattggcacacatccacgccattagcattgtctatggctgcttccatactacaaaggcacggttctgtagctgcaacagagaccatgtgtgacgctccctgcttggcacactataaatcacagtgaagcagttataactcgacagcgtttcaagtgccacatgtgtcacgtacctgtgtgaacagccattttcaaagatgaaataagtatgaaatagaagctcactctagatcagcattcacagatggacatttacaataaatgccggtgatagtaacactgactttgagcctcaattaagcaaactgttagcatatacatacaaaaagaatttcagtcttttcattactagactggtattacaaaaaattatgctaaattgttagtattatattttgaatttcgccaaaaactgtgggcatttgttttctttcttgttatgtgagtatgcatatattaccgtcaattttgcagcttcgcctgcaaagtctgaaatatttcctatctagacctttacagagaaagtttgctgacccctgtgatggagcactgagtgcatgtaaattatgagatggtattttagttgtaaaaaatgtttcatcgctatagagttatctttcaaaaatgtaattttcccctgattacaaaagtcatatgtacaactgatagaaaatttaaaaactgctgcaggatataattggaaactctccttaatttttatcacctggatatgatgaataaaccctgctaacatgttagtgtattttctctagactatttttttaaatacttgcatatgtttgaaaccttactctaaaaacaattttcaatgtcacttaaactttgagaagtagtttcccatattattcacaaatctttgcaaacgtgatttgtatggttgaatactatatattcatgtggatgtgccataatctgagtctcctttggtgggatcattgaagtttttgggttttgaacccccctcctttttaataatattatttaaaaaaattatgctgactaatttatttgcccaaccttcagatttttttacagaattcttttaaatggtagattactttcattccatatgtaattcagttgagaagttggataacacgccctaatttttatcaacacatccttttgggtaagtcaagctactcttagttgcttgataaaacagaggttgctttatcttatgacagcctaatcgtacagcagtatttatggcacacactctagaacaagcctggaggctttaaatcttaactgtgtgacttaagtcattaagctctggaaattggaaacaccagtagaacctctctcatagggcaacagttatattaagtgaggtaattgacatacagtgcttactcagtgtctgacaactagtaagagctcaataattgttagcagcaatataataaagtagaaatatccagctctctcctccctcaaactgaggaatatccatttcttcagaaaaacctgtgactttgagaagaaaatctttctttcactacgttaaattcagcttctttcacttttcaaaatatcagattttcgaaagctacagctataccacttatggtatttacgtccttgacccagtcacctaatctctattgaattctccttttcctcacttgtaacataggagatcaaagtcacttactttattggattgttgtgagaatgaaattagagcatacatgtaaaacacttagcccagcccctgtacagagttagccggccaatttcctattgcaggctatgataaagacaaacattgaaaatcagtgattagacaaaggatgcttccttgcccctggcagccttcgaaaacttccctcaccttactgtggatagcagcattactcctttttactggagaaaaagatagtctcagatgcataatcagatgaatggaccatgcagaaacgctgattaaattagttatgtgtattttctgtgtgggtatgtgtgtgtgcacataaaagagcaaaaaaagagtttaaatgggcccaaaggaaggcatttaaatttgaagcctatagttgttccatggttcctcttggcttctgatatcagttcctcctattaaattattaagtgttaagaaaagaaatgtttaaacaaagccactattagtttttagtcaaattctgtgtgtacttctgttatattcaaacaagctaatgagtacattctttttcttctgctcaacttgaaaaggttacaaacaaataaactgtctcaaaatctttattctctctggaatttatttttcagaaatattaactcaccttattttttaagccaaaaatttaagaagtttattataatttgttattctaattctgctgctgagttggctgttttatttaacgataaattgaatacaaaagctccccaaggcaggaagacagagtaccaagctctgaaagtttggcagtttgacatttcatggtagcctcagacagaagttaatttcgatgctaattatgtatacatacttaagttgttgtatgggctagtgggagtgtacatacatgtacatatatgtatgtcttggaggttacactacaactaaatttagagtcattttgtgcagctgggcgtggtggctcacgcctgtaatcccagccctttgggaaactgaggcaggcagatcacaaggtcaagagttcgagaccagcctgaccaatatggtgaaaccctgtctctactaaaaatacaaaaattagcagggcttggtggcgggaacctgcaatcctagctactcgggaggctgaggcaggagaatcgcttgaaccccttattacctcagaatatggcctcatttgtagacagagtctttccaggggtgatcaaattacagtgaggtcattagggtggaccttaatctcactgatgtctttataaaaaggataatcttgggcacagcgctgtgcatgaaagaaggacaatgtgacgagatctagggagaagatgtccatatatgaatcaatgagagagacctagaacagacccttccctcccagcgctcaggagccaacccagcagacacctagattttggacttccagcctccagaactgtaagacaatgcacttctgatgtttaaactacccagtctgtggttacaacagctctaccaaactagtacacattcccttaaaggaagttcgtacagtgtcttacaacaatgaactacattaaaacacactaaagaaagtaagacacaaagggagattgattgttcccatatactgacatttgaaaagatctaatacatgggaaattggtcttgaatcaactcataacatagagttccctcaagagtcccaattcatcattaacatccatcaaaaaaatcaaattcctcctaaaatgcttaagatgggagataggaaagatattgcatgctaagtggaccaacttgtctttaaataaaatgaaaaacttatctctcagacatgctgaattacattacatacactccattgcatatattccagtaaaataaattcgtgaccagtattctgtgtaagtacagtgatatattctgtagcccagaattcataattttactttaggcagcttaggtctcttaaaatatctcccgagggttgaggtcttcatccagccggtggccctattaggaagtagactagaggattataaggctttataaatcctaatgttgctggggctggtaattcacaagtagtagatgcagaaaccacagggagaagctcagagtgctgggagaactgaagacaggaaagtaagaggctctagaagcctccagattaatcttcccaggaagaagcggagacactaatgcttgagaaacataaaaacagactacaaaaagcagtaaggaaaaaaccacattatagcttttacttattttgttggactgttattttcaaatcacacaattgtctgagatgatttaatacacaattacataaaaaatgaaattaacgtgtctttaaaagcataaaagcaactgctaaataaagccataacatttttctctgtgctaccaaggtaatgaaccatatttttcatctctaactgtgcctctgtgtcatgagtatggaatttggggcaggaggggggcagggaaatatataccttcgctactgagagatcgtctcatagctccctgggaggtggttcagagtgcagtgggttgaagaacaaaacagcaatacttatgaagaaccctgccactatgacgccaaatgcctaaataccccgacaagttgcaggggaaagacaagagccaatggaggatggcagagggttcacattttgtatctcggtacctgtttggctgaataaagctgacttctgaatcaagatgctgttctgttttaatgtagaaaagtattgtcactgaaaacctatacaaacctaggtatgcatatatgcacacatatatggaactcgatagggcctcctgccttcatctatgtgcacacacacacaaattatacatacacacttgtaaccacatgttcgtattagaacttttcccagtgtctagtagaaatacctccccttagtagtcttttctgtaaggtattctccaagtttctgagaaaaaaaaaattatggaagcatatcttattttcaaaatgatttcacagagagcctgttccaacgtactgcaaaataaaagtaaagattttactcaaagattgaataaacataagcatacatagaacatctgccatactccagaagtggtgcttgtgttggggatataaataaaacaatagaactttgctcctgccctcagggagacaacagtctgacaataataatagttattatttttgccatttctttttcttttctttttttttttttttcttttgagacagagtctcactctgtcgcccaggctggagtgcagtggcgccatctcggcttgctgcaagctctgcctcccgggttcacgccattctcctgcctcagcctcccgagtagctgggactacaggcacctgccaccacgcccagctaattttttgtgtttttagtagagacagggcttcaccgtgttagccaggatggtctcaatctcctgaccttgtgatctgtctgcctctgcctcccaaagtgctgggattacaggcgttagccaccgtgcccggcctgccatttcttaaataatatctaatacaagttactagtgcactgatatatgcctaaagaatacatcactagatgaaataatgcaatgtaatgatttttttttctctgttactcaactactgcatggcatttggttgaggaacctgtacagattggaggtgacaaccccatcactacatgcttgctctggaaagatgagctttaatcgaaggaccaaatctgtgttccatggacacttgtttatattttctatgatataaaatgggtagggagaaaaaaatcaagtgagcaattatgtttcacatctaggcttaattaaggttttatgtaaaagtacagcaaaaatgtacatatgtacatacataaatatcaagagattgtttgttgtcctatctcagtgggggaacagaataacatatgagatggattagacttctgataggcggatctgaaggcatcttgttttacataatggtgcggtatagtggtctgtggagattttctttgaggacgcaggccataatctagtccaattctagttatctttggtttggggcctgggtatttgtgtcactttagggagttgtctgacaattttggttatccaggatgatatctgaatttgcacaatcatcagggaaattatctgtgggaagaggaagcactggagacaacaaaaggcctttaatctaaaccagaactagatagatttgcatgtgtgtgtgtgtatatgagtgagtatgtgcccgtatgtgttttcttgtgcatttgtttacatgtatttgtgtgtgtatgcttgtatatgtatgtttgtatttatgtgtttatatatatgtgtttttgtgtgtgtcttttatatgcatgtttatgtttatgcacatgctacgtgtgtgtttagtgtatatgtgtatttgttagtgaactttctgtgtatgaatgtggtctgatgtcttttcagccagctctcaaaggtttctgggtttgggtttttggtctttcattgtaattaactaatggaatatctactttcactaattaattcaattctgttaaatcttttggctggttaagtatcaaataaagagctatgttaaatgtaaaaatgtgagacaaaagctcaggatcatttcctagtattgtcattcttgcaaacttcaggtggaatactgctcccaagtctgggttgccaattttgagttcaatctttttctttctgtatttattttgtcagtatataatgcaaaatttaaaggaatgtttcttgctttctcacaaattgttaacctcatattttctggtcatagaaggtataatttataaaattattgtaaaaaatgttttgaaaaatagagaaaatggagattacctgaaaccccacagtatcctcaggtaatatttgaacaggtagatagaattgcacccacatcaataagaactgagtattagatcacataacactctttctcctgctctaatatgtctctccaggaattctactgtttctctccttcatcataaattattctgtctttcttggatcttaactgtaagcatagtgtgtactgctctattgcatattattttttaaaaaatcgattcttgatcccactttctctgctaaaaatgaccctaactcttcccttttctttatagaacaatgtcttgaaatcattgtctacattcactgtctcttgaaacacactccagtaaagctttagaacccacccttccaccattccaccaaaaagactttatcaaggttattaattactcccatattgctaaatccaattgcctattcttagtctcatcttactggacctataagcagcatttgacccagccaatcactccctccttcttgaaatatttcattccctggccttccaggatggttttgctcgtgactcattaactactgttcttcagtctcctttgctatttcttttcttgtctttgacctcttagtgctggagctcaccaagtctcactcttcagacacttcactctatgaaatcctgcaccccgcccccttctacccccaccacatccaaagtgatctcatccagtttatagttctatttttatgagactcaactttacatgagatttccctgatctccagacttaaatattcagctgcttacttagtatgtccagttggaagtctaataaatatcccaaccttgacatgttcaaaatggaattcctggtcttacctctcaagtggtcctagctatagccttcccaatctcagttaatggttacttcatccttcattttgtcaggtcaaattcttagagtggtccttgatttgtgccctgtctgcctgccaccacttcatatccaattctctccgttattatgttttagaaatatttcagtaacctaactaccgctgccacgtccactgctctaactctggtcgaagccaccaccatcactccccctgggtcatcgcattggctttcttagcaggttgtcctactttgattcttgcccttacaatctttgttcttaaaaatggcagccagaacaatccttttaaaagataaatcaaaccatgttgacctttatttcaaatccttgcaatggcactctgttgcactcaaagtaagggtctaatgccttacaatgacctatgcaatctggctctactgacctttcactcttctttcccattccttctgtgatgtagtatactggcccccttgctggttctagacatccccaggcatgtcatcatctccaatcctatgttactttctgttctctctttctggattactcactccccagaaagccacaaggttcactcccacactatcttcagacctctgctcaagaatcactttgtcagggagtgtttctgaccaacatatttacaatggcaacactgcccttcagcattctctccctccctatctcctgccttgctttatttatttatttatatttgatgtcacttagcaccttctaagatactctacagtatgctagtttactgctgtaattttattctagactatatgcttcattaaggctgggatttttatgcattttgttcactgatgtctatatcctcagtgctaagcacagtatgtactggatatacatgcttttcgtaagtgaatgaataatatgattgccattatactatatatgttatgttgacatgatttttacaacttagtaatacctgagaaagttcttattttgttaggtatctgacctctgatagcatgattgtttctggtacaataatattccatttcaataatattaatattccataatttattagctccctattactggatatgtacataacttcaattattaactaatataaagactactacctacataaatatccacctacataaatatttgtacaaccttcagattattatcttagcattacttttctgcaagaggtaaatttgaaccaaagcatatgctgattctacagatttagatatatattcccaaattaacctctggagagttagcattcattttctcaaccaccgcagttacaaaagtacccttttcccagcacactgagccacactttatattgttattaaattcttgtcaacttgatccacacaatgcatataataagtttttttaaataaactttttatttcaaaataactttagatttataaaaattgcaaagacagaagagtcttccttatttttaacatcttatataatctttgtacatttctcaaaacagagatattaatatcaatatgttactactaactccatctaataatgttttgatttgccgtttttcttagttgaatatctctctcctcatttgtcatttgcatgtcttctttcatgagatgcgcttgtatattgcattccaggatttttattgtataatgcatttttgatgaattaatatagtctgttttatatatggtacacagatctctggaaggaagcaataatttatacccacatgtcttaaaatatctctcatattattgataatttttctaaaattagtagacattatgccacaaaataattgcattatcataaatatttgagttaacattgatatagaaaacaggacaaacatgactttttaaccaagattaattaaattcaagttatttattgatttattagttaagcctctctactgcaagtgacaaaaagtctaactcaacttccttaactgtcaatggtaatgaattaatgtgatgggataagtcccaaggtaaggtagttaagttcaggaatccaaagttgtccttaagctttgacaactctacgtttctcagctctgtatgttgacttcatttatcagaatcttcaggatggtaaaaacagcttctagtaaaaatcgcatgggtcatgtatttgtctaggaatcaatcacagtgacacaaggaataagctatgatgattggccttttccagaggcaagtgtccactctctcagacagatggaatctcatgtactgagattggtagaaagtatatctctgaattaaaattgtgaaccattactggagtaagttaggcacacgatggaggcaaacaataaatatctagtattgttagatttcacacatgattgttaagaaatccattttaatgtcgtatgaagccatacagtattccacaactgatctgagcactgcttccaattacctgtgaaataaatagaataaatctttttaccttattttttcctatggggaagtcagccctatgatatccagttaattggtgctaaaagcttgttcttaactttattcactgatcattctttccatctgtaacagaaaatttaacactcaacatcagtttttatagtgatccaccagccactatgccaattattaatgccctttgttcaaatgttctaatgacccactgtccacagtacatttcacaaacacattggaaaatttttgaggctttcaccaaaaggttgtccgctgttacccaatgaactattgcttagatctcctactgtgaatcttctggtctttcttttgttttgctatatacctacactgttgtcaaggatacccagctctccactctcttgtttgaacagtccacaaggtgttctattaaaagtcccaattaaatgtgtacagccattcacctgtacattcatccctttactcccttgcccacccacatacaaccaactacgtgatctaaaaaataccaacaggtcaaaagtcatcaagcgaatgaacaaaatacttggaatctctaggtgtcacataatagccatggcaatattatctcggataattgctgccctaacaaagcagaataaactcagattgaaaagatgtaaataaaaggagagcaatggaaagaggaacgctttttcaattttataactattgcattattagtattttaaaggttaaaagagtttcttcaatgtaaaacttattgctctatgttgagcaagagagaagttgttgagataagcagaaaagcatttatatcatataaagttatagaaatagttggaatttaaattacattacatacttagtaaatgtctgtttttatagaggtacttcttaatttatgaggcagtatagggtagtggttaagggcacaggctttggactaagagagatattatcattctcatcattcctgcttgctacttgaatgtccttgaggagggcataaccctatttgggactcagtttcatggtctatacaatgacattattaaaattattaataatagcacctatgccatggcatctggcaaggatacaataagataatgcatgcgatgggctgagtacagactttccacgaagaatcaatggatgttagcattcattaaataatacacaatgttattaaggaggttgtgagcaaacaatttcttttatatttaggcttctgtagttttatagaatttatatggctattttatagaatttacatggctatttataaaatttatatggcaatttttaatactttgtacaatgctttacatatttccattgtgctatgcctggtgccatgcaagagtaaaacaaaaaggcattcaaaaaacctggggacacaacctatagaagagcaggctcaatggtgacatggtggtggccaatgtgaggaagaggttacatgtatcttgtgccatgatagggaatagaaatagatgtgtgaatggaatgttcaggaaggcagattttgattgattataaaaaggaatggctcaccctgaaattcagaaccagtctacaatgctaaggtatactgctggacaaaatcagctactttaaggatttccaagcagaagcttggcaaaatgtcagccaggaaatcatagaggagatgcatttgaagaatagagtttgagcatggattaggtaaggtaattgttaggaacccttcctgctgtgggattctgtgattcttattcataaataaaagttagatttttttaccctgataggttcatattcattgaatcattcattcaagaaacctttggtggcccacacgtgtaatccagcactttagaaggccaaagcagaaggattccttgagcccaggagttcaaggatgcggtaagctatgatcttgccactgtactccagcctgggtgagagagtaagaccctgtctctaaaaagaaaagaaaaaaaagaacagaaacctttattggcacaatgagaaacaccatcaggccatatttattatgagcatggaccatggagcttaatatgcctgagttcatccctggccttagcatttaatttattgtgatgttatgcaaatgactaaatttctctgaaggcttcattgattcatataaaaatggaagtagtcatagttttggctcatagaatttttgtgggtatcaaataaaacatagaattgaataaccatagccccattattggcatcaagtaagcactcaataaatatttgctatgattactattaacagtgaatgaatgaaagtactgagatatggaggattgaaggtgaattacatgatatcttagttcataagaatttagtcagtgagaaagtactgaacatccgtatctagaatccaaggtaggagataatatatacacacgtttctgtaggggtccactcatttattcggcatatatgttcatatatctataacaggaaagaaggagtatttggcttcagggagttgacgtgatgttgtgttggaaaaaggaatggcaaacaaacacataaacaatataaaatagggtggtaggcataaagagtggcatgggtgtagcatgtgcggtcaggacccacctggctaaggggatgatatgatcgtatacttgggtgatgaaaagaaatttagagggaggaaagacaatttccagatggaatcattaaggtagccctcatggggaaaaataatattagagttgattcttgaaggatgggtagaatttaatgatccatccgttactcaattcacttagctagtacttaaggagtatgtgacagccagtggaaacagtactggaaatgcaagagagcattctcatgtggaacttcagatggagaacacaagatgaccgctatcaccatcaaatggaagacagcaacaatagtaacaaagataataagcacacttcttgcagaagatataacaattaactgatagaagaaaaggtgtaaaaaaaaacttacctaaagggttgaaaggtttaaaatttctagcttgaggacaaagaactttgtcagtagacaatagggagttgctaaaaggtcttttgagcaaggaggtaatataatcaaatgtttaaaaagtcaacccaagggcagttagaaaactgtttcaatacttatgcgtgatattatagaattgcttgctcattcgtccattcactcattcattcattcgacaatcactgatcctatgtgtccagtccaatgcaagaagattagtaggagaaataggaaaaaaagagttacatatacaatcaagtatgaaacaaacatgtttgaagccaccacatgaaaaggactataatttcaagtgaagtaaaagtttaaagaaatagctgtaaatgtgttttctctatcctttgttagaaaaatagaatattctttttaaaaatccaattatgccatttttctaactgtctaccttagtctgttatgagcaagacttgaagttggactgaacagatgaccccagataaaaacactaggataagaaaaacctaatatattcaaccaactgcaataattcatatttttaagatttcatttagactattatgaataattttaatatacggcctctaaaatttatgaactgtagttagatggcattttcaattcacaaaggcaaatgaatgtatttagatgatatacaatctttctaatggtggaactttttaatataaagtttttattgtaataatttaaaatgaacaccacacacatttgtggagaaggcctcaagatcaaaatttgcaaatgccaccatcggttttgtaacctaatgcaaacttgtagttaaataaactagtaagaaatcatactgtttccttttaagacccaaagtaatgtaaagttcctttaatgttttttttgttttgttttttgttttttttttttgcatattgagactatagacaaccagaattaatacaaacatggacacaaatttggcaacagcaaaatgggaattatgcttgaaaattctttggggctgtttcctcagcctacagtggcaaccccttcttcaacatagtctccagtcaaaagatcacaagggttgaacaagagtagtgaggtgtcttttatgacccaacctccagcccagccatgaataattacagcaggagcaagatacatgatccaagctggattttgcaaattctagcagattttcttctgcaaatgtgggtaatgggcattgggaaataatgcatattaaggaagtgccgaataattgctggcaatatactatagtggtgtcttgatttctgtgatttctgagatccggattgttcttctcttgtgtggatttttttagaggaccagtatctctgcagtaaaatttgtcttgttcaggttaattttaattagcgttcatggtgtgctacctaaaaacaaaagaaaacaaaaagactttaatctgaacagtcattttacaattgcagtcaataaaggtttaaatgttttaaattactctaacattatatagtcagtataaaatattttgcagctcaagaaattatgtcattggttaaaaactgattctcatgactttgaagccacacttaattttatggtgattttaagatgttgcaaagtattacagattctctcatgctttcctctaccatatacaaaaccagaatgaagaaaattcctagtgcaagcaaaggaaaggcagccacaaatatatatgatcttgaactctaaatcaattggaatagattttaaaacagaactaggacaatccttttagaaatgaagttagggcagaaaatggtacttccagggtagtgttgtaatttggatgtgattcatttcagtccattgcttgaattattcgcaaaattttccttcctcatttagttccccgaacttttcaaggatatgtttatcagcagcaggaagaaatgcctggtagctttagaagattgccctgtctctttgcattacttctttcaactctgatgtttacttcgatttttaaaatgacactgagaggatctgtaggttcggatggattttgttaagagaaactcaatgtcacagagactaaaactcctcctgaacaacaacaatcagttagtaatccttttctctttctccattacatgtcctccttttatttgttgttgtttcttgctttagtggtacatattaaaaattaatggctgttacatgattttagaagggtatccacttttcttttattagcaggtgtaattcatgaaaagtatactgcagaaacctccattacaatgccgctttctgatagaattcaattgagagatgttattgctatttattaattgctcggtctgcactgtcatggttgatgatgttagcacagaccctccattgagttacattcttgtattcaattagggatgtgtattattgtacatgttaacactgtagaaccggggatgctagccatctgtagatttgattttttttcccttcatagtcctcaaaaatggagcattttacatcagcactgctagagagacttacaaaataaaataagcacataagcacatcagttgcaggtttaaaaacaaggacagtgtaaaatttaaatttgaagattctatcaaaagtatttgcataattagaatcactagacattttcattttaatcattctaggtggtcgcatatctgaagaagagtaagatcagaaatggtactggtttatcctgtcagaatgtttttctctggctaaatggaggaccatgttatgatattaaaagatcagagtgactaagataataaaaccaagtgtgctaaaacttccccaggtgaagaagatgcgtgaattgcaaaccagtcctaacaggacatttaggaggggaagaatgctacctgctcctcactttcttccctcctggtaccaaataactgctgatacttccaatatagagcaacttttcagaataaagaaacagaacaggaaagctagctggctggcagcagcgtttaatttctcagactcttttcatgaattattctaaaaagatgttctctgacaacatagatcctttctaaggtacctcaataatgcattgccgtggcagcgcaatcatttacctttgatgactcgacattcaccctggtcagttttgtcacttaatgtcaatgtggattgaagatctgcttttgaacaatcatggccttctgtttgaaaacaggaggcatacaccccattgctctggccaaattccaggttaggtaataacattctgttacctaaagaccccccgcagtttcaattagaaaaaatcgttgtgccttactcctctacctgtggagctatataagggtaggtatcgcactgctaaacagcaaacttgtttcaccccagaaggaactgccctttatcatcatccttaattaatatttattgggtacccatagggtgaatgacttgggaaaaggcgacttagtaattaaatgtttccgaatgccggttgtcccctccgagaatgaacgtggaggaccaaagtttgaacagtctattcattatcacagaaatagcatctatccttgtaatatggtacttcctcgctcgcttctgatatctatccatctggtacacctctaatcaaaactatttttcacatcattggatcctaatcgcctcagaattatgtcgagaagctctttgtggggactgaccaaagagtatgagttggcctcttggctctgaccagttgcaaattacaaatatctactcttctgcagggcagggagggggtgagtttgttgtcctaatgagcagcatgcttttaatgttgaaagaagacctctgtgtttctaggattacattgtcgtctgtgccatctgctcttcttttttgctatctagctctgttcacaggatgcagaggcgccgggaactcttagaaagaattgggtttagtgtttcctttctctgctctccagacattgtcttgatttgtagactgattggagacctgtctagtgaatgaattcttacgtcaatgatcatgcttccttcttgccctgtgcctactatgctcagattctcaggatttaatattttctgacataacttccaagaaggtatgacattgccaggggaagtaaatatttcagggatgaccctgctcaaccaaaaaggtctcatccctctacttgaggcatcgaccctgaccctctggtctaaacgttttgttctgcacaggtgtacattcacacatcctgggcacagatgccagcagatacaggagataaacaaaacagtttctccttgagcttgcactccagcactgaacagagagcccccaccccgtgcggcatcacacaagatgcatccttttggctctctcaaggatgatgacaaaacatgaattaagaaaaaaaaatacacttttcatgcttatttttaaaattttatttcaaattttcaaatgtctcaccactttcctcttttttatttcaggagaggatgatgcgtgtgggagcggattactgagatgatgacgatattctctgtataggggaattatcttataaaaacatgtacaattgcttgtattttgttacagaaccaaggttaagaactgcatttacaatggttgtgataagatttagcatttaaaaaaattgtaacatataccaaaatatgccatagctactagaatctagtgacgttgtttccatgtgctttttcttgcactctcttccttccctcagttgagctcatcccctttcacacctagcttcatcccaatgcaacttctggtcccttcctctgtgtcccgtgggacctttttctactgctgtgatatgtccttgtattcttagcattctcttagaaagtatcctttattgccccaccataaaggactttttccatgtactgtatcaggtatccttccaaggttgcaagcagcgtagaaaactctggagaagttgagcaaaggggaacttagtggaaggagagtgggagctcagagaatcactaggcaggctatagcaccagtgctaaaaatgggcatggggaatgtttcccaaaaaaagtccttctgttttagagatgcatactgaaatatttatgactaaaatgatgctttttctagaagttgctccattgtagggtgggggtagataggattataaaagaaaccagaatagtcatgagttgatgagttttgtagctggatgatgggtacatttgagttcattttctgtcctcactaatttggggcatgtttaaaattcccatggaagaagacaatcagaattaaaagatgtatccaaggctggttgtcctgagagctacccactattgtacattaacagagatggatgtcgtgactctcccatagatatgaaatgcatgctaaggtagacacacttggttcataggtatttgctccgctttgattcagtcaaggggtctgtgtgtgttagtgtatgtgagggagtgtgtgtgtgtgtgtgcatgtgtatgtgagggtgtatgtgtgtgtgtgcatgtgtatgtgagggtatatgtgtgtgtgtgtatatgtgtatgtgagggtgtatatgtgtgtgtgtgtatgtgtatgtgagggtgtgtgtgtgtatgtacgtgtatgtgagggtgtgtgtgtgtatgtgtatgtgagggtgtatgtgtgtgtgtatgtgtatgtgagggtgtgtgtgtgtgtgtttgtacatatatatgagggtgtgtgtgtgtgtgagtgtgtgtgttctacaagatgtgggtgtaaatatatgaatgcctgcattctgaattgtgtgtatgtgtgtgggtataggagtgtgtgtgactgtgagtgtgaaatagatctgccagtgtgcaaagcctgagagcagacgtggcagagttgaagggcctttgttgtctgtagcaggtccatcttgtatttagttgacaactgttctgtctgataattcctgcagcctttgaagtttccatccagtgaatataaccctaaaatatgaatgtccttttccccaaaccaagtatgcttcattattatgaaggcatgatctgtatgctgtcactcagtgcagtataacttaaaaacataatctgcagtgtagctaattgtcaataaattttctccattatatctcaaaatttttaaaaaaataaaaagaaatggataggaaccaaggtgacctagattattaggaagcagaaaagggagaaaatcgtgagatggtgaagaactgcctgataagggagctgcaggtaaaatgagcaattaccttattttcatctctatcactggactgaagtcccaattccaggtaggcagtgtgtgatggaatgagcttgcttttctgcctggtttctagctgtatctagaagatgacaggaacgttctggaagaaaatgggatcctccaaaggtgtgatgaggtgcaataggtgtttgaattcaccagggccaaggactttgggtctagggaagagaggtagttcctcaaagggaaattagcaagctgtttggagagggaagaacaataccggtggcccccagtactaaatgtcctccttagtttgactccaagactcacaactgctcatttttctctttagctttaaaatctttagtaagattttaaagaacaaatttgagactcctttagtgtgataaccaagtgtgggccttcaggaacagccccaatttatgtttcttgttttcctctggcctttttagtccacttgcaggctacaaataccagtcacacaaatactttctttcttgaaacatgctgctttcttccattcgcagatgccttggttcaagattctccttctacctgaacttcctttgattttcttttttgcgttacaggtatttacttgttcctctcaatccaaatcacatggcctgtgttcccattacactgcatttccatgggctggccttgccaatggtgttatggtcagtgagggcatggccctctcttcaggttacagggtggggcacttgaaaacaggaagcatgtccttcacctttatatcttctctaccgtggcaaccagcaccatatatatcaagtagaaggcacccaacaagacacatattttgagtgaccctttcatgctttggtgacttgtttatgttgattgtaatgttggcagagatgcattcacaatgttgcctcaatctacatcttattagtgatggatctgtactgacttctccctccctgtccccattccccaaatccttcttttatctccttgtttctcccaaactctgccacttttcacattacccactgaaccatcaggagcaatagtaaggactctctagttgccctgaatcaggttgagaaagtgtgaggacttgttacctcaattggtccctgaatctttagttagaagatttggagacactgtaggtagttgtactttgccataccctctaccttattttttggtggcagtcttagaaattaacatttattgaagtaatcaattattgcaacagaagcacaagtaaaagagggggtggtaggtaaagtagaaatatatcaagagaaaactaacttttgctattatttgtataattgccacaaccctaaaaagaaactatttttctaaatttaacatttgaaaaagatagtgggaaacttggaagtaaaaatgaaaaataacaaaaaaaaaaaggtactaggtcatgttgcttgctctagatagttttggcatggctaagatgtgctagaaatatttcattttgacatgaactctgaccacttttcacttgtaatatcgccagcatacatatatttactcaagacgggatagagtttgtgataacaatagtgggatgcactgtggccatattaaggattcaactcacttatttgagctgagtgcatgggcagcctgtagtgaatgaacttgagtgacctatttcttcttttttgtttaagaattaggactataagcagccaaattatgaatcaggaactaatagaatgaatagatgcaagaaaacagcatgcaacaatttaatgaaagagaaatgtattatatatgctcaagaaacaagtaaaatgccacttttagattacagtttttccaatctgtttatttgcctcattttctttaactgctatttcactcaactacaacttttaatattcattgggtaaacaatatagaaaagcttggttatttcaaatctgtgttgagctccttctaacttatttttatatttcaccatctataatggagtatttacttataataggacactacattttgcatggataagttatttctcttctttctaaggtgtctaagaatatcaggttagaaagacatactggttaaatggttgattttagtcaaaatcactgcagcccctttgggatctactgtttttacaaagtgtggtcctgggataattgtgtcagtttcaggtggggattcatgctgaaaatgcatattcctgtgtcaattctaaagccaaatatataaaaatgtctgctaattttaacaaccttccagaatctgtatacaccagcttttgagaactgctcaactgcaacttccgtctcctgggttcaagcaatcctcctgtctcagcttcccaggtagctgcgactacaggcgcacgccaccatgcctggctaatttttgtatttttagtaaatggagtttcacatattggtcaggctggtctcaaactcttgacctcaggtgatccacccgactcggcctcctaaagtgctgggattacgggcatgagccaccacgcctggcccatattgttattttttactaatcaaagtaatacattttattgtgcaaaatttggaaatacagtaagcaattgagttaaaaataattcactatcccacaatgcaaaatctttacaatcattatatatttttttaaattggaagcacataaagaaaagccattaatattatgctgtatatacactctcctttttctcacttaacaaatctaatgcttaacttagacagtgcatttgtagaaatgcagtgtttggaaaggaggaggataaaaaatggtacgggagagtgcagagaaaagaagagaggaagaaaaggaaggaagagaaaggagatgagggtgatgatggcaatgtgaaagttaatctaaatgtatgtgtcagaataatgtcttccttttttttttttggtggttggaaataaataactttaaaaactctataatgaattatctgaggcaccagaatctcactgttaaaaaacagatattggctgggaacgctggctcatgcctgtaatcccagcactttcagagaatgaggcaggtggattgcttgagcccaggagttccagaccagtctgggtaacacggcagaaacccatttctacaaaaaatacaaaaattagccaggcccagtggcccatgcctgtagtccaagctatttggaaggctgaagtgggaggatcacttgagcccaggaggcagaggttgcagtgagctgagatcatgccactgtactccagcctgggcgacagagtctcactctgtctcaaaaactaaaacaaataaatttaaaaataaaagccagatgtatctgatgtttgacaacttctttccattagagttgggaacagatcactggaaaaatggggacagtcagtttgatcacaggatttggtttaccgcttggattcattttacatttttttaagcaaaattaacttgggaacttctttatataacttattttttgcgtgcctaatatggaacagatgcagtttttgtccaatggaagtgatacttgagctcgtctaatgaaaattgttaaagtgccaagtattcttattctgttattagggttatattaggcaactggcattattcattatttctaactaaagtgaaacgtggacccccatgcatgaagatatttattacttattgatatttaaaggttgttaaattaatcttatttaaattgctcctactaccaaccactgttacaataatttattatataatattacttgagggttttcttttactttagtataaaacttgcaaaagcaatgtattgcctgtggatttttcctacagttcattgtaactgtgactaattcatcacagctgtttagacatgcaaaatctataatacttcacaatgttgattttctgtttctaagactagagcttgatttgaaaccatataatgaaaaattacatgcatctcattggaagaaatattactttaaccactgggaggtggaagaccaggaagagctgtgtggctctgcagctggggatagtgtatgtgaaattctgatagcttcactgaactttgttatgtccctcgacagtattgagattagatctgtctttagttttgttccagaagtaatgttactgctttatttttcctgttactcgcaagaggtagtatagaatgtcttccaaaatataattccccacgaaatatctagggacctgtttttctttttgtgagtcattcatcactcctttctcttctcttctttctcctgcttctccttcattgcttccttctctttttttctaaaggacagtatactatttttgagttttcgtcattcaaaaagctggggagaagcacaaaaggaagtggtggtttccctctttctgcctcttatcagatcttataatgggttaaagaggaaaacaaatcaggggtaaagtgaggctttgcgtttattggcggggatggattgtatctattccattaacatggatgattgaacgctgcctcagtaccattgtatttgatattcaaactgatgctatcattttcttagtaatgattgaaagctgcctcggtatcattatgtttgatattcaaaccgatgttatcattttcttggtttgcatgtggaaaagactgatgaattattagttacatcaaatctttaacatgtgcaaattagtcaaatgcaaaacatgtttataatattcatggttattattcctccatttatattattttttgaggcttcacacaagagcagaagaatgtgtgaaggtattagctgccacttagttgtttagagtttaaatatttaaagcacagagaccttagtaaaaagaagggatttatgtggatacaaggaaaaatattgttttgtccactgaactgtagttattatatgaaagctaatggaaataggagaattgaaaaatgtaggtaaacttgttgttttaaaatactcaatttgtatggagtttggatattttatgaagtaaacaggaggtgggagtggtacaaactgagtacctattcattcatttcttcagaaaaatacccatttactaagggaatatagcaacacataaaatagatacaggctttgcctccatggagttaggacaggcaggcataaatttaaaacccacataagttgtataattactagtgtgacattgtatgaaggaaaatgaaggggatgacaagaaaatattaaagggatcataattgtcatgaccttggatgaaggaagtctgtcttacggaattgctatttaagcttgactgagcatggtggttcacacctgtaatccaagcactttgagaggctaaggtaggaaaactgcttgagcccaggaatctgaggcaagcctgggtaacatagtgagaccccatgtttaattaaaaaaaaaatgttatttcaactcaggcataaaacattagtaggaattaaccaggaaggaaatgaagagaagagccttccaggcacagaaacaacagcatggcagtggtttgctgtgatggaagtaccaaaaaaatgctaactttttatatagtacttgctccatcatgtgttttccattagcatatagtattttacatggatgttctaacaaagtatttttagaacccatatgcaataactgaattattatacggtcagaacaatgagaaatgtgcaaataatttcatgcaattgtacctactctttctatatgcaaacactttaaagaatcttctaagaagatggctctatgaataacagggagataactgctttaactacaactaactttgtgaaacttggttttcagagcaaaccaggaaaaaaagaaatcagaaaccacatgtcaatactttttagaaaaggaaaataatttggtatcttatcttgctgttacaaataggctgatgtctgaggttatatttaaagatatttttaataaataagactcagcaatcaagtcagatttgatttgctggcatagaattcatttgatataatgacacttaagggttgcttgacttctattccatttcctgatgcccaatctcattattaaggtaagcaactgtgaaaaagggtgactctttaaaactctcagtttaacagtttcacttcattgaattcttgtttaatttcttgttgccgaatatgagtgattgtttttagtatcattcatgaatgacacatagaagatttgctgtatagtatctggaggtatttctggaagtgggtttctggatttgaaaattttccatcatcttgaacctactttttaaatgtgtctaaattaaataaatcaatttaatttgtttgtgaaagttccatcttcattcacataattacccaacagacttaaacaacttttctaatgtaaaatgtcagttaattatgaatacatattattaaaaccaaacaagtagccagaagcatttttttgaatttgtaattggatttctgtatgtttttcttaagaatgcaactatcaacttttataatggtaaaccaattgtaatcttgttaaacatgccttgatttcagataaatagaatcgtagctatctctcaaggaatcaaaagaaaaaattattttaaatgcaatcttatttttaaactgtattacccataagtaattttagttatttaactttttagaggaagcatctcattagccgtgggttagaaaatcaactctctgtggcacaattcattaaaaataggatttctcgttcttggatagtgttttgtcaatatcaaaggctgaagtatttaatgaagtatttaaaatgccacgcaatctagcaaagatacctaagatttatatggaagagtatatcttttatataaaatttccaacttctaaaaaaattaggacacagattgaagcagtactttcagaaatatctgtcaccaccacacaccttcaattcgagatgaatgtaggcttcacatcactggtctgggccaagtgacatcatgcaaatggtggcactagtgtcatgagtaataatggcttcccccttcaaccctgtcaaactgtatcaggttgctaagctctaacttttgttgcagagctcaatgaaaactaaaataaaaaaataaaacaattaccaggttgctgtgtatgggttagtatagtgatttgccaataaataacaattaccataggaattaccatggaatgtgaatttctttttcctcttgttttgttttctttcttttttctttttttaatgaaatccatagaggttctttctctgtagattttatttttctttctactataaaattagaacttgtcactccactatgggactctgacagttaaataatagttcacaaatgattagcggaatgagaaattactgcccacagaaagagctctgtgactcagcagataaagatatacaactcaagtttaccaaggaaaccccactgaacatgtggaaacgaaaggcagatgtaatgctatctattgaagcacccagccagtttgttacacgtcccttaattatcagaataattttcacttgaaacttaaaaacaattggctcacacatatttcactttaagcattttcagctttgaaagggggttggtgaatgacattaaaaaagctccacacaccccctttttatcctccatctccgtttaatggaaaaaggattctggtaatatccagctatcttgctagtacagcaccaagcacaaagaaaggacagtaggggtggtgattttaattatctatgtaaatttaactatgcgccacagtcctgtgattgaaactcattactttaactttatagtttagttatgagtgtaaacctcagctcaattaaattataaaccagatcctgatggctccacatattcacagtctttgaaggaaaaacaaaaagaatatagacaggacacaagagcatctcagctatcttttctatgtatgttatcatcccccaaatgccactgtgaggcatgcatgcaaggtggtgtatactgcattgtaacctgtcactgtgcaacagaaataagctaatgttaagagttatttatcacaaatttaaagacaggacaaagtaatagtagaagggtttttaaaattttgtctgttttacagaatagtggtctcataaccctctccctcaaaattgtgtattaattagaacctcaagctcaatttttccctaatatctgacatatcttttaatatacattttttgagacagagtctcattctgtcgctcagctggagtgcaatggcgtgatcacagctcactgcaacctctgctcccgggttcaagtgattctcctgcctcagcctcccaagtagctgggattacagacatgtgccaccacgcccggctaattttgtatttttagtagacacagggtttcaccatgttggccaggctggtctcaaactcccgacctcaggtgatccacccacctcagcctccaaaagtactgggattgtaggtgtgagccaccccacccagcgatcttttaatattttagcgtgtgctatttctcattgtgacaaataaaagtcattcttcttgtctatatttttgttacctcaggggattatccataactgtcagattgtgtaagctccattgactgtagactaattgtccttacattaaatatattaaaatttctaattgtggtgagaagcaatgctgcatttccccttgagtcactgttgaatcagtttcctcacatgggagatttatttagagatagttttgcttcacttgaaataattgaggacattcaaaatgccaaagttattggattaacttgaaaagttgcgtttgctctacagatttatttcaagtacaaattttaaggtaggtgcctttaatcgacacttaattaatgcgtttacttttgttcgattatttcttggaattatatttcttacctcagttgtgatatttttatttgtaccaatgacacactcaggaatctaataatttgaggtttaatgggtaattaaagccactagacttctctagaagaggtcattattattagcgataatagtaataagagcgaacattgactgagcacttaccatgtgccaggacccacgctaagcatttcagaggcattgcctcacataattttaacaataatgctgttaagtggagttattcccattatttattatccctttctgggcttagggatgctgaataaccaaaggaagtttaaaagcaattaagtggcatagccaggttttggacctaagttcttttgactcccaagcccatatggtggggataaattcaatgatagaacaatatatcatagttaaacctaaactacaagtgaggataactaaagaatgatatgtagctatcatcttatgtggctgtctttcactatcaatgttttatctactaaattcttaaaagcaaatctccatccgtcatatagatttgcatcgggagcctagcacagcacttggcacagataggctctcaataaatattcgttcaattgaatttgactgatgtttgttttaaatatactgaaatataaaatgtactggcttggtttggaatgtggctgtattcatgcagttaatttactctctgaagttttcaagttagtgactttctcttatgtcttctaagtgcaacactgtgcttgtcacatctctaaagcaatttgccatgctcccactaagatgaattttcctgaaataatgtctgtgaccattttggtggcattttgtgatgctactagtgaatttccaagttatactgaagcaagcgagcacccatttgtagagctcaccttattcgctttgaaaatgccattgctcttggaagaacacttcgagtgaaaagggaaataagtgtggaggatcagcagtttgttttataccataagtgtttctcagtaattattttcccgaactgttactatagaaaaaaatcaatgcttatcaagaaaggagaaagaaagaagaaaaggaaagaaggaaggaaggaaaagaaagaaaggaaggaaggaaggaaagaaagagaaaggaaaggaagaaagaaaatgaaagagagaggaaagaaagaaagttgacattttagttgagtttagttttttgttgttgtttgtttgtttggactggggaactccacctatgattatatctacgtcacttaaattgcaattgcaatacttctgatgttttgttgtgtatgatgtgcaaaatcttcagtctcactatgtttccaaacacagatattaaatcatagctttttgtcattttgtgatgagatggattcaaattaagtacactgtgagataataaaaaaaaaataaaagaaagagagagaaatggatttggggaaggagacaagtgtggtcctgtttgaacatggcatcaattccttcttaacaccatccctttcttcttctacattttatcctatgccatttatcccacatgtattacataccttctatacataaagcactgcaataaggaattagcataaattcaaagataaataagaatagctccatgtccttaactcatcacaatctagtagagaagagataaaacatgcacaaagacgacattgattgtcctccaaggaggacagataaaagactgggaaatcagagtaaaagaaattgtctttaattttggagaggctcatagggtaagaaaaaatttcactgagaaggtaaaacgtgaggcctttaggaaggagtagagatcagctgcttctgaaatggagatgccaggaacacagaacattcctcctcctccctaggacagagccaacctcattctaaccactaccaagcactgatcacccttaatgcttgtttgctaccaattcctacaggatagaagaaatttgcattcttttgtcatacaaatagttgacttaaatacaatcttaagggccctgcaattaactaggtttgtggcagagagaaatttacttcttattgaatctcagtttccttctccatgaatgagataaatggacaagaattgtgattacaagctccagtcaatggtcatgactgcctgatatgcctggtagcctgtgccataagcattgcaagaacaagcctaagctaagttgaaagagaggtgatcaattaagtatgtcaagggcataaaaataaggagtgatggtatgcttgccatatatttacaaccacacatttagtcagttcaactaaggtgagattcctcattttgtgtcactaaattacaaggaatacctttatttccccaagagaaatgaaatttgaggtagaatttcttagtttaagctatttgtggaagcagtcttagaaagtcattgtcagccttttataggcagaacacatggattttaaagcaaagcagaaatactgagcatgtgagttgtgtgatgttccgttttaaggatagtttgaacacatagggaatgtcagaattggattgtgaagctctagatttgaaagcagttgaatatcaataagatttgactattaaaaaactcaaaaaacaccttgaattcattactggattgcctaggtaatgtaaggaatatgacacacagatccatgaaaagtatttgagaacagcatataaattgcatgttttggtgcttggatgtaaccaataagagatcttaggtataaattgagtaacatgccttagtcactaaaagaatttggcatggcccacacagctgttaatgggtaactctgattcttgctttttaaatttgagtttcatcagcactatttcaaatagttcatttaaaattaacaccctaacactgatgctaaggtgcatgacagtgcataataaaacgtaattttcattttacattatacagattacaatccctacactccgagggatgtagtggaatcttttgctgtaatgaatttatagcatggtgctatcagttcctctgaataaggaaaaaaggaatagcatcttttgtatgtttatttttctttactgatgtttctttggcactatgtttagcctcctaactacacctcttaggtttggaagagaactcagatttattacaaaattatttttaaaatatggcttatccattgcccacaagtgacacaaatgtcagaattacctatggaactccatggaaagcaatttaatttttcctatgtctgagcctttttggtgtctatttttatgaagtagttttcttgtgtttttttcctccttttataatttttaaatggataagttgcagtagcgtttctttctttgaagcagggatgataagagcaatcgcagagtacttctagttgtcaatgcccttaaattataattgattagtacacgaataaaggagtgataggggattggattttgaaagaaaatgggactaagtgtaactggtttgaagatatgattttattgtggaagagttgaaacacaaaggtttccccaaagtctcatttttcatagacatgagataaaatctgtaactctcattccattggggtttaggctatttgttggctttaatttaattggatagaaagcaaggaataatggtttactttgagctctcttttatcttccttagtaacatgtcacttatatgacccagggaccttctgagggtttttgaaaaggcctctttaaaatctgcttgcacttatttgggcactaaaatatgttttatttggagatgttcagaggcaataaaatatagaatatcattttaataatagagtaaaattcggtaaaaggaaacagtaaatacacgctgaaactggagtaacgaagtaaagcctgcctcctagaagttaaagtgcccggttttataatgggcatataaatgccttatgagcctgtttggtaggaaacacttaaatatgtagatcctctgtgaagcctcattacttatgtttctaaatgtttgttttggcatgtggtgccgtctttggtatacatgccatttgcaggatccgctggaatagccactttagagcaggtgcgcttgacaggatgaactgaacacacatattatctgctctaatgaagtgcacttattcttagcctggggcatagtcagtgatgttctgtgatttctctatatccatccagcagaagctttcctgtttctcaaaatacctcaccctagacatcgaggagccacttctatggaaggaaaagcagtttatcctccactgacatcctattgttagctgtgctatcgagttggcgagcagtcatcatcctgctgactaagaccccattctcctgggtctcaccgtggtcagatcaatgctctaatctctgggaaggaagaatgataaggcatctatgtagggtctcctctttagtcttcttttctcttagctgtttctttcaatgcccagattgccagtgagttaggctgcagtgctgaatagatcagagtgtttcactagaaagcacgcagtacaaagttgttcctgctctcttcaactcagtggccccatgactttgcataggacattttaacttacagaatcgcaatattcccttttgttcattgcaaaagctatcattgagtatcaatccatgtttactacctacttttcaaaatactggaaatacaaacatgccatccctattttgcccttaaggagccaaccatactacagagaaaacacggaagtgaacagccagttatgaacacggccccatcaccttcctagaattgtcaggtaaatgagaccataaatgggtcagcacttcctaagctctctgctgtcatattaatttcaggacatggctatgacagtcatgttactaatagggctctgcctagtaaccgtgttcatcccagaagaatacacaaaaatgtctttcatggttcgaaacttggttagaaataccaggatcctcataaaaataaatgatgcccattgccattaagtaagaatttgcaagcaattgttagaaaataagttctagagattccagagaaatgagagatcccactggaagcttcccaagtgcttcttggaagaggtgtagggcctgaatgactgacaggtcaaacctacccaggcagcaagccagagggagggcattgcctaccaaaggaacaatatttgcaaaggttgagtggctcacacctgtaatcctagcactttgggaggctgaggggggtggatcacctgaggtcaggagttcgagaccagcctgaccaacatggtgaaaccctgtctctactaaaaatacaaaaattagcttggcatggtggcgggtgcctgtaattccagctacttgggaggctgaggcaggagaatcgcttgaacccgagaggcggaggttgcggtgagccgagatcaagccattgcactccagcctgggtgacagagcgagactccatctcaaaagcaaacaaacaaacaaaaaaagaaatgtaaactgcatgtatggaaaggaaacctgagccatcaagttcatgaaggtaaacaccgaaagtgagagttgtgaaggtatttttgctcctgtccatatgatacacagttcctttttaatctgatagataatgtcattggcaaattcgctttgccaatgacatttaagcatgaaacttaacaaccatataggcttcagactacatagacataaaaagaattggaaaagttacaatgtttctactgtctacagcatgtagactgcaagtagagtatatatgtaagtgtctttgcaaggcaaataataagaaaatagtgttttatatttatatgacaaagaatctcataggttaaatacaatgttgtttcatccagagtttgtataatttttaaatgaaaagacacatagtttagaaatgtagatcaccttttcattgccaatgggttccaatagccagggcctatgctaagtcctagggataccaaagcagaagacttcagagccttgtcctcgaagagcttaatgtcaattgaagaagataggtagagaagatagtgaatcatagggcaatatatatatacatatatatacatatatatgtatatatatacacatatatacgtatatatgtgtatatatattttgagagggagtcttgctctgttgcccagactggagtgcagtggtgccatcttggctcactgcaagctccaccctccgggttcatgccattctcctgcctcagcctcctgagtagctgggactacaggcacctgccaccacgctcatagggcaatatttagtttaatctataaatatttggggcaaatgaaagtaagttcatttccagttttcttgttaattacactcatttagccaaaggaaatgttatgcatgtaaaagttctgtctatttgatgaactctctaccagtctttgctgtgaagtaactaaaatattagcctgaggacacagatttttttttagaaatttcttttgacagtgattgcctaagtgccagaaaacatagcaaaatgctagtttttgtatcaaaactgttgcgtatataatattcaggaaaaatgtaaaaggaaatatttaggacaatcgaatataatctatttctgtaagacactagctaccaaattcttacttgttagtgacagatatcatctaatttaaaacatggtctttacttccagacattgtaaatgcttctggattgcagcatagatttcatcacatgcctaaaatctcaagtgtattttcactttcgtaacctctctagacattttaatgaaaaacaaagagtggaaaagttaggtttcacagaaggtttctaaatagaaacctaattaaagaaattaataatcatcctttgatgccatgctcgtgtgcctttttccatctctaatggaatctctgcacctagaagaattgtagcttttgcttgtgctcttgactagtaacttaatgtggcgattaagacacattctttatatatttgcatatatacaaagacgtggatgtccttttaaattatacccaccttctgcctaggctaatgctatattaaattgcattgaaatgcaaaagcacctcaatataatgattttccacatcccatttacttgttgattattaatgaatgcttcctgagttgtgttcctgctattttgtctttaagactactttcagggttttcgcatcatattcaagaggccagtcagagttctgtgcttgcggcttcattaaaattctgtcctacacatcatctgactcacactttataatctatcagaacacctgtttgctttacaatggccacgaggcagctcaaaacactgtggtatttagcatttaataatgagcacaagatatgtatttttgacactttaaattttctttagaaaagtgcatggaaaagagccaagtttgaatgaattatctaaacttttgcaatttcataatgtgaattttaaccaacttttaaaaaatgtgtacgagaaagtgccttctctctttgtcagtgaaccttaccttggctaactaggaaaggctatagagggaaataactttaaaatgtcactgcataaactaatagtgatatcaaaagtattttaagaagagtctgtgcattattactttccctatttacatacccgtctcacagacacttcattgtaattctcactctgagaggaagctgagaagcttaatgtcactgttaatatctagatatgtttataatttagtgacttaagtcagtgatgggcactgcatacatatacataaacgctcttttctttaaagtttgggcatttacaaatgtgattgttaaatggccctcaatataattgtatctatttgaaatacttcaagggagggatagggagataatggatggtctcagaagggtgaaattccttcactatattatgtaaatgaagaaacgtctcctagtgcttatgaactgctatagttttcagcgctaatagaggacatactgcaagttgattattgtaatccaacagcgttatctcatcagtgagcggattaagggagctctctcagctgaggggtctgaataagcattttcatttactccctgctgggtcattgacaaatggaagtttttatctgggaacatttaaaagcataaacagtaaacaaacctatagtttcttcccttgcctggatcctttaccagatttgtgctatcttgcaaaggctgataccattcaacctagcagtcaactgacttctgttgtgtcccccaaatagagaattatatgcacctggtgatgaggggggttgatggagtcgagagagagtcagatcttccccgttcaaaagcattcagcaggggccgggcaccgtggctcatgtctgtaatcccagcacttgggaggcggaggcaggcagatcacttgaggtcaggagttcaagaccagcctggccaacatggtgaaaccccgtctctactaaaaatacaaaaattagtcggatgttacggcgcacacctgtaatcccagctatcacgaggctgaggcaggagattgtagtgagccgatatggtatcattgcactccagcctgggtgatagagcaagaccctgtctcaaaaaaaaaaaaaattaatagtttaagttcatttgtcatcctcttctatcccttgttcaaatccctgtactcagcaatgacattcactttctgtctaatgacgccatgacaggtgacaataaagctaacttcccaaacctggatttccctctatttcatccccaaatcaaaacttacctctcatttccttcctttgcattacaagagatccttcattctttgatttgaccataagattagagaaattatgttaatgactgaaagtagactaatgtcctatcattagattgaatcatatataattgtcatttttgtaagtcaaaacaattgaatgtttgtaattgtatatggcacaatctgaaatgtccagataatgtgcacaggttaaccgatgttttaacgacagtgactggagtagctaacatctgatgatcatgtgactgttcatacactcttctcaatactgcatgcatgttcctggcagtatcatttaatcatcagtcctattaacaacatgaaaactgagactgagttatcagtccggagtcacatcatgacagtgaaagtgccagatcagtactaggctagaatttttatgactttaaagatcattttcttctttgtctccaaaaaggcccaagtgttgaatggtgtgcttgattcagctggggccagtggcaggatcttttgggaggatgggggtacagaggcttcttgggccttgagaatcttatgtgtaggcagtatccataatgactgtgtttagattcagtcttggagaagagaagtcatatgacctactatggtgacttacttcttgtaagttttatgcagcgatgttcctgtagagagagcatgaagagaacaaagccttacctagtccatatcctttcctcttttagtgcaaggcttgaatccataatgtttacccctttactacagaccatagtaatttctctgttctgacatctaacactctgtaacaaacaaacaaattttcattacattttatcctgtatggttgtctcatggagtcatatgcttaaatattatcttcttatccaggttagaactttttccaagacagaaatcatcaatatcttgtctttatttcacattttctacaggatttatcccaacactgagcacataacaggtcactaaatgtgtgtcgaccggttgatcaattaaggtctttgattctaaattttacttccacatctaccattgatccctttatatagtaggaatattaagggtactaaacacaaaacaagttctttctcagacattgaattattaaactaatggcattggtgcttatgccaaaaccatgcactttaaaaaataaggattctagatctgtagtacacatttattatgtattggagccaataagtcaacagctgaaatggttatacctgtattactttcaaaagaaaggaaaaaattaaggggctcagagatcagtgtttcattttgtatacctctaactaaagcatgaaattatagttcgctaagagaaggctatggagattctgaaaaatgtaaccactttggctagatgtcaaaattgaattcattatttcttagaaatgattttagacctacaattcacaatcaaattgtgattgttttttaaacacacacaaacatctctacacacacagtcagttcggatttatattggcactccaagaaccgatgtcaaactaaattttaagtgaatgttagttgtaactctgatacatgtttacaagacaaatcatttcagatgtagcaaatgaatactttaagatgtatttgaaaataccgaaaacattctaaaactgaagaatcatgtcacaaaatgttggaaattagaaccttgattcaatactttgtaagcataggctaaatgggacctaaacatttcattgaagttaaaattagagttaatcataccagatatttaatcacccaatgccttaatgccttaaacagcccagcaaggagcagttgaggaactgtgcagttgagttttaaagtattttgatattccctgtaaccattatatgtctgcattagactaggtctcattgagcagtacacatcaagatgcctaaaatgtagatggctgtataacagcaaacaaagtggttatgaaacagcaggatctcggcaggaagtaaagagatatctcaaagagtacctaatcaaacctgacaaatggtgtaacatcttcagatgaatgactaggcctgtaacatatttttagttaatcttcctcttgcttgccagaaacaggctcattcatgttctttcagtatgagatgggagggtaaggcttttgtatgaggatcataatgcacagaaaccagtgaagatttggtccatcatgtttagaaaagatgaaagagagggctgatttggatatgggcagacttgtttaaaaatagattgttcctgataccaaaaggttgaagagacttctgcagaatagagtttatgattcgtcattccagtgctttgtctgtgaagtgtgtggcttgccttctaggtgtgtgttcttctctctactcttcatcttttctccacgtcatggcgctgcttcctccctattcctgcttcctcataattcaacttccacatggcctctactgcttgtttgacttctctcaattgggcctttcactttcagctccaatttttaacgacttaattctctcccggtaccagttcatattcccaacatattggctcagctcaactttttccatttattctttttcctttttttttttttttttggtgccaggtcatgtttaccacaaactgcctataaatcagggctcgttcctaattaattagccaaaacttgatgagatggaggtaatagatgggtcatagagccaataacatggtcatatggaactgaccattctggagagactgaggttggggttgttattgcagaggttgtcataggcaaccatatgccatgatacataggtctcagaaataaataaacaacattcaggatatttatagccagagacaaaggttgccgaaaattaactttcagtgtcttagattaagtggattatctgagatccattgcttgaaccaataaaatgcaagtatatcactactcaaatattcacatttttttccttaaggcaagattggtcaatttttagcccttctgcataccagcagagaaagatataaaatgagattcaaattttgaattagggcatatccattgactttgaacaaataggctctggcgtagctagaattagacatggtgaaaaccactaaatttacccaggaacactgcagaaacattcatcatatacaggtttattttgggcattggtgaatcaagcttgtcactgtgtctggtgggatcttggcatagccaaacacattgccatggcattttaatatgccttctgactggttacagaaatccttattatttcatgaatgagttccagaaattcagactccatgtgttttttagggagttctgggatcagcattgagaaaaatattgctgttgtgttggagcgtgaaatttatgcagaatggaatccaaatgtgacttgaccacctaaggcttagaaaggtgtaaaacttagctaatacagcactgtgttagccagttcttcccttattggagtatctctgattactgtacaaaaattacctttagaaataaaatttaattaaaagattctctctctatctttctcttaccaagaagaacactggtgcacaatattaatttatggtatcctttgagtgctgaactctatattaatcctcaatttataaagcacaattatatttttcaggttttcttaagacctttcaaatgtttctaataaatgggttaagacatattctctttcatttctcccttctctttaaaaagtgaccagttgagttgtccctgtccaatttttaaaaatatccctactctttaatgtattcaacactacttatatcatgacaagacctttttatagttaaacatgaagtgacttaaatgttctggataaattagtttgcttagaaaaagtcctatttggagatggagttacagcatttcctttgatagattcagggcatgacaatactacccttgaacaaaaatggcactttattaaatggaactcacagtcagccttatttcaatcatcaaagaagtaaaagtaacactctgatgattatgaaaaagaggttggatgagatgtgaaatgagtaatgaacccagagtgaggaggtctgttcctcattctgccttaattatctgtgtgattttggacccctcattttctttctctgggtctttttttcccatttgtgaaatgagggctatagagtattcaatcctttaggatcttttgcctgtattatttattttatatctgatgggaaatacattctttatggaattttataaagttatcatataaaaataaaaatctacttaaaaggcacatttttatagtaagatagcatagaggaaaaatgagtgaatctcaactagattcatctaagggataatgcctggatttagagagtagctggccctgggagatggtagctattaatattactactacatcctactttgtacactttacccagcaaataggcctctgccctataaaaaaaaaagcaagtgatttcacctaggcagctatgtgtgttagtattatgtgactatcctagggctgccgtaatgaattatcgtaaaccagctggcttaaaacaacaaaaattcatttttttgcagttctggaggccaaaagcaaaaaccaggggagaagaggcaatggcctcttccagcttctgaaggctgttgtcattccttggcttgtgggcccatctccctctgctccattttcctctgtgtgtctgtctcagtctccctctgcctttctcatgtaaggatacatgtgatagcatctaggtcccagccaggtaatccagggtaagttcttcctctcaagattatacctgatcagatcttttgccatttaatgtaatagccactctgttgccacaggaggtaagatttgcaggttccagggattaggaaatagacatctgtttctggaggccaccccagttagcccactacaggtgggacagcaggtaactattgagcacgtgcatcatttctgtgggcagcaccatgcagtgctggctgatggttgcacacaggaatgtgggctccgtgttgtaggatcttcccattttaaagcaaaagctagattcgattcaattcaattcaacaagctagatttcagtgagccaacgtcaaatatcaggggattttacacataaatgtgtagacacaatctggattttgtgtctacgtgtttatgtgtaaaatcccttgatatttggtgttcgctcattgaaaaaaagagtctactcatgacaaataaaactattctatgcgccacatttgctgtgagggctgcaatgtctgaaaaacagaataaaattacctttgagagagcactttgtaaccatattcattaactccacaaatatttctttagcacctaatagaataatatttattttagattgaccaggggagagcttgccgctttcagaaaatatctccccaaatgcaactctcatagtttttcttacgaagaaaagagagcattaattagtccaatatttcctttctggaaatattgcctatgtttctgtgcccttcattgagatcagctgagtttcatgatcctggaataaagttaaaatccaaattcaaagtcgtaaatgtggtctgatccttgagtatcttggagataatggtaccccaggttacctaatatctcatacttactggttattcatctcagttagcctatgattcttttataggtaaagaaagcaaggccattcacattccatatagaccataatccctattgagtcagcatctctgaattaggccagtgtgttagaatgccaagtccttcaatttcattcattattggctgataaactgtgtatttctttaatacaaagggagaaaattgttgcaggtgcccaatctgccatcaatagccatgagactttgtacaagttcataaacaccaattttctcatctgaaaaatagggataataacaatacctacttccctatattgttttgagaattaagggggttaatgcatgtgaagtgttcagaagagtgtctggcacacagtgaacacctaataagcattagctatgccaattattttcatcagtattatctttattattaccaaacatgggtaaatatctttattattctatctcctttctctatggcagcgtttctcaaaatgtaatgtgtgtaccattcacctaagtaagaatcatgctaaaatgcagattctgattccttagatctggatgaagcctaattctgctttttaacgagctcccaagtaaggctggtgctacctatgagaagattaactggctgcatgtcataatcatctagaaagctttcaaaaaaataccagaggcataaatgtaccctcctcctccagaccaattaaatcaaagtcactgatggtgggaaccccaggtcattgctattttcgaaacagttccccaagaaaatcgaacatgaggattaaacccctctcttactacataagaatttttacacgctcacaaatgatggggtaaaaagaaatgccagttctctctattacaaattaaactctcatcccacctggaagaagttagcagcataaactgtaacacatctgaagtggtgcccacggttactcttgcaagcttcttatgggaaacacaatattttggtatttcccaacctggtgctgttaacaagaatcatcccttgtttgtgtttgttaatcagcttgatgagcagtttctgtgttgatcttcccaaactgtgttggccagttgccaaatcaagtgcataaattacacactgccctctctccaagctgctcccaaccctgcagaacatcagaaagaatttcctttgaatgcgcaaatctgtgtaagccgattgcttagactgatactttgtggggttggtctgatgtgacatgatcatgtgtcacaatattatgacactgtgatgacgtattttaatgttaagaaataatattttgaccaatatccaaatgtcagtctttttgaaaggtcagattctctttatataatggtgtttcctagagaagttatttataggtcttgaggctccacgtaccaacctaagcactctattccaagaaccaaggagcaacatatggctcagctctactgagatttgttatcataaaagaatgcatgagtgtgctggtaattccttaacaaacattaaggaaaatgagatgccaataatatggaaatttcaacatggttgacttctctttatagaagacactctgggtatcgctaaagtcctattgacctgggacctataggaccaattctaatctttcttccatttctatgtgttcctgtggtgatttctcaccaggtatccatttttaaactgcgatcattttatattctcagatcaggagctctatggtaggaatcaccttagatttgaaatttctagcaggttataaccctctttgagaagtatgaggggaaaatagagaagcaagtagtgaaacctgcattcctaacgactatcttcatttgttatgtgacttggttgacactattagaaaaatgtagcttgtattatttttattactaatattattactatcattattatatactttaagacatctctatcatctcccaattaccaggacataaatctagatagcaaatgtcttttttctttatgttatgcatattcagaaatgggtctccttgtaaatggccaacccatttaacaaaagaagaaagacctgcctaacaaaggaagaaatatattcatttatatattcataaaaataagaataaaatataaagcgcccccaatatttgcatagcaatgtctagtgccttcatgaacagcaaaaagagacctctactgcaaaatccagatattaaaaatgactaaatagggaagcaaggatatttaaaactgggataatagaggtcatctctgaaaaataatcttaagatgtgaatgcatagagtcagctacctatgtcaaaaactacctatcattatctgtttaagaaatagcacacacacacacacacacacacacacacacacagaaaagaagaatgaatattctgcaacagattgctaacagtggggtaatgagaatacatggttgtctatttttttaatgtttcataagaagcctatatcactacttgtataatcgggaaacaataacaactgtggattgacttgaagtgcaatttgtttgtttttttcttttttcttgtttacgctttgtgattactttagaatcaatatatatttttataattcttattaaaaagttattttatacatgccagtatattaatacttaagaaaaatttctctggatctttactcctaggaagttagatttccttctttctaattcctattcaatggctaattggctgattgtgccttctaccatagataatgctttctccgttagtatatatttggaacctttgtatttcttgaatgaaatctcattcagtgtctgtggaaacctgctcctgagatgttcacagatcttttaagtagagacgtaagattaaggagtcttgctgaaatattcgtaggtatatttctgagggcgtatgctgtacccttatctgacccacaatacatcaaaacagcatggagttcatttggattcaaattcaatcaatccctgtctcctggcatgaagaatgaactctctggactaaagaatctttgatcaggaattccacactctctcccaacactcccttcttatccacccctactcacctatatcgccatggagggagataattcttacttataaagatggacaactgaaactttgcattaccacatagaaaaaaagacattcttggatttaactttttgatgcaaaaaggacatatctgaaatatgacgtaggccctcatgcacaggcaagctcaaggattgtgtttgctagaactaaaaattaagaaaagaacagtcccccacccaccacaaaagaaaaaaattcagcagatatttataaagtatgtgtacaggatatcaaatatttgaacaaccagaatttcatgctatgattttttttcatataattgcttgacatcctttctaatctatcattttactcctcatgtgttgcattctctggactctgtctgtatttacactgttccgtctgcctagattgccctagcccttgtcccccttagtcaacaaatgctaatactccaaagacgggagaagatgctccttgttttttcttagagcatttcttgacctcagtgtagaaatacttcttattcacctgtgatctcataatattctgtgcatacatctcttattttttcatcaaatacattatttgcacgttatgacttataaatccagaattctgtgagggtagagaccatgaatccttgtatttcaaccttagcaaacagtaggcactcaataaatgcttattggatgaaggtttaatcatccaatagagttagggggttcttgtcctgaggagaggaagacaggtagagttaaccttcaatgtactaacaaggccgagtccatcttttttctatcagagtaactgcaccaagatgtcatgtagcttttctgaagcctctagagaaattccatcctctggtgggaaaggaggggaataaaaaagtttgagctcaagtccattaaattctttttaataaggccttacaaggtattcagtattttgctttgatagctgtataaagtcagtcttctgacaaatttcatattgcctttttttaagataaattttaattattaaagtgtccagtgaaagcctgacgatttggaggctgcgaattagggagcaatgctgaatgatgcagtgtgacagtcgtgtgcaataatgggaaatgtattcatcttagataagaaaggtcattccttccagtgcccctagctcatttggaagtcaaaatggactgtgagatttcttgggctagggatgtgcaatatttggctaaatattctacctcttgctgccagatggaagagggtactggggagctagtgtggtaatgtgaacaaagcatgggtactgcattcagaatcccagctctttgccttactaagaggtgtagcttaatgtctcaatctgcgtctgggtaatttcatctttaaacttgacatataatagcacctactttagaagtttgttgggaggcttaaataaagtcatgtatataaaattcttaccatagtatctgccacatactaagtgagctgggattcaagtccctttttgtcggtctagctatataaatggagaaaattttttaactttttcaaattttatccttccaatccaccatacactgtacggtgcttagcaaagaagatatgattatgttgaagtgttcagcgttcgtagctgctcagcgactgatattattctactcatatcttaaaataatctctgttgaactcaatgaaatgaattcccataacctcttcacatccttgtctctccttgctgtgtgtttgttagaaagacagtagccccctgttggtggtcctttgtcactaagaactatctttaggctttttgaaattctatactatatattcccacgtgatttttctttcattttagtttattcgagtaagtattgtaggtgtggtagaagtagaaagattaagcaaaatagaaaatgatttctctaatagtctgctttaaatctatatctaataatggtaaagataataatcagtaagaaagccttggcttggcttctctccttttatctggagaactcttttctcttcttcatatagtattacatattgtagatcttgataattgagtgaataagtgaagtgtatttttttttcaattttataaattggaatcttaaggttgagaaaaagcaaatcagtcagcaaatggtttctgttcaattgcagcccctctttccatctgagccagactcttggtcctgcttcagaacagtgactcttaagtccctgttgtagttttcacatttataaataaaaagattgaggtgtgatctcctggagttacattaagcccttgaacattctgtaatattatgactcttcagcaatgttgctataactagaatccattgccatgcttcttggtttagtctttcctgtattgcaacttaatgtgttcactttctgcacttaggagaactttcctgtcttttgtagagtaaccagcatatatcttaagcccagaatgtctgaacacatgagtaaatacagagtgagctgagatgaagggtaaccttgaaaacagtgaagtcacgtgtatgctcacttagacagttaatggggttctgttgattggtacagaaataagtgactgggttagcttatgagggcacaaataacaaatgtaaaggtaaattttacagattctttaatatattcccttaactctcttaagttcctaaattcctcttgtgatgatagaaaacacaggcagcaaaggttttggcattcactgtaccagcatttgtgggtcctctgggaacctcataccaacgtgtttgaagctgttgagtggaatagagaagaaaggaatggctactcttccaaaattcaattcattggggtgcagtattgtaacaagttggttatatacattatctatcacaaagaaaaatagatgttccttgaccatttttgtgagaaaagtcctttgtactaagcaatatagaatgtatcccaaagcagtgctgctcaaagttaatctgcagaacaaactgctaccaatccacaataagatacatggagaaagtgagagtgtttagaaactttttagagcaatttgatataaccaggatattcatttttctattcatttttattatattttacatctgtgacagatcggattttaaaaacaaaaatcagttgttctacagataacttgagaaagactgttctagaaggaatacagttttaaaaaatgaagaataaggaataaagctagggtgggccacctaaaaattttcatgtgactatccatctgtaagtacgagtatgtttgtgcaaactgcaggcaccctttctttagttctgtgtgttaggccctgggcttaatactttccttctcttatgtcttttaatccttgagaaactatgtgctggatgttttttagacccttatatttttggccccaaagtggattttctcacaaaatggcagttatcagcagaaagccctggtttaagttttcactctcattacatcgatcccctgctgtcaaaatgggctcctgatccaggaaacaaggttcccccagatcctgtgagcacggagccatcggcccctgctcaagagtcccagtcaggtggagccctgtgcttcgctgtagagctgttcaggaaattgacaaatttacagccctgtcgctgccgtcctttcagtggggaagcgcggcttctcttccagcaagcggacttagatgtctgtttactgtttccctcaaatgtgagccctgctggtgatgcacgtcgcaaatggaagtaatatcatttgaagcagtcccgctagaagcccaggagcaatctaactgcattaactcttccgtctgagtggaggaggctgaagagggtacaggactggactgagctgaagtgaagaaaatagagcaatacacaatccttgactgcaagtagcaggggtgcctaaagaggtttcacttactgccttcaaatgaatgacaccggggtgtcacaggacatctaatattctgttgacaaatcttgctaagcattggaagtggctgaagcagtggcttcctgtatttttgaggggtttctaatgttgtattccccccttatacctctcagattctgcggattgttgtttctgtatgtacaggaatgccctgtgctggtggttctgaaatactaggccaagaactgcaggcttgctttattgttttcagaaactgcagtctactatttctttttctaatgagcatactatcattttattttatttcactgttttctattttcccagctttactaagttataattaactaattaaaattgtatctatttgcaatgtatagctgtgttttgatatgcatacattgtggaatgattaaatcagacagtctgacacgtccatcacttcacacttatctttttttttttgcaacatttaagatactctctcagtaattttcaaatatactatgctttttgttaactacagttaccgtgctgtacaatatatttccagaacttattcatcctctctaactgaaactttgtaccctttgactagtatctccccattcccaccctgcacctctcacccacccctttctcctctctaagttcaatgttttcagattccacgtgtaagtgagatcatgtggcatttgtctttctgtgcctggcttatttcacttattaataaataaactaagattcaaagctgttggggttttgtagctttcttgtaataaataatagccaattagttatcctgcaatgggcgttaggactcagacatttctctgtccatacttgaactcctataaaccttattacccagcacgttgtcttttcacagcctgatttatgctgtggatttgattgtttcctaggtatagtggaaaaagagcatctcttaataccattcatttattcagtgcatctttacttagaattttcttcaaacacggatattaagctgccctaagtggtctgtgtggcctcatctttaatctcatggccacaccatgaggctcctgttaataccctccccattttcaggtgaggaaactgaatattagaaaaggcaaataaattgcctgacgtcttaggatcatgaaagttgttctttgtctcattaagacatttaaggtggtgttagacaagatatacaaaaagtttagttacaagtcattagaatttatatatacaactctctgtcatgcatgctctctctctctctctctctttttatatatatatgtatataaaattagcccgttttcaagttgctaataaagacatacccgagactgggtattttatacaggaaagaggtttaatggacttacagttccatgtggctggggaggcctcacagtcatggtggaaggcaaggaggagcaagtcacgtcttacgtggatggcagcaggcaaagagagagtttgtgcaggggaactcccgtttttaaaaccatcagatctcatgagacttattcactatcacaagaacatcaggggaaagacctgcccccataattcaattacctcctaccaagttcttcccacagcctgtgggaattcaagatgagatttgggtggtgacacagccaaaccgtatctcctatatgtgtatatatacatatctatatatgtatatatacacacacatatatacacacacccatatatacacacatatgtgtatatatacacatatatatacacatatacacatatatatttgtgtgtatgtgtgtgtgtgtgtatatatatatatatatatgctatcctgtaaactgtataatctaatctagatgatgtgatgaaagcaagacatgggactatagtccccaactttcacaaaatatttatccagtagaaacatagaatatgtatccaaaatatgaatgtgaaaactagaatgtgatatgagatgaactttcagatcttcctcctaaatcaaaattacaatgacctgatttggatgattcaggagtgctttgaaggagatagtatattagtagaaacttgaaagaccctcaccgttagagataggaaggtaaaagattccaggagaaatcacaggaaagcagaaaaattgaaatagtgaaagatagtatggcttgggtaaaaatgtttatgaaagggtttagtaagagttaaagcaaaacagtggattcgggtgaggaaatggataacccgaaaaacaagccaatgaacttggtaagaatgaagtttctgaacttggaggtaccatgttcatagtggttttggaaagttttatttgtacaggcttgagtacaatgggttatggcagaagcttgggagaggcaaagcatgcagagaaattggccaggtggttgtttttctttgtttgtttgtttgtttgttgtttttttgagacagagtctcagcctgtctccgagcctggagcacatggagcgccatggtgcaatcatggctcaccgtagccttgacctactgagctcaaataagtgatcttcacaccttagcctcccaagtagttgggactacaggcatgcatcaccacgcttggctaactttttttttattgtttatagaaatggggtctagttatgttgcccaggctgatctcaaattcctgagctgaagaaatcctaccacttcagcctcccaaagtgctgggattacaggagtgagccatcatgcctggttggctgttcttatatagttgttaagtaacatagcatggcaggggatgcaacagaaatggaaaggaagatctagatgtgtgatatatgaaggagtggaatcaataaaaattgacagcatggtattggagtccaacatactggttcttaactagtgttcaaactcctgtcacttgttagacttgtggtttgtagacaagctattgaacctctcagaggcttgaagaagcaacaagcttgaggtttaggccttgctgagtcactgagtgtgtgtccataaggaaggacacatctgaagcatgaaagagtgatcaggtgaggataagagctgaataactaaagatgcgaccctgccagtggtgtccaaatgtgttgataaaacccaaaacagttacttaccaagtgtcaaatgaggattacattgatgtctcatagatgtaagatctcagaggctaagaatactcataagggactgtgggtagtcctcagctgggtagaggaaaaaataaaataggcgttctaagggaggatgccaatgtgagtcaggcttggagacaagaatgctccctttgcatttcaaagagcgtgaaaaccactttaatggactgcaaaaacataagactccaaaagaaggctggggccctgtgcaaattgcctttggatttgcagatttagcaaataaaaatacaggagagccagttaaatttgaatttcagataaacaacaagtaatcttttttagcataagtatgcactgagcaaaattatcaattgtttatccaaaatccaaatttaactgggtgtcctatattttatctggcaactcgatgtggagtgccacaggaaagcatttggactttattcagcgagaaccatttgagtggtatctgagcaatggagtgacaagataaaataattcttaggataattaatttggtgtgcgggatagaggagacgagacctcgaatggagaggacagctgtgatggcgtagggataacacggtgagagctgatgagaactcccctttcttctattatcgtctgtcaacgtggatttccattctgtcctgtcactccagttgtccctcattcctgatgtcacctacatctcctgcagaatacatgatgacctgcacttcttgaggttaaaatttctccttaacatgattccttctttcttttgtttttctatctttgtcagttggcagcatgttgttaacacagtagttctaggttaagtaaaatcatcatttctcagagataaaaatagttgtctattttcttttcaaacccagttgtaaaacttgtgtgagtccaagttgggataacttttcagtctccttttctgcttgtacctctcaatgcatctcttcagaagattccagtaagatgtccacagggtacacaacataagttattgaccatttggggttggggggtatctgcttatacgacactctagccacactgtaacagaggtaggaggttagagatactcaagctcccctttgtcccttttctgcgcctcaaaggggtgacataaatacaagggttgagggaaatgggaccttagagacaaggagaagtctagcagagatgactgtggtgatgctgcttacaggaaacccaggccctgcttgaagaaaagccaaagtcataggtgagaaaacagtggcaaggagaagacacaaaacatgcagacattcactgaagactaagattaagccatgattttaatacgtcctctccaaaattcatggtgaaactttattctcattgtgcacgcatttagggagtgattcagacacgatgactacaccatcataaatggcttagtgctttataaaagggctgggggaaactagctttggccctttggcccttccacattctgccatgtaaagacacaatgttcatctcctctggaggatgcagcatcaagatgtcattccctcaccaaaaactgaacttgccagtatcttgaacttggacttcccagccaccagaactatgagaaataagtttctattctttataaattacttagtctcaggtattttgttagagtagcataaatggactaagacaagccataagaattagagctcacaaatcaaaggcaagaaatcagagtggttcataaactcaacctgcttatggttgtgcagggcacttgggtcaagggagcaagaggcactgaaatctagcttaggatccctttgccaagcagtctacatggttgcatccagtaaaaagggacagctttatcttattagtgtgaagatactctataggctagtggtgggattacaccatgcagagtgtgaatcctggcaagtagttgaaccgtatgatctgatacttgatcatcctgaacctgagtctcttcacctgtaaatagtctaataataatacccacctaggctcattctgagggttaacaagattgataagctataatatacaaaatttttatcataatgactggcatgtggctacaaataaataataaccgctaccaggaaaactctaaaaaaaaagacccaaagggtgtactaagctatttagaagtcaagtaaaatgccttgaaggcagatttaactttataaagataatgatcagcaaacttattctataaagggccagatagtaaatatgtaaggctttgtgagccataatctctcttctctatcccatatacttaaaaaaaaaaataaccctttaaaagtagaaaaatcatgcttagctggtgggcaataaaaaaaacaggctgcagactagatttggatcatgtactatagttttctcactcctagaactcaaagagaatagtagtctatgagttcagaaatttgggatacctatgattttagcatggagccaggcaacaaacaggtagaactcattacttgcttgccctaaggcctcagacttacggttgatgagagactatttgtctagttcaagattagatgtccaggtcaggtacagtggctcatgcctatattcccagcactttgggagaccgaggcaggcaggatcacctgaggtcaggagtttgagaccagcctggccaacatggtgaagccctgtctctactaaaaatataaaaacaaaattagccaggtaatggtggcgggtgcctgtaatcccagctacttgggaggctgaggcaggagaatcgcttgaacccgggaggtggaggttgcagtgagccaagatcacgccactgcacttcagcctgggtgacaagggcaagactccatctcaaaaaaaaagattagacgtcccatcccagtacaaagtttagcatgctgtacaagcacaataaatgatttcgagggaatggattgaaatgtttcaaagtttgttgaggatgggtatggtggatcatgcctgtaatcatagcactttgggaggccgaggtgggaggatcacttgagtacaggagtttgagaccagcctgggcaatatagtgagacccccatctctaccaaaaaaaaaaaaaaaaaagccagttggttttttcagctagattttttcatctgcaaagctaagagaacaatggtgtcaggaataaataaattactatataaagtgtatttattataatgctggtcacgtagtgacaataatctcatcctcatcatgtttcagtgtcttctttgtgaatatgtgcttaggaatcatttcaaattattgtgtaaactcttatcacttggtataaaaggagaaactaaaagttttaaggataggctgactaaaagcagagaaacaagaacctagtctatcaggaagagtacagttatctcagaatgatgatcatttgttcttttgttctcaaaacaagaccttcaacaaaagtcatggctttctacctctgatgctgactgtgaacgaatctgagcctttactaactctcatgacctttgtcttcttccatcttcccaggtatgaggcaaagattaaagccatagacgctccttggggaaaggtgctgttataacccacgtgggtatcattagcttgaaatgtagaaggatgaagattttgaatgaaatagagactttattaaggagtaggatgcctgtagataccagccaattcatgctgtaaggtatttcttcaatacacttcttgtagaaaagtaagtggtggttacaaagccatgatattcaacttagctgtcaaacaagcagtcagcttacaccttaagggaggaaggaaactgtttgaaatgttgcagaatgtgggacactgtaggataatgaggagtttctaatcaggagacagtacttatatccaaaacttgttagcctatgccttgcctcatcggcaaaatgggacaattggacctaacagagtgtgtgccagagggtttttatgaattgcttccaggtgaatatccatgaatctgatgatacttgaagacactgactctcataaataaatgaaagccaaatttgaaaacacatgtgtagttggaaaggcgatttcaaataatcgagacatacttatcctctatttttgaaatgaggttcagaattcagctggaattacaaggctcatcaaacactttgaacttgatacagtttaaataggctcatctgagcaaagtacagaacagccttcatttcccaggttctgtcagtcagcctgctggattgactggtgatgtcttgattgggtatgattccccttgactcatttctctgttgctggtaattaaaagctgtctagttttgttctcatttaacaataagtgaaagggtaatgtctgccagacttttccattcacttggtgtttgtaacagttgagagccttggagcaccatgaattctaagctgaaggtaactatcagtacagatagtgtattggtgttttgcacctgggagctgactataaacctcaaagccaatcggaaaacagtccccagggtaaatggataaattgtcatagatgaccttctcctctcattccagctttgaaaaacagaactttctgtgagtaggtagaataagctgtctgtcatttgcagtttccagcagtctctgagactagtgcatgtgcctaattttacactggaaggagaaaccatgtcgaaacgcagaaggcaaaataagagttaggctctctctaggctcagtatgtttagttctggttcttaaacctttcccatcattatggttttaatcattccgatcagcattattataatcacaaaatgtcagcctaagaaaacgataatctcatcgtcattatgtttcaatgtcacctttgtcaacttgtgcttagctatcatttcaaattactgtatcaatgctgcaattagatataatttgtgatatgaccagcattcacaggtgagtagtttaaaaaaaaagtctcacaccaactgaaatactttattattataggtctattctttcagaaccaagtatgtttaatgtgtgctttcatttgagaaatatttcaaatcaaaatgttacattttaagaatacatgacttaatatttatgacttgaatattataactgtgtgaatttgaagcactgaaatctcccattctctataaattttattattaagatggcatatggaggttttttcaggattgtcctcatgcatgcaattaatgaaattcaaatgtcttttttttaaccagtaaaagtgcttattgaaattgaccattctgtaatgacttctactctttcattgcacagaagcataggtttaaaatattttccattctgttaagttttcttttaaaccaagataagattaaggtataagaaaggaagagaagtgatgatttggagaaaggtttcctaccttctcttacgggaagatgagacctaggtttaaaaagtaggactggttgatcaagcataaaagtgatttatgaaatatgacatctctgtaacattgagaaaaaaatgttttccttcattgagtgctttcttccatatgcaaaatattgacacatccctattatatcaaacaaaagccttcattcagagagataattttatagagcggctggtatcatgtgatcttattaatatttatgaaatatgataataatatggaaaagggggaactggaatacagccctatctttctagaccctattcatttcagcttcaaaatgttttttcatttcacacatcagacgctaattagcaaatatctaattagtgttagaagattaatcgctcatgggagttgttgaggctttgagctttcatgcatgcaaaaacagtgccactttaggtgcatttgttaaggtacagtaactttaagtgatacaacttttatttttcttcgaaaaatatttaaattacatcgttggagtaaatttaggctcaagcaacaaggaagcaaggaacacacaattgaaaaataaaaatgacactgtggagagccacatattcagtcaaatctccaagtgtcaggcaagggtctactctgttttaggcactgtgggaaactatcacaaatttagagaatcatcaagtacagctcctgatttgcagacacttagggaattaccataggggatcaaaatccaaggactccaggccaaattcagccagacatgtgtgtgtttttgtacagctgtaaactaagaataggttttacatttttaaatcattggacaagaaaatgaacaaagaatgatatttcatgacacgtgaaaattaaattcaaatttcagtgtccataaaaaaaattgtgttggcatatagccatgctcattcgtttatgtactgtctgtggctggtttcacaccaaaacagggcgagttgagcagttgcgacagagaccatatggaccacaaagtctaaaatatttattctctggccctttaaaggaaaaatttgccaccccaaaattaaagataaatatctagatgatagagcagagcagctttgggagtcaggtagagccatatcagttccgtagtttgttacctgtgtgactttggcaggtgatttaaaatttctaagcttctatttatagtgtagcaattatgaatctcttcatagatctatagaaactgaggatttaaagagttgaatgggattacttacacaaagtacctcatctgttttctgacttatagtagataaagagtaaaagtcactgccttggcccccatagtttccaagatacaacataaagttaggtttctttatgaattctccctctcaccttccttagaaaggttcctaaatggaagggcaagtggcccagaagtgggaacggtactatttttcacctgtttcatgaataagatggaaaggggataggtactaaactaaaatgatctcactagagatttgtgcttctaatattataggactttgtccccatcttgtccccaaatgcccttaagcatcaatcccttcttctaataaaacctgaagaaagtagctagcaaaaatgtattgttaatgcaagtttcaatgatgttgttcttattttttcactcgtaaaaatctctgttcattccaaattcctatttacaattcatagctgtcagatctttcatttaagtacacacatattaaatttattgactatatcctgcagagttaatgatgggtaactcattaaatgccacggggagtctgtagtttataagtaaaaaagaaaattttagagggtgaggtgttttttgagagagaggtttggagtaaattaaaaactttaaaaattattctacaagctgaaaaatctctgtttcaaagcagcaggaattttaatcaacacacacacacataaagagagatagccgtctcacttcagtgttgtaaatagtaggactggcttctagaatcaatatatctgcactgaaatttggtcataattcaaattgctttaagtgttctttggagacaagaccaaaaactactgaaggggtttaaagtgaggtttaaaccaaagatattacagcctccaatgtatctctgatacctccaaggagcattaattcatttcctctgaaacaatgtgcattaggaaaatattttgaaattatactgattttacatgacagatacataaggcaataatttgagaaataaaatcacaatcatagaaagcatataatcatattcctgaaatataaatagcaattgctttaggggattgttagagttggggcagaacaagaaaagctagtgtcctgaaagtttaatcaatggtcattgactaaatggtcatgccgccattttagtcaacggtcactctgtgtactcaacatgcctactcagtctggaagtatcctgggcagtgggcaagttgtattcagagaagggccagacatggggaatgaccttgaatcagatggaaggatttgccaccaattgcataaggtaagccagaagcccttgaggtctctcaccaggaggttttccctccaccttccaaaagccagaagagaaggaagaaagaaagtgattataacaaaaaatgccataagtcagtcactaagaaggcgctttgtattgaagagaaggatggtttaacacatacctttcaagagcttctcttgaaaacaagtgaacttcatgaagatttataaacatggtctgcccctaggagctcaccatcaggtctttccttggcatgtatgtatctgtacatcatgtgaataagaatcaccatgaatgggggtgttatcaaaagatacagataactagattgtctccctgtcttcctccttctgaatccatgaagggtcaagcccaggaatccaaatgttagtgaacctctcaagtgattcgtatctacctttaaatgtgagaaaaatatccctgggtcattgccaaatatgaaaaacagtcagttgcatagcttttgtattgtcattactggttccttcatacataaaggcatctctcatgaagtttttgttgtttttcccccaaacaagaactttacctttgccaaccattgtattttctggttttttttctgtcaactacaaaggatttctacactagaaattcggaagattttataaaaccaataatgagttaggagtcagccacacaagatggcctgaataactggacgtcacagttatttcttgctttggaccaaaccaccccaaaacttaggagcttgtgagtcaactgagcaattcttctgctggactcccctgggatacgtcacatgactatatttgtctccaagcttcagtggagcctggttggttctcaacgtgtaatcacttgaccagcacaatcagtatcacctaggaaattgttagaaatgcaagttctcaggtgccatcccaggactactgattttaaaactttagaggtggagcccaggaatctgctctaagctggcttccaggtgattccaatgctcactcaagcttaagcacttccgtttagagagcatcggagggggtggtactcttatcatcctgcaagctaggctgagcttcctcaaacggtggtaccacattccattgggctgaaaacagatgttgagatgcctcttgagacctaggcccagaagttgtcctgtgtcatctgtgacaccttctattggtcaaagcaaatcacaaggacagttttaattcaaggggaagtaaaatagactctttcctcttgagaggagtggtgaagtcacacagccaaggtgcctggatatagggatgggaataattgttctggccaccttggtaaacaaccttccatactgagtaataatataatagacttaatgctttattctcaccaagattccccaatattttcctaaaggatttttctcttctttgcaaaaacaatgcctattttatccgttttatagagcaactgcaacaaagtaacacaaactgggtgtcttaaaacagtagaaatttattttcacatagttctggaaggctggaagtccaaaatcaaggggtcagtttgaccatgtgccctttgaaatctgtaagagagaattcttccttgcccctttctagcttacggtgatttgctagcaattcttggtgtttttctggcttgcagtcgcagcattccaagctgtagctcttgtgtcacacagagttccccttgtgtatctctgtgtgacattctcttcctgtgtcttaacatcatcttcctataaggacataagtcatgttggataaacatggctatgtttactaatccactatgaccttgtcttattgaactaactgcatctgcaatgaacctatttccaaataagatcactttctgtggtactggggtccaggacttcaagatcttttgggagacacaatttgatccatagcatctacctggatttgagtcatatggctgactgtattttatcatatctgaaatcaagaagtaactgtactgggaggaggggcggattctaagacctctactcacctctgaagtcaccgcttggttgtgtatggttgaccctcttgtgtgaatagatatataaatgtttgatggtttagtaatcttctggacatggggccctggagagaattatcagcacagaatgtgatacttacgtgggctatgatggaaaagccacagaggatggtatcttcctgagctctgcattttaaagtatcctattacatagcatgaaaatcacgcggtgccatttagcataataataccaggggcacacttaaaatatcatgttatagcttggaaacattgagagctacaatgggatttcaattgtgtaaagggatgtttttacatcatcttccctggaatttatcaggggcacttttattctattatatctctagtgtaatgagactcatgctttttgaatgtttagaccctgcctatatatgtagagtttttgtctagctatatttatatattgattcattaattcatctacttattattcatttattcatccattcatcattcacgctttcattcaacaaatgtgtactgggtgcccctcctgggagacagacactagggagtcagaaataataaaactaattccttccctcatggagctgatattctaaggagagatacacaattttaaaataacgaaaagcaaaaatacactttcaggcaataaaatgtactatgaagtaatatgtgtgtaattggggaatagaattaacatttgtttgaataactctaggcatcatgtgaaggtatattctgtaagggcttgttttttttaatatagcagcgtccaaatacatagttcactgtccctgagaatggcatggttactgctcagtgacccttttcaagtcattgaaaatattttctatttgctgctgatctatttcaataattgagcttgttgggacagctgttatgctatgtaaagagcggagattttggctcctgagaaccctgggtttgaactgaggattggtggtttggttatttattctctctgagcttggcaaatgtccctactaaatgaacataatactgccttgttcttaggttgtcctaaagcttacacgaggtgacatatgtaacactaccaaccacaacctccatagataactgcttaacacatatttgtacacagttttctctgtaatttcattcaagcaatttgggctttttggtggtcttctaaaatggccacttttaaaaatagtctatgaaaacagatcagtcaaagatcctcttctctataatgatattactcaggcacctgcacacaatgaaagtccaacattaaagggcagaatcttgctagataaacatgttttttaaaagatttaattgtcacggctcccaaataaaataatcgtggttaatttttacatcttcaaacacgtatgtatggctttctgatagtgcattatacatcaaatacaataaaaaaggcattaacaaaaaccacttacactaaaatctgatttatgctttcacataagatacatggttttatgcttttatgggtacatccaaagtttgtgaacttttacaaagccctatttaaatactctgctctaagactgcattttatcttcctaatttgggcataataatcttaattatatctactgcacaggctgttggacaaggttccttttcgtgccctccatgagtaaatttgaccatacgtacagacttgacaggccatacatacaaatgatagcaataatattggtaaggaacaaacttggcagcatcgtatagaatgcatttcaaagtttagtaataatgatttgcaaataataacatagttctttagaaaaaagttattgacacttatcacatatgaagcagctcattcaatgttcagaacactcattcgagtcagaaaatattattgtcattttatagatggagtacatgagacccagagaaattaaataacttctccaaattcataggctagaaagtggtgaagcagaggtttgaactcattattcttcctccagagtttatacacttagctgccatgctgcgtggaccacctaatggagaacacatccgggccaagttattcatctcaattgttgtggggctacacatagcatgtcttctttttttgtttgtttttaatgatcataagcaaatgcctgactttcaaattattcctatattgaatgagtcattgtctactggaattgtctcccataaatggcatgatctccctaggaaccttagactgtgaactttatgctgctgagctttcaatcctagacctgaaaggaaatctttaatcaagaaatggagtctggtgcctcagtgagctcagacctcccctcgatgactaacgctaagtctttgctcactgctgaactgaacattaaagtgacagaaggttgcacagaaggtaaatattctttgcgatgtaaacctaaattaggaaagagagggtaggattgatcgtgaatgggtgcctgcatttgatagtctcatgatttaggtgtcctacggagagagggttggcagcgactccagttaaaaaggggaggggatgctccgcaaggcagaaataatgacaaccaagcatcagatattccatgggctcttggctttcttccatgctcaaaagactaaactaacctctcggtcaacttcaatgtgctaatttacaacttaacactcttaggccatatttctgtccctttccccataattgacacctcaatcattatgctggcctcctctcctgggcactctcagtatacagactctgcttatctcaccttcaaagtggcagtcccattgcctgcaatgatacattcctaacatgtcagcccaaagcacagagttattccagtgcgacttaaacttgaagtccactttttttgatagaccagcatctgtctggaagtggaatcttattattattattattttgagacagaatttcagtcttgttgtccaggctggagtgtaatggcttgatctcggctcactgcaacctccacctaccaggttcaagcgattctgttgcctcagcctcgcgagtagctcggattacaggcacgtgccaccacgcctggctaatttttgtatgtttagtacatgttggccaggctggtctcgaacacctgacctcagatgatccacccgcctcagcaccccaaagtgctgggattacaggtgtgagccaccgtgcccggccttggcggtggaatgtgaatacaggtatttgctctgcaggatccattaagagcagcggcacatgaagggcaaagagtggttttggcattacaaatgcttctcaaccacacttttgtttttcgaaatattttgaaatgtttatcttaaatttatttctttttaatcataatggagattcatgccaaaatacagaaactattttgtctataaatgtggaatcctataatagacagtggagctacccggggactttagagtttgcacagtttaactttctctttacagatgtagaaacggaggctcaaagaggtcttatgcctggtccaaggtcacatggctagctgagtatagcctcataatagtccctaagaactgaagatgtcaaaatatgcaatgagctcgttttctctttgcacatttaattacttctatttttctgttttatcacatgtccaacatattcttcaacccttcaatttaagggacaaagggaaaggtggagacaaggataggaataagaacacattggcatctattaagatcatttacaccaaatcagaaacataaatataatccatcagggcactttctcgtagcaaatcaaggagttttcccttaagtaattataaaacaggttaaaggaataagaactctggtcattcatcgattcttgatttttattcccagacttatcattccccaggatgagaggtttgagagaatagatacatttgtaaaatgactagaataattttacccacctcagggattcagtgagtgtttaataccataaaggactttgagatagtcagatgaaaggtgctttagaaggcagacatgattactggattagaatttcagagagtgagaaaggactcttttgtgttgacagacttttttcttattctttttgcagttctatagtggtttaaaattttttctcctaccaatttcttcaatttcagatcatgtccttgacttggtactgctctcgtgagaaggaatgtgtggttggtgtaaactgtctagctccctgtacattttttttctaataagcattttagcatctttgaattcacaaagctaattttcctcattttccacagtggcaatgtttgtaaagcacaatgaaatcacctggggacagtgttctttaaggcagtatttattacaggtcacagacacacacacacacgcacacatacacttccctgtattgaattgtttggagaccacaccaattttgtttcattctacaagggtttccataatatcattaatctctctcagctcttcaagatggcctcttaccatattctgtcaaaaaacaagatatagaccatttactttaaatacctaaaaataaaaatgctgaatcaaatggttacacatacacacacacatgcacagacacacagagctctctaatgtatttttcagttgttggaaatctgtgtgcattgggtggggggagcaatggaacttgcagtttattgagagtgaaatgttctattgcattagttgtaaaatgttctttgctattaaaataagtagtgctaattaataatcctgcagaattgtagagcagcctttgaactacaagaatagattcttaatccttagtatcaatagcagaattctccttctcctttctctctccgtccttcctctcctgcctctcttccttctttctagaagtatctatcgcaaaaatactgtgctaggaactgtgtttgtggtggtatatcagctcagccaatcgtagcagagcaatcttatggacctcacccaggaatgaatttcaacatatctttggtgtgaaaagactgaggataacaccaaccccgaatctataagctttgttttattttatgtgaaaggcctttttttccctcttggtcactcctgtactgtatctagtacacttgaactttataaggctaatgaaaatatctgtgtcctaaaaataaaatgtactggctccaaaatgaaaataaaattacaaaatccaagttaattaagtttgattaaatatctactgaataacaaaactaacatgatatcagctagtcaactgctatccaagtcagctgttatgcagttatatataaatcagatatttatacatcttgtaactattagatttctgttttggcctaatatggaggagtggggttttttcaaaaagaagcagcctaaaaacaatgaggacctaaagtgtccctcttcagatgcttttgttttcaaacaacatctcaataatggcaatggagatttgatgtatctgtaccatagatttaaaaaaagaactctacctgttaccaccatggggatggaggttattttatcatacacagtaactttgtgatgtgttagctgttttttgttttttttttatagtgtgaatacatttccttctgctttttctatcaactaaaacgttgctgtgagctgactttcgttccattatacttctatgcattcatggattcctcctttaaaactattgccaggtgttagcatcttccctgagtaatttcaggcatttcctttgaatgaaaatggctcacttggaaggttgtgaaaggcataaccatgtggaattgagaggattttgtgctgcgatgtggtgagaaggcttgccagaaattgcctgtttcaggctgatgatgcaaaactagacatctgttaaattaacatctacctaacgttttgccttcagtcaaatgcattttttaaaaaattaaatctctcccactctcttcactttcttttttttccactgtcaaaacaatctgtcacaagatatttaatttctgtgtaatgggttacttaaagaaaccagcatatggtgcagtgaatatacctagctacaagctagaggcaaatgtacgttctgctggttcgctgtactactgaagcatattgtgcccagcatagatgttattatggtgctggattccctgagcgctgatttacattagtgccagtttctcacaactcttgccttttaggatcaaaatattagtataaatattcttgttccaccaaggagtcagaaatcactttcgactttggttaagtggtgggcgtttatggctctaacatttcagggagggagaaagaggaatctcattatgcagacatcttcgcacacccctcctgcatccaagaatttgctaatagcagtcagctgatctgtggcctggcagtatgttctagaggagtggaatctttcacacacttacactgacaacaccccggacaccgcgtgcatccctgcaggctagagtactttctacacaattacctttttttttgttgttgttagtgtgtgtgtgtgtgtgtgtgtgtgtgtgtgtgtgtgtgtgtgtgtgtgtgatggagtgttgctctgttacccaggctggaatgcagtggtgtgatcttggctcagtgcaacctccacctcctgggttcaagcagttcttctgcctcagcctccaagta

SEQ ID NO: 5656 - DNA, 46127 bp, Homo sapiens
  EDN1 gene - 12398645 - 12404771 of chr6; NCBI Entrez Gene ID: 1906; Build 35; sequence includes 20,000 bases upstream of initiation codon and 20,000 bases downstream of termination codon of the gene
ccctcttagaattgtttttgctgtatcccataggttttggtatattgtatttccattttcatttgtattaaattatttttaaatttcctttttaatttctttattgacccattggtctttctggagcatgtttaatttctatatatttgtatgttttccaaaatttctcctgttactgatttctaattttcttccactgtggtctgaaaagttacttgacataattttgatttaaaaattttttttgacacttggcttgtggcctaacatatgatctatcctgagaaggtttcatgtgctgttgcgaagaatgtgtattctgtagcggttgggtggaatgttccgtaatgactgttaggtacatttggtttagagtgcagtttaaatatgatgtttctttgttgattttctgtctggatgatctgtccattgctgaaagcagggtgttgaagtcctctactatcattgtattgaggtctctccctccctttagatctaataatatttgctttacgcatttgggtgctcaactgctagtttcacatatatttacaattgtcatatgtactactcctgctctcttttggtttctctttgcatggaatatgagcttccatcctttcactttcagtttatgtatgttcttacaggttaagtaagtctctcacaggcaacacatacttgttttttttttaaactctatttagccactttatatactttaattatgaaatttaatccatttacattcaagattattattgatatgtaaagacttactcctgctattttattaattgttttccggttgttttgtttatcttctgtctctttcttcctctcttatggctacatttatgtttgggtgattttctgtagtaataaactttgatttctttctctttctcatttgtgtatctgcagtaatatttttctttgcagttattctggggcttacataaaatattgtatagttataatagactatttttagctgataataataaactttggttgcatacaaatattctagacttttactatcccttctaaaatttttaattttgctgcttaatttacatctttttatattgtgtgttccctaacaacttattgtagctagacttatcatcgaccatgttgactttttaacttcacagtagagatatgaaagattatgtaccaacattatggtaatgaagtattttgaatgtgataataaatttacctctaccagtgagattagactttcatatgttttatgatagtaattattgtccttttgcttccaattggaatacttccttaaacattttttgtaaggctggtctagcggtgatgaattccctcagcttttgcttgtctgagaaaaaatgtatttctccttcatttctgaagatagctttcctgagcataatattatacatgacattgtaatgacactttgaatgtattatctcattttcttctggcttgtaaggtttcttttgagaaatctgctaatagtctaatagaaattcttgtgtatgtgacttgatatttttctcaaaaagcccccaaatccaaaaacttttttttaagaatgtcataaatgactaagctagaaagagagaagaaggtgaagttggagaaatgcaggacaatacatagttggagaacagaaacaaaagtctacataaaaaatacagttgagatggtgtaaggctaccataatgtaaggttaagggaatcctctctttctttttcagtgactcagagactggtcactgcttgataaaattttttttctagataattcactagtattagaagagaacacagaaaccagggctacctttttaactcattgtttcagatatagggtgaggagtggtgtgatgaggcagagaagctggaatttgagctttggttaggaaaataaagagaccataggaagagctggagtgaggaaaaattaattatgcgacttcttctcacacttacatacatgcaaaataagtttacataataattattgagtcatactcttttttttttttttttttttttgagacagagtttctctcttgtcgcccaggctggagtgcaaaggtgtgatcttggttcactgcaacctgcacctccttcattcaagcaattctcctacctcagcctccggagtagctgggattgcaggcatgcgccactatgcccagctaattttttttttttttgtatttttagttgagatggggtttcaccatgttggccaagctggccttgaactcctgacctccggtgatccacccgcctcggcctcccaaaatgctaggattataggcatgggccactgcgcccagctgagtcatactctttaaggaatatgtgtgtcaaagatagccttgaaagagaaaagaagtggagaagatactccaaaaactcaaaatggaatgtcaggtgtggacagaaagagtttgggataacagggaaagtgtttagagcagagcaggagggaagaacacatgggactggtgctattccaggtgttaatcaatgtcctggaactgctgtcactgatctaatggggatctaggcaggaaagacacagtccctcttctccaaaatctcccagcccagtgatgagcactaagtaaattgtgacgactctacagacttgcaggtgctaaggtgggaacccatggtgtgcactgggagcacagaggagggacctcttgcccggtgctaagggaaagggggtcagaggaggcctccccaggaaaggtgacatccaatccaagtcctgatagagagtgggggctaggccagcaaagagatgtgtggaaatgcatttcaggcccgtggaaagtttgtgagatgggagagcatgactcattcatggaaccgcaggtaggtattatggctaggataggataatttttctgaaatgtggtcttttctcagtgatagggaggaagggcaaagggagagatgcacagtgtctctctcagaacttaaaaattttaataaggcaatgaatgtatttgtatatatactctaaatcatttggatgatttacatatattcaagagctataacagtaaagaaaatttaagacaataccaaattcagcaatttttttttccttttaaaaggatatatttaaacactgatgagagatgcactagaattgtaggcaggacttttttttttttttttttttttcagttatggtttacctgcaaagttcctagtcctaacagtagttcaggaatccacagatgtctgaagtgtgagctagcaccccaattcatctgaccataggaaaggctttagtggactcatacaattcaagtgagactctggcactgtctttgagtttcagtaagtgcctttcctttcagagatactggagaattagaactgtgtagaaagtcttccagcgtacaatatagaagcacaaatagagccattgaccttaatgggacatttgaggaggtcatacaataaaacagcagtctctgttaagaaataacactaatgggcctgggggtgctaaatagagggtggattattttcttacccatatattgtacttggcttccacgtcatctggaagaaatttcatctgttatcttcacttggtcttcattcttattttaaaaaaccttctcttcagagcagagcaggtatctggtgaattatcactgtgactaaacaaattgtcctttgcccagtgatttttaaatatgtacactacccaccatggaatttactaggccagctaaaacttgagtaggagatataactaattctaatggattttattttgatgtagataagtactacaatttagaaaagcataaggcaattagcaacttaagaccttgctaataaaatgctatttcactttctggcagagagtgcaatagacagagatcaattctaagagtaaattggttgaatattagtgcagagccctgtgatgccatcaaaacatattaggcatatttactatatcatggaaagtcctcagtaatagcacatacctccctgatggaaaaagtggccatttatttttaaaacttttatttatctcagctcaaatttttagatatgtttctcccccaattagaatatgagaatagggactgtattgtttacaactaactgtattgccagcatctagaacactacctggtctgtaataggctctccataaatattttcagaataaattagaatcatctacacacctactttgacatacactgtctggtgctttcagatctgtctcactcaatttttgtcagagctagtcagacgtcccattggtccaatgtggaagctgagatcagagctaactgtccgaggacaaatagctagcaagtgtcagatgtgggattcagcccaagccttctaacttcactctcaagaatgttttcttgtctaccttggatttaaggaacaattctggttctttgctgagaggactgggtactggctgctagaaagctttttgaattatttcttccttctccttccttccttccttccttccttccttccttgctccttccttccctccctccctccctccctcccttccttccttccttcttttcccccaaagacccctgatatgaactagataggttactagtggatttccttccagatttcaatgtttactgatataccaagacattatgcaacctcaaaacacttctaacccaagagcacttctaatggtacccacgggggtccctcaggactctggctcataaatgggctgtcaggcctcagagccctcagttggccgcttggggctcttccctcatagacatgcttccttgtgtcacatggacagacagaaagtactgtcttgatgagtcatttttggctctgaagctacttgtcactcaggaggcaggagagggatgtgatagaatctttgcctgaattcttgaagggagaggcttggcctggttacacatatttcttttgttacaaaatcctcattaaaatagacaccttttacttgacccagcagatctgtagttgtttattttctctctattgtaaccaaaatttaatttttccccaacctttggacttgaccatgaagatgataaccatttttagatatttatataatatttgtaatagatttcatgtaatgtttatattatatatattttataaatgtaacgtttctcactttcttcttaacaagatctggggcaaacaatttcaggttaaagaaatggtatttttaaaagttgtaggggacattttatgggtagaggccttgcacccgtgtctcccttcttaattagctggctagattgcagactcactctttgagcgagaggacttggtttgtgtgtttgggggcaccgtgtgtgtgtgtgtgtgtgtgtgtgtggatgcatgcatgcccatttgtatttgtacataagttaaaaaataagaatcgtgccgggcatggtggctcacgcctgtaatcccagcactttgggaggccaaggtgggtggatcacaaggtcaggagatcgagaccatcctggctgacatggtgaaaccctgtctctactaaaaatacaaaatatcagctgggcgtggtggtgggtgcctgtagtcccagctactcgggaggctgaggcaggagaatggcgtgagcccgggaggcagaggttgcagtgagccgaggtcgcgccactgcactccagcctgggtgacagagcaagactccatctcaaaaaaaaaaaaaaaaaaaaaaaaaagaatcctaacacacaaggagttttattatttacccaaagatgttggtagtttcagggaaatttctaggaaggggacttccatccagatggcattttccagtagcagaaagagaaaggaacgatgtgactgttagtgcaagcactgtgctgggaactccacgtatgctatgaattcaatctgtacttaaaaataagttttactgagtaccttctaaaagtaagttactgtgcaaaagctgggaaaacaaagatgaaaaaagtacattcctttacgccaaggaatttacaatctgaaaggtgaggcaggtgaacaactggtgattttaattgggtgtaataagtgttatgcaagacgtttgtaccgagttatggtgcaggaggacttaggagaggcacccttattttgtcttagccagacaaggcttcataaatatgtacgttggaggggtttagggaagacttccccagggaggagacattcaccttgagtcttcaaacgccagtccagaagcatagggacagcttcactacaggcagagggaaaaacatgccaagctcccagaggcagagctggacaagttcaaggctcctgctcaaacaccaatgcctgggaggcagggccattttgaagagttcagattcattttgatggctgtggttaatgggtcaaggatttaaagtgggggagaaatagaattagttttgcattgataaatataaatctgttaacattttgaatatagacatatgattatttttgtttgctttttttggacatttgcttcttcagaatgataagaaaggaggaacagggactttgctgtaaacagacattcacaggatcacctgattattatgctggttgttggtctaattctcttcccatgaagcatttttttggaaaatctagtgtgttatgaaattaactgacttaagttaactgtcttgcaatatgatgaatggattaaggagaaaatgacactagaggctggaaaccaagcatgaggttgtttgagcaatccaatgagtggaaatgctactaggagatagaattgataagattgggaaggaagggttgaagagacacaagcgtcaaggatgtcttgagaatttctggcttgggcaactaggaggacagtgataaaacaatagtgaacatttattgagcaccaactacgcaccaggtactgttctatgtcgcctcacatatctgagctcatttcatacttaacaataatgcgtgatgtaagtactactcttttcacattttgcacatgaggaaatggaaacagaaaggataagtagcttgcccaaggttacacaattagtaagaaatagatttgggagtcgtcagttcataaaggtcttgcagacgaaaacaatggatagaattactcaggaggtatctgttggatgaggaaagggccaagggcgaatctctgggaaattccagtgtttcaggaatcggcagaggaagagtcgtatattacaatatgtcaggagtcagcctgtgaaagaggactgagttggaccagtacaagaggttggagaccctggaagacaatggcgtgatagacatcaagggcctccagggcgggactaccgcctgcttattctggataaggaaatggaacctggggaatggtagacctgagatttgctggaagccctgagatttgctggaagccttgtgttcttcccatggctccagaacccctttgggattaaggcatcatttgtaggacaagcctgtggtttttatttttggactcgataatctggattgatgaagaatgcaggagtgggacttggttatgaattaaagatcatattatctccttcttaaaatgctggttgtaaatttaatttcttctctaagaaatcgtttactggaacatttattgagtaagaaaattacttgctttgaattatagctcttcttttctctttagtaagaattagctaaaaagtatctaggaagagaagcagaaaaccccaattatcccccaaaaattcattctcatagtgaaccttcagaaagtctattggaaacccttattatttacaataactgttaagataagcttattgaatattcttcccagattaaaattcaccaaacctcatcagttctcagagatctctgccttcctcaagccactagatagccagtaatttcctttccttttattgaactgtatcagcttcagaagacgcgatataatcctattggtttctgtcctcacaataacactgctgggacccatcctgagggtccttgagggtctttaacctctaatgtctggccactctttcttcttagtctgagccatatatatcattctcatatatgccacacataccatacatgtcgcattcattcaaatcctacatttaaaaatctcttgcaaaagccagcttgggccaggcatggtggctcatacctgtaatcccagcactttcggaggccgaggcgggcagatcacttgaggtcaggagttcgagacctgaccagcctggtcaacatggtgaaaccccgtctgaactaaaaatacaaaaattagctgggcgtggtggtgcgcacctgtaattccagctacttgggaggctgagtcatgagaattgcttgaaccctggaggcggaggctgcagtgagccgagatcatgccactgcactccagcctgggtgacagagcgagattccgtaaaaaaaacaaaacaaacaaacaaaaaaagcctatctcaaatacttgagtcctttatgaagtttagcacttggcttattttttgaaagaatactaccttctttcctgaatttatattttcatctcccctcctccaactttctctggcagtgctttttgcagctggactcccaatttagtcatcataaaatcactgtagtcataaaacctgcttggatagccctgagcataacttgtcaatttttatttatttctttgtttacttgtttggcagtctcttccactaccttaaagatctaaggagataggaattgtgtatttttttatttactagtgtaaatcctatttgattgtaagtccagtgttctttttcccacaatatacaggtagcagaggcagagaggggaggtatgtccctgacacaaggaccctggaaaagagatgggaaaattaggaaatttacccactcctaaggctaaccagaaaactccacgctagatagctggtgtgagggctgggtctgtagggaagatgagctgggagccagaagatgaagtgttgagatggatgataaaggaaagtctcagccaagacaggagctggagctagctctgaaacacatgggaagctggcaggatgcggtcagaggtcagagagcgatcagggttggtttaggataaattttgctaagtcagggtgtctgaggacagatctttttttattaaccattttgcatgctcttgtcccgcaaggacctgtgcctccttgcacattcattttgcagaaagatgccactaggaaaatttgaactgaataggaaaaaaactatctggtgaaatgaaaatgatcagaaccttaaatgaaactgtggcttatcattcctttcaacagtccaaaaaggaaaatccagcatgaaggcaaacagatactagagattaccaaaagtagattacaaaatgtgcagtaaaaattaagtggaaaccttcagagattgttgaaagggaaagtgttcaagaagaatgggaagctaaaaattgaaaccaaaagtataactataagcaatcaaatcaaaagcaattttgatgaagaagaaaaaagataactagagatctgtataactacagggagaagttttattagagttgctttttaaaaaaaaatacataaataatgtaaggaggggaatataatcaagttcagatgtaaacatggctttaatttatctgtgaaaaactagctctgtgacaaaataagagaaaggaaaagctagtttctagagtgagtggaagatattgcaaaaattcttaagctgtgggaaatgggtaaacaataaaaggatctttcaaagctatattctcaatgaagacgagcagcaggagcctgcttttttccagtattgatgtaactttttaataatataaaaacataaggcctggaaagaaaatttcttcctgtatattctataataactcagacttattagtagcatattcttttgttaataactttataccccacaataagcttttatatgcactattttatttaataatatttaactactttctcctaacacattttcataaattagaaaatcaacagtcttccctctctaccttcttaagacactttagtgtgctgctttatctctacacaatcttcagtgctttgccttatatctacaactcaaaagaaaatttctgtaataaatgtagtccctggctgggtgcagtgattcatgcctgtaatcccagcatttttggagcctgagacggacggatcgcctgaggtcaggagttggagaccagcctggccaacatgacaaaaccctgtctccactgaaagtacaaattagccagacatggtgtcctgcgcctgtaatcccagctactcgggaggctaatgcaggagaatcacttgaatctgggaggcagaggttgcagtgagccaagaacatgccactgcactccagcctgggcaacagagcaagactccatctcaaaaaacaaacaaacaaacaaacaaaaccaaatgtagtccctaatgaagaaacaatgataggaaattaaagtaaaaatgccttttttctcagatcaattttttctttttaagatacttgcaaattacattttctccactgcctacttcatagctcaagtctggcaatttcagctggaattaggaagagctcgtgtgctcagcctcaaaaccatgtctacattccgactgcctgattcttcctcttacagacctctctgtacaacgtctgttgtgtttcagctttttgactcttcaaattagcatctcttccataaattggattttgatattgtttcaccccagtcaacattcagtaatagaacttatgtgaaacagttcttcctctgtcctttgcacattttctttcatgttctgcatttgatgatactttgctctttccttttcttctgaatccttgatttgaaaaaaactttgtgtagctctctgtatatcttactaactaaacttttccaattgatatgactgtctccatcatttcacctacagcctcaatgaaacactttcctctaggcatcttgagataagtggcacatgatattttctcattctataatggggaaaggcagagagaggctaagtgccttgactatctgagtgaggagttgatctccaaggagctgtttaatgagtagacattagtttctgttgagttggatgatctatatttggaccatgtcattattaatagtttcactttcctgaaaattaggtgttctcataatttggagttctggctaaattaaagattgtcattttccttagttatgttctatttttctgatatgttatatttgctcccacctctacattagtggatggtggcttttccaaaggttgttgctgttttcagattctgtgttccctagaagggatcgaagcccttgaaacatcactgagaatttattacttattgattatttctttcattttctatctagggttttgaattgatatcatatcactttcaatgtaaagaaataaagtgagtatagattagattaaaaaaaatgaaaagcataattagaattaggatgtcctagatgttttctggtcatcttttgagagcagaaaataatcaatatgtagatctacacatataggaaaaaatgctaaccagtcaaagtggagaggtgggcatttgcttgagtttctatgcatgttagaaacagttgctctttgctccattttgttggatccaagtcataacaaagtggtagaatgttccttgaaaggggaggagtatgggagagaattgggaaaaatgaagccactggtacagagacctggtcattagtccaaaaagatagtttcttccagataatgtacaaaaatagaatggatgtggtgggagaaagaacagccagaaagaaacaaggctgtgcaaatgctttatctagaaaatgttagccctccctggctaatcttgaaactgtttggaaaaaatcgtttaaacaagctactttccagttcatgagatcctttccactttgtagcaagattatgtgctttacatacacattagcagctttgagattgtctaaatcatgcttcattgcttttctcacactccaggaagaagggaggttgagaatggggccagggctccaggcctgatcctttctcctcttcctcctcctccttcttcctctcctcctcttccttcttcttctttaaaagtaagtcttcagtactgcttcccttaaagtcttgcaataaccttatcttgagctataagcacacacaaatgaagtatattccttcatttgatcccatttttctttttcccacatttctctaaaataaaccaacataataaagtcataatttggagttctggctaaattaaagattgacacacaatgtcattactcttcattctttgcttttgcaagtcacgtgtgagaaagaaacatatttctatggccttttgactgcccttgataaaatctgtacttagggaaatagcaatatcaataaatgctaaataatattaacacaatgtatgcaggggtttttaagcttcacagaaaaaaaaatttaagacatgaatttccaggaaaattattcttgtaactatcccaaatggtttttctttccatcaaaagaacaaatggaaaaaagtgcaaaagccaaatcaaacaaaatccttagtgtgaaatatattttggagcatgtggaattaaatttgcattttcaaataaaaacaaatgcccgtttaaaaagtcatctaacttttgtcctacgaagacaaccagtaaaatatactgtttcccttttcccagcatactcatgtttgggaaaacatgattatctgaagagaaatttacttttactaaattagagtttgaggggggagtgtggaaggaataattacagattatccttttattcaatctcttctcttggaaagaagagaagaaatgttgaaagccagagaacttttctaaaacgctgtagggaattttttttttctgtaaatatccaagtccaaaaggagatttgcaaaatgtggagttggagatttgaactcatacaatatttcctaatacaaataaaaatctgaaccttttaatggcgacacagtccacaccatgaatggtcaaaatcactggagctaatgtacaggaaggggttcctcagggaactgtggcaaattttagcatcttcctttccttttagggactggacactcatccttaggacttgagaatcatatgtgaaaattatatagacttcccacagtctactgacacattacagagatactggaaatattaaccacacatgttgtctacatactctctttctcatcatcataagccacctgtgttctcactgacactgcaaatccagtaaccaaaacatcctgttaaaattctctggcccttcttatccatgtgctgtcctttgccacagctcctaaatcctcttacctttgaaaatctttcctgctaccctttagaacctccattcagcctctttctcaagttgctttgtacatagtgtcttcatagcagccttgtaggaacctcagcttcctcaccccaatcattgttttcttttctccatttgtattgcttttcctccgggggtatctgttaatcctccatcagtctattgacttatgaatataaaatccatgctacctttacattggaacacataaggtacctagaattccttttgacacctagtggtggctcgataaacacggatgcacatcacgttagagaaaaggagttttctgagtccagatttcttacatgaaaacaaatttcaaatgaataaatttctcactgttattttaggatagctctctgccaaagaccttttattatacaaaagttgagaatgattgaagttattttgcttaattttttgccactaaatttgatgtgccaaagaaacttctaaaaaacaaaaaagaaatgcataatattcccagctactcaagaggctgaggtgggaggattgcttaagcccaggaggtccaggttgcagtgagccgtgattgcactccagcctgggtgacagagtgagaatttgtctaaaaaggaaggaaggaaggaaggaaagaaggaaggaaggaaagaaggaaggaaggaaggaaaagcaagcaagcaagcaagcaggaaagaaagaaagaaagagaaagaaaggaaagaaagagagaaagaaaggaaagaaagaaaaagaaagggagaaagaaaaagagagaaagaaagaaagaaagagagaaagaaaggaaaggaagaaagaaagaaggaaaggaaggaaggaaggaaggaaggaaggaagaaagaaagaaagaaagaaagaaagaaagaaagaaagaaagaaagaaaccatgaaggtagctgccgtatttctatgaaaccttccctccagaattagttccttttagcatctcattcagacacatggaaagcttgtttaaaatgacttcacaaattagacttaatgaagtgacttgactcaactcccctcaccctcaagtggtctttccctgcatcagagtccctttagtttcggatgtcactcatgacatagaatgaacatttaaaagatgaggaggcagccactggctatcacatttttctgagatgtgtgaaatatgattctaatattaataataataattaacaaacaataatatcctaatataattattaatcatgaattattaatacataatcatatcattattttctcttagtctaatttataggttcagatgtgtgcatgcatgtgtgtcagtggcactcagagaggagatttaaatagagagtgggaagggagataaaagataactgctgcagcactggagcaagaagccaaggggaggtatccgttaaaaactttttgggatgtgaaccttttgtttttctagattctggatgccggaacatctgttttttgagatgcatctgtaggagcatttttgtgtggaatatttgaaagttatcttgaaagtaaaggtcagagacaggaattgaaacagggcttaattcttaaacaagaaggtataagatattgcagttgatggaactgtggtgagcatgttccccaagggtggtgagcatgtctgtgtgggcatagaagatacatgtacgaacatttttattttattttatttagatggagtttcactcttgttgcccaggctggagtgcagtggcgcaatctcggctcaccacaacctctgcctcccgggttcaatgattctcctgcctcagcctcttgagtagctgggattacaggcatgcgccaccatgcctggctaattttgaatttttagtagacatgggatttctccatgttggtcagggtggtctcgaactcctgacctcaggtgatccacttgcctcggcctcgggattacaagtgtgagccaccatgcccagccaaacatttttatttttaatagcttaatgaatgtataatgattaaatgtttagcatgtattaaactatgatttcatgtagtttttttaaccataccaaccatgatttcatatggattatttaagcataccaaccataatttcatgtacattattgcttaagatagtaatgatataaaattttcttaaaattattcatgtaaaagaaacaagtcagttaaaaggaaaatattaagtaaaaatgtacaggtggcacccaaatatggtaaaaattgtgaagcagtttaatgaataactgaactttgggaaatgctagattagagaattggaaatactcttttaaataaacacttgctatctatgattatcctatggatgagtgtccaagaaatagagatgcatatgttgtatgtttttaaaatgtacaggatgaatttacattgaccatcatatttcctgtgctaaatcaaccattattttttggactatagggagaagctgtgtttcttcatagctcctggagatgtgtgatgtgtcacaggcctaataactatattacacattttttcacaaaagtgctacatagagtagaaatgtataatagttaccaacccaagactaaatcaggcctagtggtgtggatagcttcactttgcctatgataaaatacttcctcattctttgtgtgattttcaagcaacttaacgactgttagctttgctgagctaaatgcaacatctcataccaaatttattggcttggcaaagttacaaattttattacgcaaaagttgagaaaggaaagctggagaatgctaaaaacagtacaatttgctactgtgtagtatctgtattgggggctcagcatgttttatttatagatatctattaatacagagatacagaaagaaatacataaaaaatagttttatcaaatactttccagcattcaagtgtagcctcaaaagcaagaataggccaggagtggtggctcacgcctgtaatcacagcactgtgggaggccaaggtaagaggattgcttgaggccaggatttcaagaccagcctaggcaacatagtgagatccctatctctacgaaaaaattttaaaacttagctgggcatggtggcttgagcctgttgtcccagctactcaggaggctgaagtaggagtgtcacttgagcccaggaggttgaggctgcagtgagctataactgcaccactgcactccagccttggagacagagtgagaccctgtccccaaaaaaattaaaattgagaaaaaaaaaaaaggcaagaacagccacagcaaactttctattggggaaaaaaaaaaatcctcctctttacatctctcccttccttcccttccctttctgagagtgactgtggccaaaaggagcattttccccctgcagtcctctgaggggtggggtggggctatgaagctatccttcatattcactcctttgtccagctcttttcacctctagttcttctccccgcatctctgtctagcagtgccttaagtggaggaggggtgggggcatcaagcttgtaaaactggtttgttggggttctccttctcccctcatttcttgattcttgggaaaatgtcttgctgggaggctgcctggcagtgccctagctgccttctgtgggcttgaatggggcttccctctgcccctacaggaggaaaagggagctgctgccagagggagaaatggagagatggacagagaaggcaggtgccacccctcgcccctgacacacaaagaaaaagacacggaaattctctctctctcttctcttctcctatctctctctctctccctctctctctctctctctctctctcacacacacacacacacacacacacacacacacacacacacaggcgcgcgcgcgcgcgcgcaggcacacgtcttgcaaattcaggattcaaagagacaggggcaccattatatttggcacggtggggcccttccaggtctgaaatcctgcattcttccttactatttactttccccgagctcgagaagggccaggtgtgggcggatggctggccacgttttgtgtttccaattcatattcacgggatgacacagacggggcgtggtgagtgctgttggaggcgcttgggcagtttcattttgccccacttctccacctgaaggctgggcgttgctggaacctgcaggggcagcctcagcaaggtggggtggcgtggagtggggtgggagaagggactccagctgaagtagaacccaggctggacctgagaatattggggagggcatgggcggtggtttccgggtaggggccttgagaacatgttggtcctgactgttgtcagtgtttggtcaaagttgccaaaaggttaaaaaaaaaaaagtagggggagtccctgccaagacatatttcccaggccacctttcttccgcgggagtgttgggggggaggcgctgcttggaacctgtgaatgtgacatcagctctcctctcctctcccaaggtcggctttggagagggaggtcagggcacccttgcctggcacaggcggcagcgctggcttccggctcagtgccgcctgtcctccgggagctgtggcctccctgggccccggggctaggctgaggtaagcgcacagcggaggccaggggccccggcagaggccctggggatagggtggaggcatctctgggtgtgggtgtgggtgtgggtgtgggagggagagttcttgcctctctctctcccatctccaactcttgcttcagtggctcttttagaggatgcatgtcattatggacctgtcgctgccactgtccctgttcccccagctgtgacttcgagggaggtctggggatctgagtctgtccaaacccacggctttgctgttgggataaaaactgtccttttgattttagaaggaggagggaaaaaaggtttcccagcatgtgtgttgtgccagtcttggaaattcatccgtgcttgaattccaccctccatccccagaaaaactggagtaaaacaaaaagaggagatggacaaagtgtgtatttgatggcatcccctgggaagagactctaaatttatcccataggtcttactgggccactgtgagcgctttggtggagaacaaacaaaaattctgggtgctcagttgtctaacctgaaaaatgggactagcggaaaaagccaatgtgttccatgcaccttttgctttctttattaaggcatgatgtcacctgtacagtaactgccctgtgtgtacttcagggggggatttcaaggttagatagacaggaaattgttttgaaaatgtaaacacattattaaatgtgaagtattatctgattccttgttcgaatggcatttccttctcagcaccaccttccttgcatattcacttaaccttgtacaagaacacctttttgccctaaatgaagacacccccccaaaaaaaagagtcccagaaaatatgtccctgcttgtgcggggaataaatagaatattctgaggtgcattcctccttcctatgttaggcaacattccttgaccctcctcggcccccaagccaggttgcgtttttttctgccatttagaagggttttcctttttgtcctagtaaaacatcagcccctgtagctcttcatctccccctggtgttcttctcccgccatgtcttaagattggtggcaccgaccaatcttaagatttaagttctgtgtgaaaaacacctttgcttttcaatcagtttatcagcctcctccgcaggggaagtgtggacacacaaaagaacttatcggggcttctcatcagtgatagggaaaagactgggcatgtgcctaaacgagctctgatgttatttttaagctccctttcttgccaatccctcacggatctttctccgatagatgcaaagaacttcagcaaaaaagacccgcaggaaggggcttgaagagaaaagtacgttgatctgccaaaatagtctgacccccagtagtggggcagtgacgagggagagcattcccttgtttgactgagactagaatcggagagacataaaaggaaaatgaagcgagcaacaattaaaaaaaattccccgcacacaacaatacaatctatttaaactgtggctcatacttttcataccaatggtatgactttttttctggagtcccctcttctgattcttgaactccggggctggcagcttgcaaaggggaagcggactccagcactgcacgggcaggtttagcaaaggtctctaatgggtattttctttttcttagccctgcccccgaattgtcagacggcgggcgtctgcctctgaagttagcagtgatttcctttcgggcctggccttatctccggctgcacgttgcctgttggtgactaataacacaataacattgtctggggctggaataaagtcggagctgtttacccccactctaataggggttcaatataaaaagccggcagagagctgtccaagtcagacgcgcctctgcatctgcgccaggcgaacgggtcctgcgcctcctgcagtcccagctctccaccgccgcgtgcgcctgcagacgctccgctcgctgccttctctcctggcaggcgctgccttttctccccgttaaaagggcacttgggctgaaggatcgctttgagatctgaggaacccgcagcgctttgagggacctgaagctgtttttcttcgttttcctttgggttcagtttgaacgggaggtttttgatccctttttttcagaatggattatttgctcatgattttctctctgctgtttgtggcttgccaaggagctccagaaacaggtaggcacgctcgttgacttgtaagtctcggaattacaagttagtgtgttcttatccaccttcatgcttttcttgcttctatttttccccgttctttttatgactgcagcttagagagcaagtgtctgagaattattgctgaaagctactttaagtcttctagtgtaaaatgtaaaattcctctattgaatacaattaggtgcaattgactataacatgacattaaaataacttatcgttttattattattattccattatgtgtttccttggcttttaaaaaatgagaagagtatggacatatacaatttagtcaaatgtatgtttgtaatatatgtgtttatacaggtacacaggccatataggaacttaaatcttatttaaacactattttaatagtgtgttaacgtgtaaaatatttaagcattccagcttgaagccaaggaattgtatccagtcgttcaagcaatgtatgttcagtaaaatcacctgcagagcaaaagtctgttgactaactaccgcctccccccccccccgccaccaccccccgcaggcggtttctgggtgaagcagatgttttctttaaaatttgtcatcattgactttaggtttcttttggcaggtttttggcacccaaaacagtgtgagctctcttttcagctttattcacctgtgctgggaggggagctaggataattcttggctgccgaaggatttaggcagtgcgtgtgcatctgcccgggtcccccccgtttttagggtcagtgcactttttttgtcttttcgtgaccctgactaaagagaaaggatgtcaagggaatgaaaatcctggaatgtgtctgatcatttgaaatgtacaaaattgggcagataagctgcatggctaaattgttaggaggaagaggcaaggcagtagtggagaagggggaggcagtggatcccacacaagcctgatgcccagggattcggaattcaaaatccccccagcctaccttcagtcccctgacctgcttctcagccccaccttaggtcactggtttctatggagttaccctcctgaattgaatattgaatagttaatttctctctccaatcattttccccacctaattttgaaagatatacatcatctggggtaccctgtgccctacacagcatgtgaagtggatgggtaccccctaaagagagggtcatcctgaatggggaagtggccccaaagctaggaataactgtgatttcttgtctttagtcatgtgccaatgttaagtaagcttcagtggatagtgctgtcctaccaagttccttgtagaagccagccggattttcaacaggcagcattccacagcatttccctgagcctgcttcaagaggggtgggggaagtcccttttcaggtgtttatctcctctgcatttgtgtaatctccctgaaggtggataagccaagggcatgagggggaggcaaaaggtgaactcatgttaaggagggaaaaaaataaagagcccttttttctgtgtttcttgctgatggcaggctgtgtgcttcatctgcttttatctgctctgctagctctgactctactgtgatccagcatgtctctcggcgtttgaggagacatcccccactgacctgctctttctctccccagcagtcttaggcgctgagctcagcgcggtgggtgagaacggcggggagaaacccactcccagtccaccctggcggctccgccggtccaagcgctgctcctgctcgtccctgatggataaagagtgtgtctacttctgccacctggacatcatttgggtcaacactcccgagtaagtctctagagggcattgtaaccctagtcattcattagcgctggctccactggagcccagttttagagtttcttttctagggactctgaaggtagtccttctaacaccatccaagtgcctcagtggggacagtttccctctattcctgaaaataacgacagcttcgttcttagcaaccaaggggagggtcttctgaggccccgtagctcaggctactcatgatgggacaagcaggaggccactgcacgtttcaaatgaggaactttcagtgagagggcctcagggggacactctcacagtggcatctgatggggtttcgggaataattgccgaggtcagatgtgggttagtgcaacctgtgcttctcatgggagggtggagactgagaggcagaagtgatgatatagagggttagaatcacttaattttacttacagaaaaacctaggctcaaagtgttgaagccatttgtgcaggagtgagtttgtagcagagctagaactggagcccggatttcctttgctgctatattttccctttagaaatgcccatttcagaactgaaatagaaatactgtccataggcttctctttcacctacagagaagaaaagcagatttcctccttctgccctggacactagttcatcatctgtcggaagcagtcataaacaagcacacatttactatgcatacaatgtaccgttatgacaaaggaggaccaaaatccaaacaatatcaaaccacaccaaaaaccacaaggagcctaataattactaaggtgatacttccaaagggaggactttatttcttagatgagaatgaaaatggacacattggaaattattggagagccctctggctatgagtccttccacaaccatatggtaccaccgactggcaggagaaatgtgtgaacatgtgcctcctcctcccccaaccactggggtcggtggggtgacggtggcacttttagcagtatcctccgtggtttgagttgaaaataagttttaaaaatcctgtgagtcatggttttgcattgaaacctcttcccactgtgtacccacaaatagttaactaaatagaccattagaaaaggaagaaaatataaagcagatgccaagcagagatgtcctaatttttgacaaaaaagcaatgttgcttgtgtcaagaagaaactgaactttgtgaagagttgaaatggaattccactgaattagaaaaacttgttttctcctgcctggatacatacagtcagggccattgatgcacaggtgttcctggctgttgttacactttaccctctgaaatgatgctcccaagtgctatgtgatgagctccttgtgtgcccagtggaataggtgtgtccatgtgtcattttaaagactattaattacactaatatagtttctttctctctttggataataggcacgttgttccgtatggacttggaagccctaggtccaagagagccttggagaatttacttcccacaaaggcaacagaccgtgaaaatagatgccaatgtgctagccaaaaagacaagaagtgctggaatttttgccaagcaggaaaagaactcaggtgagcagaaacacctttgcttttcaatcagtttaacagcctcctgaactccttcctatcatggtactgccttcctgttttagagagactaacagagacattgaaagtcagggtaaagctgaatataacattgctgaaatgtttttccttgtgtattttaacagggctgaagacattatggagaaagactggaataatcataagaaaggaaaagactgttccaagcttgggaaaaagtgtatttatcagcagttagtgagaggaagaaaaatcagaagaagttcagaggaacacctaagacaaaccaggtaagagggaaggaagaaaaattaggtaagaggttcacaagaacaactagccccagtcagtgatgccagcagcctgttcctccagcccttcttacccgggcaggtgaaagacttagaaaacagtagcagaggagatctatgcatcctatagattaaaaggagcaaaagaatccctcttaaatatttccatgaagctctggaatgcaaaccgatgtcctctgtacttttagcacataccatttcatctacaggtagatttcccaaccaaaatatatccagagatgcctttgtcattgggttatatacagcctttgcctctctgagtcaatgtatttaccactttccctgagaaatcgaaaatcattttggggagcggacatttagaaaaagaatcaaagtgtcatggataatcaaattcttcaataagttgcagttattcagatggccaaaggaaaaataaagtcattagatagggttggtagaatttagaacatgctgtttttcaggtttatggtcttttttttttttttttttttaaatagggaaatgtgtttggtgcagagccaatgtcattccaaaaagctctctcttttcctggtcagtcatgtgctgggacagagaagggatctggattaggcaacatcatagagttgctctgagctgctctttggtgataacccttccaaatcctaaactttttggaattcacaagctcaaaggaggaaacctactctctgatctaccacatgttctgcatttttctatcatggtctatggaaacttctcttagaaatccagtggcaagaagttctatgattaaagtgttctgagctcaggccaggcagtcatgaactacttctgagttatttactactgatttgtggggcagcctcagctatcggtttcttcacacctgcttatgagagtatccatatttatggtcgcaggccagtaatgctccccacgagatcagtttctgaactaacctggaattttttatgggtttttattatgccaactattaaatcaacattacagttcttccctctgtatttctcctgtaaaacattaggcctgcaaaaaaaaaaaatctttttaaaaataattgccataaagtatttgctctgggcctactgtatgcttcttttctttttctctcttttcaactaagtcaccgtcaatttattaagatggccataactattcaaaacctatgctgagttcctcaaggcagggtcacatagtgatgaaggttgggatggggctacggaagaaaccagaacaactctagtttatttaaaacctgtatttactgcccacttccccttagacttgaccatatgacccctcgctcccattctaagcataggggcaggctttatttttacaatggtaatagatatcacttgaggttttatcaaagagttgcggcgggtggtgaaagttcacaaccagattcaggttttgtttgtgccagattctaattttacatgtttcttttgccaaagggtgatttttttaaaataacatttgttttctcttatcttgctttattaggtcggagaccatgagaaacagcgtcaaatcatcttttcatgatcccaagctgaaaggcaagccctccagagagcgttatgtgacccacaaccgagcacattggtgacagaccttcggggcctgtctgaagccatagcctccacggagagccctgtggccgactctgcactctccaccctggctgggatcagagcaggagcatcctctgctggttcctgactggcaaaggaccagcgtcctcgttcaaaacattccaagaaaggttaaggagttcccccaaccatcttcactggcttccatcagtggtaactgctttggtctcttctttcatctggggatgacaatggacctctcagcagaaacacacagtcacattcgaattcgggtggcatcctccggagagagagagaggaaggagattccacacaggggtggagtttctgacgaaggtcctaagggagtgtttgtgtctgactcaggcgcctggcacatttcagggagaaactccaaagtccacacaaagattttctaaggaatgcacaaattgaaaacacactcaaaagacaaacatgcaagtaaagaaaaaaaaaagaaagacttttgtttaaatttgtaaaatgcaaaactgaatgaaactgttactaccataaatcaggatatgtttcatgaatatgagtctacctcacctatattgcactctggcagaagtatttcccacatttaattattgcctccccaaactcttcccacccctgctgccccttcctccatcccccatactaaatcctagcctcgtagaagtctggtctaatgtgtcagcagtagatataatattttcatggtaatctactagctctgatccataagaaaaaaaagatcattaaatcaggagattccctgtccttgatttttggagacacaatggtatagggttgtttatgaaatatattgaaaagtaagtgtttgttacgctttaaagcagtaaaattattttcctttatataaccggctaatgaaagaggttggattgaattttgatgtacttatttttttatagatatttatattcaaacaatttattccttatatttaccatgttaaatatctgtttgggcaggccatattggtctatgtatttttaaaatatgtatttctaaatgaaattgagaacatgctttgttttgcctgtcaaggtaatgactttagaaaataaatatttttttccttactgtactgatttggaatcattactgaaatttgtaaggagtgggccaacgtgattaagtaccataaaggcaaataaatggttaaagacggtttcatagaaaagtgacaattagaaggatattacggtctaagctaattatataaagaattttatctgtatcttaaatgttgattttatactgcattgaggtaaaaacacaaaacaaaaaagcagctttaacacctctgtcttctcttgggtagcagcctcctgcttctccttcacctgaaaaattctccagggacttcatccattaacttggctcaggctattaggcaggattcaacagtttaagctgatggtgtggtgagagatgctttatccatattaatggactgaaggaagtaatggcaagacaaccccccaaaacatacctaattatacaaagttatataccaaagttgcttttagaaaatggcctgctcagagcaagtagaggtttccaatggctttttattttctcacattaaggatgttgtttcttaaggaacattgagtaccattgcttcttcgtgatagcctaggactggccgtgtgcccatggaggtagagacaccaggtactgattctaggtcctctgccacaaagcaccacttcctctccactttgccttggctggccttgtcagctcactggagagcacagtattgcaattgcagtattgcaaatggtcactactaactgaattctctaagagcttgattagccctcgagaatcttccttgcccttctctaatagtgtctgaaggaattcctggcatttaacaaatattagcatgtagtgatcactgtcgtcctaacagtgacacatcagaaggatttcaaataacagtcttcaggcatgcgtaatcaatgtcctgtgcagagtctccgtcctcattgatcctcatttttctctttaaggcacagtccaatgtctttggggaattgtttataaagcttactttatccataaactgtttctcagtgcgtgactctgaagaaaattttgaagttttgcccatgttgacaaggtgcttggtctgaacttggccagtatttaatcttgagcaaacgattcaatttccttctatcgtgagttttctcatctatgaaacaagggagttgaggggagtttctttcatacctctgagaaagagtttgagattacataaagaagttgaagtggcatgaaaaaaaataaagatctgagcttagaagacatggatctaatacatttaagaggaagtcagaatcagagaagccactgaacaaaacagtccaaaggacagcatagtaagtcagattgatgagttttggttgggtttttcatcagtcaaacccttgagcccccctttcccatgcttcctgcttcagtatccagtaggaaaaatgaaagggatgatgtagacactctagggcatgaggatttgcagtaaataagttgggagactcacagaaaattaatatttttcaaacatgaagacgaaacattcaattatattacagtccacatcagcttgaagggtaaactgatgggatggtctgtcacatttcttgctctgtttccagtaaaagcatggtttctggaaacccacttaggacagctttctctctttacactgatagcccaggcaagctttgatctcagaactccagaaaccagagaactctaggtggaatgtggtaacttttgccagggcagagggaacacctactaataggtacttcatttgcaccaccagagattggcatcttttttgatggatccactggctttgatactgcctgtactcccccaaaacacagcttgggtattggactaatctagagctccctcaggagaactcttgctgacattaagaaagagcaacattttgtctttccaggtgaaaatccaaggcccaaaaagggaggtgactcacctaagatcacagaaggagctgtagcatctctggagcctgaacacttaagttaagcacgactatttcagccagagggcccctggaggtctgcagaaacagatgcccaggcaaaccttgctagaaggctctgggtactaaagccaaaatcagtctttctgaaagctttgcctcccagccttgtagacagtgctagcagacccatcccctcaagaggaaagagaagaaatgcaggggaagaaaaaaggactataaggaggctatctcatggcatcgttaagtaaatgtctataggataaaatagaatataaccaagaatttttaattattatttttagactttactcaccaaagaatctatctgagtgaagggggaaatctctcggtcagttctctttttttttttttttttttttttttttgagatggagttttgctcttgttgcctaggcaggagtgcaatggcgctatctcagctcaccacaacctctgcctcctgggttcaagcgattctcctgcctcagcctcctcagtagctgagattacaggcatgtgccaccatgcccggctaattttgtatttttagtagagacggggcttctccgtgttggtcaggctggtctcgaactcctgacctcaggtgatccgcccaccttggcctcccaaagtcctgtgattacaggcgtgagccactgtgcctggcccggtcagttctcttttactctacaatgcaaggcagtggtctgcttttttttttccccctctctgtttctaaggtcttgaaaatgcctgttttcacatttaagttctcaatgtgtaaaacactgctttcaagcttatgttcttaatagagtcccttctgcattggctttatctcacctttatactcacagttcctggggactttgggtctggagctcagaatttatctactgcaagtgaatgttacacatttcacagtaacctctcatctttgtagataatttggtttcctgtagcttttcacatcctttctctcattcgacccctaccctcacacaacaatcctttcgggaagctggaaccatatcatgtatccatcagccaaccaaggaaagagacatatcgagagggtgagtgactcatccagagtccaacatcaggcaaatagcaagaccagaacccgggacccctgaccctttcttcttaaactcctccagagccaaggggatacactggacctgcaacttggactaacgtagattatttccagcttgtgagtgaactgtgagtggaatgaacttgttcttattctcttaggaagatcaaagctccgtatgtaccctgagccctagttttgaacgtctctgtcgtatgattatttgtttactgcatcattcttgttatgacaatgcatggttggcagaaaacttgctggcatttacaaagcttgcctcaaatctggtgccatgaagccatgacaacttcattgacaactactggccacagagccaatacatcggaggaaatagagtgatgaatgtgatggcagcggccatcaaatttcctcaaatcttgggcagtaatcagagagagagctagggctggtgccactaggtagtaaaaagagaagggcttcggccttggagacaatgaatgatggaaatgttgggtcccagggatgacaggctgcccgtagctcagaaaggcagcacatcgggagtccggcatgcagttttgcccgtttagagttttctgggtttctgcatcctattgttatttttcacattccgagtcattccagtccccttctgtgtaagttgctgtggaagtatccagggctaataatcacaatattaagcggccattgacatggcatgggcactgaccaattagaaaaagctgggacagagctgttgggcaggctcctgatagactctggctgggctaggtcttcaacctcctgatgttggcctgtaggggaccttgtgatctgggacaggggtgggcagccagggtggaatttccaagcttcttgttgctagggctatttactaaccaggatgaaatcatttcactgttttacagactagaatagtctcactggtatgtgctcctgtgtacgtcagatttaaaagtatcgaaaccattctctgcttgataaattattctctttacagcttcactgagtgagatgacattatcttcatgcctgcggaggtttggcaccaaatctttctgctcatgcacctttggtgtcctgctgcacagtcatctctggcaatgcccctctctctgcatgttcccctccctcgtgctctggtgccctatgggagaagtaaaaagaccttaagggtctccttgtctccttggagattttactttaaattttttttttattttatgtgttttctatttcaatagctttaagtggtacaagtggtttttagttacatggatgaattgtgtagtggtgaagtctaggattttagtgcatcccttactcaagtagcgtgcactgtacccagtaggtagtttttcagccctcaacccctcctatcctccccaacttctgggtctccaatgtccattataccattctgtatgcctttgtgtacccatagcttagctcctacttataagcgggaacatgttgcatttgattttcaattgctgagttacttcactaagaataatgacctccagttccaaccaagttgctgcaaaagacatcatttagctcttttttatggctgaagagtattccatggtatatatatattacattttcttggccttctcatcagttgatgagcacttaggttgattccatacctttgcaattgtgaattgtgctgtgataaacatactcacgcaggtgtgtttttgatgcattgacttcttttcctttatgtaaattccaagtagtgggattggcggatagaatggtagatctactttttagttctttgagaactctccatactgttttccacagagggtgtatgaatttacatccttcttggagatttttagcagggcaattttgtggttgccaaagtcaagatctgccttagaccaggtcttcctagggccctagctctgcaataggaaggagcaagagggacgagctgcctgtaagattaaatcttgccctcttagattaatttgggactaggaaagggtggccccataatttactatttaaactgggacatatttgacagcacttagtgacattcttaacaattctcacggagctacacattggactgttgtggacaaacttggacatatggtcatcttagatcaaaataagccttgaatcagttcagaatttcagaaccgcctttgcttcttggatgtgcttggcactgtgtaagcacacgcaatgtctgtatgcctttacctgcagaccaggctgcagcagagcacctcccccttttctggtgcctacagcctcaagttcagagcttagggcataatatatcattcaataaatgcttattcaatggatgaataaatacagaggtgagttccactgttcagtaagagcggggtgaaagtgatactcttctagccagaatgcgactagacaacagaagatttataagacccatttccagggctctctttgcagagctgccatagctgaaatcttcttttattgaggctccacgctagtggtaaattatttgacacaatggggtattctttctacttctttctactccaacccatcctgcatttcaccataatcataataacaataatcttctccaaatgctttaattataatttcaataaatacagagctagaaggaaattaaaaataattttggctattaccctcatctcaaaaaccttccactgccactctgcctatacaataaaaatatgctatctactgagacaggcaccagactaggaagaaaggttgggaaatgttacaatttcagtattgagcatattaagttttaaatttttcatcatagtgtgaaagttgtcagagtcaaatgaagtcacctgtgttaggaaccctgacaaatggagccaggaaaggccataaagggagaattctcacacacaaatgcctgataaccaaagctatcacagaatactttgcaaaaaccacaatcttgcacaaaggccatcacaaccttacacaaaaaatacttcagtgaagttatctgcccagcaactgcctgtctagcctcggactggtgccacccttgttattgataactgtagccaagaataatgatctcaaaacaattacgttatcctcctgatttttcctttaacaatctttgttttgctttacctcctcgaatacgcacatagtttactatggcatgtgtattttcattgcaatgtccatccctgaataaaaataattttcttttcatttattaatgtatttgttttttgaaactgggtctccctctgtcacccaggctggagtgcaatggcacaatcacagctcactgtagccttgacctcccaggctcaagtgaccctcccacctcagcctcctaagtagctgggaccacaggtgtacaccaccatgctcagctaattaaaaaacatttttgtagagatagggtcttcctatgttgcccaggctggttttgaactcctgggctcaagcaatcttctcgccttggcctcccaaagtgctgggattactggagctgttgtgcccagctcaatttcttttagggagtctctctgtctgttatctaggttgacagtggttatcttcaaatatatccaacagttgagagaatagtataactctaaagccaatatacctagcatatagtttatatagttgttgagatatgctgggtgttgctttatctctacctgcatcctgccctccttccttgaattactttgaagccaatcccagctatcattatcatcttacctataaatatttcagtgtagttgtaataaacttgatatgctttgctcgatcaggtaaaatgtgaaatagtcaactagatatgtggacctagagcttacagtggatgaagaactcacaataacaaacgcctcacggaactcacaataacgaaagagacaatgcatgttgatagcttgtgtttatgtggtgcttactaatatcccagacagtcttttgagaactttgcatgcatcagctcattttattcttactaaaacactatgaggtatttatcctatgttgcagatgaggaaacttgaagacagaaattcagtagtaacttatgcaaggtcaggcagctagtgaagaggtaagaaccaggtaacctcattcactatgcttttttgattcagaagaatccaaagtgataaaggttacattatgggataatcaagtcctatgatggtatcaaagtgacagtgatcaactctgcctggggacagggaagggaagtggtggtttcagggaaggtttcatgtaaagaaacagtgaaaaatcagccttgaattcctaagaaggataccatttgagaaatttaaagctgaatcaaaggcgtgaagaagtctcaataaaatgctttgtcgatagatgacttgataaaaagaacataacctaacatgctcatgtgactgactcataagaaaagtaagcaggtatctagatcattaaaagatgatttatcttgcaataatccaatgatattggaaatcttaaagcaacacaacaacactaggacagaaatctctaattttcaagtggcattgattgaactgaaattttgaggtatgactaaaaatagcaagaaagcaattctaacagattttcactaaattttcagaagttaactacatttaacattataatacaatgaaataattccactgaaaatcactgtacttactgaatgtaagcttattttatagttcaaatgccctatcaacctcctactctttaatgcatggtcacaaatgacctctcaccatgtcaagaattccctcttgatgtatggataggaataacccacctgtcaacttaggtgtcttccttgtgtttgaacaatttgctaaggtaccattaccaatcgaccctgctctgacattggtcaccggtgtggttctttccatataacctcatcgttttgccctgatcagcggccacaggcaggcagtaaccgttggtttggtgaaagacaaaatgccctagacaattaaggagatgatcttattcaggctactacaataaggaaaatgttcattaatgaagactgtctcaaggaaaggaaggaaacctggggtttcatagagacagtaaacaagggagcaactgaatcttttggtagtcatgaggatggagatggtcttttcttaaccatgaagaaagggtggaaaggaagaggctcgagcagggtgtttccttgcagttagccatttctcaggacacaaagaatgaggagatattttgagggacacaggactcagataaatttcttcattgtcagtccctggtttttttcaagatgaatatcattcatcaaggaaacactcaatgacaatcataaatctcctgagtggggtgaagtaaggtctcagaaatcatttctcaaagagtcttagtgttattcggacaaagacagttgaagcatctgtagaaagataatgtcaaggtcagttgtgttgggattctggggactaggcaccgtaaaagaggattgcttaaaaagaaaaagagaaatataagtataaaaggtttactaaagagccagaaattgaataatgagggtaaccagttcagtggattccaagaggtcagtggaggaaaatctttcagttctgtaacactgctctttgagtctcttagagctactgaataggacatcagtgctttcagtggtgctgtccacagggcatgtctgactctagcattccacaggcttcttagtggcccaggcagtgcctttccagggagaaactgggcccatgaatggtctgctacagtggtgagtcctttgaagtatatatagcaaattttagcttataatgcttcttcagatcctagggaaaaggacccagatacaagacaaccttgagtccttacagggatccgggtagtcagattttagttctcggtgacactgagtcaggcagcagtgagaaaaattgaaaaaactgttggaaaccagaaagattgaagatctgaaaaggattgataatttgggaagtttacaggatccagtccaacttacagataggtacaaaaactaacagctagggagaaagtcaattacaattccaccagacaagacagtttgcctattaatcattactcacattaaaaaaaaacccaaacagctcaaaaacaatgaacaaggttagaatgagataacctgggagactgtgctatctgatgtatagtttttcattaaaatgcaaaatttatttgtgtagtcactgactcttgatcaagaataatctcaaagaaagattattcttgccattacaagccatctcattagatctagaatggttattcagattggtacagcaagaatggtaatttaccatattggccttttaagtttgctttttggaaattttcataaggaggctcagattggactgttaaaaaaaatctctctagacaggaagccaagccaataacttgctaccagatttcacctgtcaagtacctataaatctgggcaaatttattttttcttcaagtcccccaaatatcctaggattcctaggcatgccaggaaaggaccttctttacctctttactcacctaaaaggaagaggatctgtaaatcaggtatcaggcctgttttcccgggaaggctttgtaagcatcatttccgtaaagccaaccttagcttcttaaaagcatctggtcatatctgattaaatgagcatcattctcaactatgacattccaagcactgccttagttgtataacctgtattttcaattttgtcatggtaacaagaaggacagattcttattgaacctatgcaaatgattatgttgccatgaaaataaaaatactcaataagagtttccaaattctggaggagtcaggcagagagaatcaaataccactatcaaatgtttcatttcgtaagtgatatcttattctctgagtttataaactgagtttcagtttataaaagcaaaatctaaattgctatgtattatgtattatagaccacttaagaggaaaaagaaagggcttccctatatatccagaaaacagaatatcagaatgatcatattccaaacaaaaagcacaaacagtcctcgtcagctcattcagtgctatgtagttaatttgtattccactcagtcttgagtgaagagtctcatgaacccctttgtttcttggctagagttctaggaatcctaactcagtccactggtatgttctcaatattgtttaagtgacaccatcagaagccagtacccaaaagtatctggcaaaagtgaaggacaatctggcatcatccttttctacagggctttgagaagataccacgccgaggacaagcactatggcctctagctgatttgcaaagactgagatgcatcagagtaaaacaaagactatctgtagatgacaaaagacataaagtggcactgtggttaacttcttactgataattttcaaaagtgaaagatctggtgacaggtcattagaacaataatgcaactgacaaggaaatctggctgttcgtgtggagtacaaaacaagatcaggaagtcgatccaaaaggttttagacaagaagataatttcccctgttttcaaagagtggctattacatttgatttataaaattgggttgtattagtccattctcaggtagtgctataaagaactacctgagactgggtaatttataaagaagtttaattgactctccacaggtttaacagaaagcatggcaaggaggactcaggaaacttacaatcatggtggaaagcgaatgggaagcaggtactttcttcacaatggtggcaggagagagagagagccaagggggaggtgcttttaaaacatcagatcttgtgagaactcactcactatcatgagaatagcaagggggacgtctgcctccactgagccaaactgtatcacgggtaaacattatttttacagagaaaaaaaatcttgataaataactgtaataatcctgacataatataccatgaatatatcaagcatatagttagaatataccacgaatatatcaacaatatattctgaatgagtctggagtacatcctaaatatctatatgttaataaaactccatagggaggtgatatgtatccccatttgaaaatcactggcctagaagattctaggttcaaatcaaagaagcaaagttgtgaccaagttaatatttttaaaaataactgaaattatgactgatagcactgtactattgtataacattaggcacagcagaactaggaccgtgacaaatagaaacatatgaagagtgatggtatggacaattctttagggatttctacagcacacactttctgaaatattaagaacacacattttagctagagaaagctaagcaaatctgatttgctaactcatcagttgtaacatatcaaatacacctaattatttccagcatctctctttttcatctttgtagataaaagtaaaaatcttgttacttttccaggccccctgcccttgaaaaattacagaaatagttttaggtgcaaaagaaatcattaagattgtgtttggggaagacaaacaccaaaagttgttaggcgatttgaacacttggtcaggtaagactatgggttactgagaaacaatacttggctacgtatttgactaaaacaacagtaaaaaatttaaaaagtaaatataagaggtaacatgattttaaagaagcttagctctttcctaagaaactctgttttcttaaataatcaaggacattgttgtggttcgaatgtttgtgtccccccaaaaattcatatgttgaaagctaattgccaatgtgatggtatttgcaaatggagcctttgggaggtgattaggtcatgaaggcagaccctcatgaatgggattagtgcccttagaaaagaggcccaagacagcttccctgagccttctaccatgggaggacacagcgaaaaggcaccacctatgagccaggaagcggccctcaccaccagacattgaatctcctagtgccttgatcttggacttcccagcctctagaactgtgggaaataaatttctgttgtttataagccacctagtttatagtattttgttatagtatcccaaacagactaagacatgataaagtcagcataaaccaggttattctagtaagacacagacactttgttttctaggcagattgcacagaagataaagaataaccatttacaatcttttatcaaaagcaaaccaataatccaagaaaaaaattcatctaacagaaagaaaacaaaattctagttttctaaagctctttttttttttttttttttaaagacagagcctcactctgttgcccaggctggagtgcagtgctgtgatctcagctcactgcaacctccaccttccagtttcaagtgattctcatgcctcagcctcccgagtagctgggactataggcgcacaccactgcgcctggctaatttttgtagttttagtagagacagggtttcaccatgttggccaggctggtcgtcaaacgcctgatgtcaggtgatccacctgccttagcctctcagagtgctgggattacaggcatgagcccctgtgcccagcctctaaagctgtttttgaaaattttatatgtatacccattaaactttacctaactttggccatgacaaagaaaattccttttctgagaagctcctatacttttctgtgttcatgtgtatccctactagtgtaacttctcaaaatgccagaaattcattaatagatatatacagatttttaccacataaaataagaggcaaattatataaacttaaaatgatgtttagcaattaacgttcagtattctgcttttctcagaaatgatctaggcagctactggatatccattcattaactcaatttattattggcccaaggttttaagtttcctaaagactttgcaaattatcttcaagctgacacattgtataacataattactgctgaaataaaatttgtcaaaataagtcttcaaattacttaaacacaaattcgcattttttcatcattttaaacatttagtagaagtgatgctagcttcctcaattagtaaatctgtataagtttaaaaaatatttacaaatataacaaaatctgtgcttatgcaatatttaacactgataaatcagagaaaacttagctgtatttattaaatcaaaattattaagctagactcatttgccaaaaaagtacctaaattacataaaattagatttctaaattatttctgagttaatatctataacaataccttttttaatccccacactgaaagtattagaggttcaattttcttaatttctttctcttcataaagggatattcttaataaaggaatatttagtcaatataaatgcttatttatctctaagcaaatcagactagagattctttaagacatttcctaatctagcttattgatattatcaggagatagaaaaatattatacactcacacgatgagaagtaaaggactttctaaatacagacatactcacagagaaagcttataatttcatttctaaaatttcagtcagatgtcaaatataaaccaacaaatacaaaacccgccagtccagatattaacttcctggttggcataatattcttaatagatttgaactaaaaatagacagacagagaggagattctagctaaattctgtcacctttcactcaacagagacaattacctctataaaccatcagttgcttaaagagatcatcaaatgttcagaccatgaaaataaaagttgtcgctagaaattgagtaagtgctcaggaaaagtaacaatcaaatctactgtgctactgatgaacaaaagtcacatgagttggactcacctttgggtccccgaatctgtagtccggaacacagagggctccagctgcctagatacccctgtggaataacagagctctgaagtgaggcccaagctattcaagttattgcacccaacagagggagtccttgtaaggagaatggggtaagaaagggagcctggtcagcacaaatgtatcaggaaagtggctcaagtgcagtaaaatgactaagagtatggtcattgtattcagatatacctggattcaaatcatggctccactgcttataagccccttgggaagctattttaccttcccaagtctccatctattcatctataatatggagataataatacctaccacacagtgtgattgtagattaccattccatatgaaactctggagaccggccctttattcatcacacaaacccttcaccatatgaccctaacttacttttcctgtttttgtttgtttgtttgtttgtttgtttgagacagggtctctctctgttgcccaggctggactgcagtggcatgaacacagctcactacaggctcgacctcttgggctcaagcgatcctcccacctcagcctcctgagtagctgggactacaggtgcacaccaccatgcccagctaatttttttattttttgtagagatgcgtctcactttgttacccaggctggtctcaaactcctggcctcaaataatccttctgcctcgatctcccaaagtgctgggattacaggtgtgagccaccatgcccagccctcctgttttatcttcaccctacattggtactatcgtaggggaacatttctcaaattttgtgtgcaacagagttaacctagaaaaattgataaaatgaagattcccaggtcacaaaccccagaaattaagacctagtaaatgatagaacctagaaatctttgttttagcaagaacccaggtggttcagacataggtgttttttagattatgtttaattttaaaaatataccacgtgagcagccgggcgcagtggcgcatgcctgtaatcccagcattttgggaggccgaggtgggcagatcacgaggtcaggagatagagatcattctggccaacatggtgaaaccccgtctctactaaaaatacaaaaattagctgggcgtggtggcgcacacctgtagtctcagctactcaggaggctgaggcaggagaatcgcttgaacccgggaggtggaggttgcagagctgagatcacgctactgttctccagcctggtgccagaatgagactccatctcaaatgtatatatacacacgtatatatacatataagtgtatatatatgtatatatgtgtatatatacatatattacatatataacataacacatatattacctctataacatacatattacatatatattacatagatgttacatatattatatatacacgtatacatatatctatatatacacgtatatatagatatatataaaatgttagctattcctcaccctggctgtgaactttcgtttctctccacccaggcttttgaaatgccactttctcatagaagaatggcttttcttcaaggttctgctggtgagctgttttttaaatgtgttctcttctgtgaggctttcctggacttctcaaggcaaaaaggctttgtggtctctcctctggtatttgttaacaagtctgattccccacttgacagagagctcttgtaggggaggcacggcatcttttttttatctctgtgttctcagcatccagagaaggcacgctttgaatgtctgttaattgagatgacaatcccaaccccatattgcaaggagaatgattggaatctctcccatacttggctttaaagtcatctacaagcctgaactgagagtcttagagactttcaggccagaaggtactaagaggtttgtcaagtcacagactgaagaaaatatttgcaatacatatatctgataaaagactgggcatctctctggaatatcagtttctaagaaatggtgctaacacatccttataataaatcagaaaaacggtgcctggtaactcaggtttccacatgcaactcctttcattactggaaataaaaattgttttactttgaccaaagtagatgatgtcttccagtataaaaaaaaaaaaaacactcctccccagcatcaacctacctctgttgtttttgtacatgaatatgttattagcagcaatgacagacggctaacatctgagtccagccacttgacaatcattcgaagtcagcaggaacagacgtgctgaaataaaaaaagacgagatgaagtgctctacctagggaacaccgccttgcaatatatacgtgtcactgacctctacttaggaatgtgagtgcaaattgtcctctggctatgggcaacaacataagccacgaaatgaaagagctccaaataaattaaaatgataaatttagcgatttagtgtgaacataaaaagctttacaacttcacgaattaaaaaaacagtttcaatgttagaagtcaagagagcagctccctttagggggtggggtggtagtgggcagaggagagcctgggggacttctgtcttctgtttcttggtctgggtgctgagaacataggcgtgttcactttggaggaatgctccaagctgcacatcaagatatatgctctttcccgtatgtgttatgtttcaaaaaagcttaccccttcctcctctcaaaaagcattttttccctttcatttttttatttcttcttcttcttctctctctctctttttttttaactagatacacgctgaacaaacaaaatatgcaaagaataatagtttgaaggggtgccagcatgctagcgtgcctctggaagcgtacatgccttggtctggactgggcatcagatgtgcattttcacttgatgtaattcatttccttgttccatgacccagctttcctctttggggtaaaggcccgtccagcatttttcttggacaaggtctccacctttgctgcatccagggagactccttcagtgccacggtcctgcctcaggttagtttccttgtacgtgttgcctggctttgtcaggtcttaatgccatcctgaagctggtaaaatgagccaagtgacttcatctctcatggcacaccttgaggacattacttgggcacaagccaattcactgctcacagcccgagagacatttttttcccatgagctagctcctctcctcctctctcacaaataacttcctctatgggaaaggacacatcagagaacaaggagcattgtaacgggtgagaaatatgcttgacatggggaaggagatgccgtcctcactccctccttccccaccctcccacactcatctgtcaactctaatttctcactaatgcttgggtttcactctaagctccctttgcttgctcgtgcccaccaacagaaatatccaggaaaagaaagagcatcaggaatgactggcctgtgtgcaagcaattccttgttgttgctgactgccttctgcagcttggcgaatttgactcttggaatgcacggacagaagtagcatttttctctccaccagaagtctgacactgaccatgtcaatgagcgtcaattggcagtacgtgtgtgttggttgaccctttacatcaagaccaagctaagcatttgctttcctttggtcaattccactggtccttccttttggtcaatcccatcgctctctgacccagggccagaggaacatagcatttctcctaacttggacaatgttgcaacaccaaaaaggcttgtactgaagtacggaggaggtagatgtgaagagtcatccttttgtcagattgcaaaggtgttgcagcccattagtttcaggatgtttttattttgttcccttccagtaaatgttttcagagattttgcctcgggtttttaaagatgttttataagttatgggtctctttaaaatttttaatcatcttaatgaggtataatttatatacaataaaatgcctagacagtgatcccatttgatggattttacaattatatatacccatccaaaccaagatagaaaacacctccttcacccagaaaacccctcatttccttttccagtcagttccctcacacacactcactcctgccctacccccagccccactagagcctaggagaagtcactgttctgatttctttcaccataagttagctttgcttctataaaatgtagcacctcagtatatattcttttaggtcttgctaattttgctcaacataatgtttttgagatttgttcatgttattgcctttgtcagcagtttgttctactttattgctgagtaatattccattgtacaaatatatgacaatacatttatcaattctcctgtatgagtacaatggaattgtttctatttggagctgttactaagagtgctgtgagcactcttgtaaaagtcttttttatgttctttttttccatttctcttgcataaatatctgagagtagaattgcggggccataagtaggtttatggttaactttatatgaaagttccaaaatttttccaaactggttataccattcttatattcttaccagcagtgcctgggatatcgaattgcttcatgcttggtattgtcaatatttttattttacttagtccaacatttggtattatcacagtttatttacttcagctatgatgatttgtgtgaaatgccatttcactgtggcattagttggcatttccctgatgatctacggtgttgagcttactggccattcgttcttcctatgtgataggcacgttcatgtattttgcctgtttttacaaattgacttttttgtgtttttattgttggtttttaagagttctctatacatcctggatatgagtcctttattagacatatgtattgcataggtattttccagtttgtagcttgagaatttattttttaatgatggcttctgatgaacagaaattattaatatttatgaagtctgacatcattttttttaaattactcctttttatgtcctgcttaagacatctttgtcttcccaaatgttgtgctatattctcaaggttcctcttagagactttaggtttttagtctttatgtttttgtctatgatccatatcaaattaatttttgtgcacggtataaggcggggggtggtcaagactcattttttcccccaatatccaggtgttctagcactatttgtctaaaagtctttcatttccccattggaatgacttggtgcttttgttaagaagccattagtatatgtgtgtgtgtggctatttctgggttctctattttgttccattgatctatttctggactcctttcatttccataga

SEQ ID NO: 5657 - DNA, 244088 bp, Homo sapiens
  LOC442165 gene - 19947063 - 20151150 of chr6; NCBI Entrez Gene ID: 442165; Build 35; sequence includes 20,000 bases upstream of initiation codon and 20,000 bases downstream of termination codon of the gene
ctaaacccctggcattcagtaacaagaacagagcattcccctctcggtagatagggaatttaatggtgatctgtcaccctgatgcccagagaccaggatatcttcatgcagagaggcattgtttgggagagtttctcaaacatctgtggctaatactctttaagagcctcctgttccccaagagtcaagaaagaaaaaaacaacaacaaaaagaaaaagctgatatgtccttaagcatcacttttacaacaaatactaagtcttcaatacaggaaaacactgtttaggagaaaaggtgttaggatggcaagaaacagatacttaatgttattgtacttaatcgataattgagggacattgtgcccaatgcgatagagaaggcaagcaaacaacatttgtgtgacacacaggaggtcagcatggtgggctagctccagtcaccccactgaggggtgtccctggggtaccttacatgaggacaggttttcacatccactgggacttcttcctggttcttcttgctgaagccagaatgtcagggctgcctttctcccaactttgagaatccttgagcaggtacattttcctcttttgccaactcaaccccttctaaccttctttggaatagcttggcctttctgggtgtctgtcctgctctgcagctcacacacacaaaaactggcttgaaaatcatctggcctgcctcagctcgttttgctatgctcttctggttaatatatctctctgctgaggaggtggcttccttcctgctctcaaccacagtcaggacttctacctacaactgaggcatagtgtgagtttaactctctagtttcacaacgctctgcagaattagcttgtcatttaaaaatgcctcttgtggccgggtgtggtggcatgcacctgtagtcccagctatttgggaggttgaggtgagaggatcgcttgaggctgggagtttgagaccggcctgggcaacatagtgagaccctatccatacaaaaaataaaaaataaatcacccaggtgtggtggcatgtgcctgcagtcccagctactcaggaggctgaggtgggaggaccacttgagctaaggagttcaaggttgcagtgagctataactatatcactgtactccagcctgggtaggagcaagacactgtcttaaaaaaaaaaaagcctctggcgatctgcttttcatactatttacaggccttaattgacactattatggagctttatattttaaaattacttttatggttcatttgatacaaagattaataaaaaagactttacccttataaatacaacaaactaatctgtaatgtgtaaaaaggaggatcatattaaatgtgtttcttcacaacctgctctttaacataggaatatatatatgttttgcccatgttattaggtgtattagctatctgttgctgcataacaaattagcccaaagcttagcagcttttatataaccaacatttagtatcgcccacagtttctgaagctcagaaacacttgagctgggtagttctggctcatggtttctcacgaggctgcagtcatctgaaaattgactggggctgaagtgtttgcttcaagctcactcacaaggtctctgtttgttgccaggtggatttcatcaaagggctgcttcaagacatggcagctggtttcccccagagtgagtgattggagagagcaaaactgcaatgtcctttataacctaatctcagaagtggcataccatcacttctggcatgttctattggtcacagtgctctatgggtcactaatattagtacagtattgggaggagggctacacaaggagtggggattgttggtcgccgtgttgaagtccagctaccactctgagtgtgtgtgtgtgtgtgtgtgtgtgtgtgtgtgcatgtgtgtgtgtgcgtgtatatttcatctgtaattactttggcccaaagatctcccctcacccttacccctgtttagtacacacagcatatagggctggaccagcttttgccattccagcctctgctcttcttttcctccttcacacttcaacctgcacttgagttttgcagaatgacctgtactctcacccttaggcttctgcattttctgcacatacctccttcatctaccttcagtctaggcatcagctcctcttagaaacctctcttgaacccccagtctaaattagctacccctcctaagtgttctcatggcaccctgttcttcttctgccaaacacttttatgtggaattttagaatcatgtgtcgatatgcctgtctctgcttcttgagcatggggtctggtgatttattaatggacttaggatcatgctagtccatactacatggtcaacaacttttgctgggagaataagtaaatgaatgaacacattatgaaagtgcctcagggctttgtgatccatgagagattggctgataagacttttgtttcgccatcactgccacccccaccaccactaacatcatcatcatcatcatcatcaccatcactatagttttgttgttatctccccagtgagctccaacctatccagagctctgctgtgtgagcttttccagatccacagtgtgccagccagcattgcaatcaagttttgttttcattatgcaggcttcctgtgaagttttaaattaattttaatcctctcctcacttttaaggcctctaaaaagagctgtattcccaccttccttggtaaactggggcctatcccatttccctaggacggctttcattctggcgagggctgcgtgctcccacacccctgcaccactccgtgccagggcagtgggcttccagacttccaagctgtgggcggccctccacctgggctctggggaagcatgcccagtccatgagagccacgccaacacccacctgggtctgatggatcctcagctttttaaaattcactctacaacatgcattattttttgttttattgtttgcttttaccactgttaaaagtagacaatatgaaaacaattattctgcagagcgttacacatttctaacagccttcctgaaatgtttggtctgaagctgcctctatggttgtgagaaatatgtgtagtacatttttttctcctttcttgatagagatttccattttattgctgagaatgggttagaagttattcacagacccactcaggaaaatggaagttactctcataatctctattatgagataaagaaatggaagttactctcataatctctattatttatttagtgcttgctagttccaagcttggcgttaagtattttcacatacttggtgtcattagagccttacgacaaccctatgcagcagatactattaacctcattttgcagaggttcagagagtttaaataatttgttcaagatcacagagctggccgtgctgagatggggtcttttgtcctctgattctaaagctcactctcttgtcactacccaaagctgtctcttttccagcgttttccaactgccaatcttcatgaatgtcttggttgcctgaagatgaatttgtccaccaagagtgaagagtttagtgatttgagaagctgtggaaagtaaatgaaatgagatacagggcccattctgctgctgggcttttaaagagagaggtgagcaaagcaggtcggctattttgggcttagagccaagccttctggggctgtcccagggaagaacattgctgagttgtggggtagagcttagtgatggcatggtgcagagacagggcctaaggggagctgtctcaaaaccacttcctcctccagggttccttctctgtgggagccattctacttccccacccatgggggaacctctctctgtattttttcccccaacactatttctaggatccagacactagtaggcgctgggcagggatagatgtcatgctggctgatactgctaactggataaactgtgtggagcctcagtttcccccacttcatggtcagcaggctttttagaacagaaagaaatttgacggtctctctaggaaccatggccaggttcccactgttagacacacacataagggtctcagattcatctcaggcttgggcctcccatgtggtagccgagccatcaggctggctgtgaaatgccttattttattttctgcctaacatcaggttgcaaatgaaaataccttttcaaccctagtattattacccctatggatggcacgtttaatgtgcgctattcattgttataatggccgcacctgtgtagcacacgcacactggaactgcagcagctgtggactgtaattgcaaaacattattttctgtttctccccgaaagcttttgtgcatgtgcgcgtgtgtgttatctgtgtccgtgtgtttgtttcatctataatgactgtggcccaaagattccccatccctacccccctttttaaacataaaactaaatgtaaatacacttatttctaaatgcacatttcagtgaaagtcagatgcaaccccccatccctcccctacacattcagtaatgagacttcagagagctacttcggagcgtgtggtctgtggaaaggttcacgcaatcgccgctgctgggtgcagtggtctttatgctcgttggcacacaggctctcccatgattaatgcatttgttccttgatattcagcccctgcaggacagagaatcaatttagcactcacaggcccagattatcaccagtaccaaagacatttctgcaccaggggcttccccattcaaaacgaaaagatatttttcttttcatttttttctttttttagagacagagtcttgctctgtcgcccaggctggagtgcagtggtgcgatctcggctccccgcaacctccgcctcccgggttcaagcaattctcctgcctcagcctcccgagtaactggaattacaggcgcgcaccaccatgcccggctaatttttgtacttttagtaaagacggagtttcaccatgttggccaagctggtcccaaactcctgacctcaggtgatccacctgcctcggcctcctaaagtgccagcattgcaggcgcgagacactgcgcccggcccaaacaagatttctaagaaggatgtgtttttttccatttgcctccattggttctcatgtctggtggatgaggaaaagcactgtctgcgatttggtcaaaacagttggcttttctcctttccgtgcacttctttaatttgcagagatgccatgtagcccgctgctgcaatgactgtgggggaaaccaaggcaacggtctagcacagaattgagttaacaccttagatcgtgcagtagggctcctggtcagccacctgaagggctggagaacagaagacaaggctatcagcagtgttagggacatgccgcaagttggggcttcaccaccgaatttcccacctgcgaaaacatggatgaggaagacagggctgtcaatttcatcagccacatcctcagaaaaatgaatagagcttctctgagaagtactgcagctttcctctaagccctcggcgagatcctgaatgaagagggacattgggtttattggacatttaaacagcgctgagaagatcaagtaatgcggtcctcatccagcagagcaatgaacttcgtcgtcttgcagactcctccacgttggagacgcaaacctcaggcgtaagcatggggaagatgctcagtactaagtgggcaggcgccttctttgcacaatgcatagctcttcacataaagcgtgtccaccttaactgccttgctttattgaaaacattggtaatgagaattgactgatgggaagggcccacccattacggtaaagaaatgtgagcattttacaaattctcaggatatgagcacagatgtctttgtttctgaatgctcaaaatattactgatgaccttaaaatacattgaaaaaaaatcaaattcaagactatttggttagatgaatttgaacctattattaaaagagagaagttgtaattaaaaaaaaaactgtaaagagaaaacctggttgagagtctacccaccattcttcaaaccctgtaagagttaagaagtccatgaatgagattttttaaaatctggtaaactttgtcagtgtgattatttctctcttgaagaatctgcttaattggcaaagtgggctttctgttctgttaggcatatgattagtgcttttatagtgacttgagtttttgaggctatcagtgctgtgcaggtagaataatagaaaagtcacagcaaaattatttattaactcatgtaaacgagtttataaataagctggaaagcagggttgtggtgaatgcttactaagcttttgtccagaaggtggcaacatttccttaagaatttgggagaaaatgctggcttcagaaaatgacgatttatcttaggacattgtgttctgttctcttttcaaaggtacagcacaaaatgcacgtccccacacccatgctccctctttattctcaacagattccagggagaaatcttgccgtttcttctctttatctttctctctggagagtaaatttacattgttcagattttcaagctgagatgagtttatgctgaaatgaatttatgtagctgaaaatattagattcttagtctccccacttcacttcatctctctgaaaggtggtgtttttggagaaaagggcccatgtgaagagtcacttacatttctagcaggtaaatcggatgcccactcataaccgtgaacgtgtcttactttctgaaaatcccaacaaacctcaagatgactatttgcagcgatagcgctttgctacactggattgctctctcgtttcttaatgttttgttcatgcaaacattaagatccagaagcaagacagaagagagtgaggacacttgtttgggctgaaggagtgaaaataaaacaatggattaggttgtccatatatgaacattccgaatcctgcatgcagcccagtgtcttaatagcaagttgggggaatcctgttcaggaattggaaatgttggtttgttcatctctactccaccccatccctatagtcccccatttcccagtatattttaattttgggaagccatggtggttgaaaacacacacatacatatacaaaaatgggcctgttttaaagtaactttgaaaattcattactttacccatgacttttgtttctgactagcatatccatgtgtaacgtatttctttcctggttcaaaaagaaagttggagtcaactgttagaaaagaaaatttgagttaattaaatattatttagttatcaaaattgctccaaattacaaaaaagaataaaataacattttgtttgtttgtttgtttgtgtttttgagacagggtcttgctctgtcgcttaggctggagtgcagcggtatgaccacagctcacggctgctttgacctccctgggctcaagtgatccttccacctcagccttctgagtagctgggactacaggtgaaatgtaattgggctgctgattctttgtgtttatgtataatcttaggatcatgcctttcatgctagaaatgcattcctagtagatttcttactagccagtcttgctgttcttactcgtgttctctctctctctctctctctctctcacacacacacacacacacacacacacacacagtttccagtaggacatgcacttcaccttcttacctctgactcaagtatccccattgcaatccataatccataattcataatctcccttgtgcagagactagaaagtgccttctccaaggttggagaaagcactcagatggccccatgtgctccacacgccagacatgaaagctttcattccttgtttctgtagccatcatgtggctgcttctctctcggacctcatgagaagacttactaggagtctctctccctcccctcacccttgtacccctgagtttctcctctccccggccctacctcaccacacagccagttgttccattcctgtctcatttctgacagagcagaagagctccctgatctgcccaagaggtggtgcatgtgtgggatgacccggacccgggatgaaggacgagaagacaaaatgtccagctacctaggcacatccacttgaagaatttaaaagcaaaaaatgtctaaataatgtatacacatgatgcataatacataatatagtataacatacgatacaaaatcacatggtcaaaggattaaattttgtttggtttttttggagatagacttttgctttgttgcccaggttggagtgcactggtgccatcatgggtcactgtagcctcgacttcctgggctcaagagagcctcccacctcagcctcctgagtagctgggactacaggaataggccactgtgcccagccaattttattttttatttctaaagagatgggggggtctccctattttacctaggctggtctcgaattcttgcctcaagtaatcctcctgccttggcctcccaatgtgctgggattacagatatgagccgctgcatctagccaaaattttgtctttttgaagccagtagcatcttctccaaggttcagaatatttcgtctatacatgtagctaattgagacttcctgaagctgccgaactcaagtggcaaatttgctcatgttacacttttctgctcaaagaaaaccaggtctctttattgttctcatcttgcacacaagtccctgtctgctgggtaggtgcgaggggttggggcagttagggcaggggacaccacctagtaaaattctagaaacctagtctgatgtgtagttgtggctctgcctctttggatctttcagatttcccacccctggctctcaccacccaccccaggtggcacgcaatctcttagcagtgaggccatttatgtcctcactgtcttctgagacagagtggttggcctttcctgcttcctggtctggtgatcatggagaaatgctggttccatctggctttggaccatttgtcccttttcttaaagcccccacctgagagcatcctcattctaacccagcctgtgtgggttctttatgcatcatcacagtgaggcatgtggttacctgagtccccatgcacgctactgggacaggaatgtcagaagactcaccaggtcactcctctgatgaggctgtgcctgtgtcctgggccacggggaaggcttgccactacaccctgctataccccaggaaggtgccaccagcgggttctcgtataccttgctggatttttttttttttttttttttttttaggcagagtcttgctctgtcacccaggctggggtgcagtggcatgatcttggctcattgcaacctccgcctcctgggttcaagcgattcttctgcttcagcctcctgagtagctgggattacaggtgtgtgacaccacacttggctaatttttgtatttttagtagagaaggggtttcaccatggttgccaggctggtctcgaactcctgacctcaggtgatctgctcacctcagcctccgaaagtgctgggattacagacataagtcaccacgcccagcccttactggatattttaaaagctgctccaccccagagtggaccgggagaaccttgatattggaccttgctttcttggcctttctcatctcctcttcccacaatctccttctgggggcagcctctagacttttcttaaaggttcagaattttctatctgtacgtcttcctctttggcatatcctctttccactttagggcaacaagcataatggcctgtcataagcagaatgggaatcttatctacattatagaagaaagtctgagacctgagccctcaggcttgtttcctgatacaggaaaagaatttagaagattttctttctctctctctctctctctctctccatctacaaaatctatcaaactattgtctttcccagctttgaatgctgacagctaaattcaaacacactatttctctttaaatttgtcttgataatcctaatgccttctacagtagcctgcccttcaatagatgcttccagatgagaggagataatgtactatgtacaggaatgcacagtaagatttcttgcctctttcacattaatttcactcatgcctgtaaaagagggtccctcccagcccccaagctctgtgcagaggaaatgttgcttcccttttctggtagtcctgttgatgccaacacctcagctgatggtttggagtaaatggtagtaaagggtaacttgtggcaaaatgcgagtttggatttgggttttagtgaatatgtttaagttaccgacttactctaatttacttacagacagtatctcataatttaaatttccatctggtaaattattaagtaaagtacgtgtgacatttgtgggtgtggtggggtgtgttgtggcatggatgtgtggtgtgtgtgtgtgtgtgtgtttgtgtatggaggtgtgtattttggagggttgggatgggcagagggagtgtctaggaaagtccagtttctactgccattcaatctttttttttcctgaggcggagttttactcttgttgccccggctgcaatgcaatggcatgatcttggctcacagcaacctccgcctcccgggttcaagcaattctcctgcctcagcctcctgagtagctgggattacaggtgcccaccaccatgcctggctaacttttttttggtatttttagtagagacggggtttcaccatattgaccagactggtcttgaactcctggcctcaggtgatccacccacctcagcctcccaaagtgctgggattacaggcgtgagccactgcacccggcctgccattcaatctttaacttactgctgataatttttaaaaaagtagattcttgccactggcaccaaactcagcacatttattcttgccggtttgggctgacatttagaaaattaattttttttagtcattctcaggacaagatggcttcctaatgaaaaagcaccactcttctagcaaaagtgcactgggtcacattgacagtatcagaggcccattgaatccagaagctgttggtcccccaacctcctggtgctctgtgggggcctgaatcatagagaagatcttcaccattagaaatcctagaagtcactgaatgatgaagaaatttcagaattctcatgaagaatttctttctatcagttaagcccagatggtctgcaaaatacaaaaaacgattataagatatgttgatttaggatcacgtgtgcacctccaaccatcaatgccagcaggttgtttgttggatctgaggtctcagtttagttcattactgttggttagcaggagattataaactggaatttcaatggcatgtgtgaagctcagccttagtcaatatttacacacaatgatagttctcatcaaggcataaggacttagttatgaaatgattatacatcacaacctatctataaacaagattttaattatcgtcatcagcagcagcaacaacaaacatttttggaggagctaccctgtgccctaattgaattaatgaatttgttaatcattgttttctgtctccgtaaacatttgctaagttcaatctcagtcaaattacctggggaccagaacatgagacctcattgcttaaaaggatgatcttttttcttataatgtgaagagatttttgcttgtgcttgaaagtgtaactgaagttttctcagcaataccagccagacagggcacagttgaagtccatgtctagaggggcctttttccagaattcctagcagtgggatccctgtatatggaggccccagttccctggcagagtctccaagcattgggcacatttgccttgcctgtcctcttgctctggtgccctgtgattcccttgctgtttgtctgctgtgtgtccattgcaaggctgtgtgtccatgtcaaggctgtgtgtccacgtcatgactctcaatagcccctacctaaccatgacctctcttatctgcttggtcctcagggccctttcaaaccagctgtaggtgctgatgctgtcctgcggagaagcttctctcttcctcttcagcactccctgctggcgtggatctggtcagccctttggccatgaataaggtgacctctccacaaatatccagctggattttaggctcaaaggtaggctggtcttgtgtttgcagattcctgccatgcttttggtcttgtgattctttcagttcatcttccctatttcatttaacttactgctactccaagcccatgggaacctctgcccagaatcccttgagggatgggtgggaaggcacatgggggtgctgccctgaaacacccatgataatttcttggttctcacacatagccagtgtgcctgggggtggtgcatcctgactgtggctcccagaacttctctgtctgggagagttggtcctacccagttcccaggccaggaactcaagggcaactcatctgctttttttatgacaccaatgggatgggataatttcctaagattttggtcttgcttccttcttggagtcacttctatccttcccatttctaacagaaatccaggctttgccttctcttgcctcaaaagcagaaggtcttcctgatttttgaaaaagcctaagctcagactagattagatttcaccagagaaggagaagagagcccagaatgcttttgagagcgttgagcagggaggggagaggtcattcacctggactgggagaaggttggaggttgatgaatttcatcagtagtggggggcatgtcccctctagtggcagccacccaagggagcagcatgactcaaatgggacacctgtttgatgcacctcagaggcagggcacttccagttttgctgaggattttctgaaccccacaaatggaacagaagcagatgagttgccctatcccagatggccaggaccatggagaccctggtggttttctgtatctccggatgtctcataaccagtggggcctccacaatgtctcgtcctgcttcagacccagggactttttatgtgacctatgcttggagagctctagtaatgactgagtttgacttttctacttctcaggggagtggggcttagaattggacttaagttgatttagagaaaaatgaggctgggtatggtggctcacgcctgtaatctcagcattttggggggccgaggtgggtggatcacttgaggtcaggagttcgagaccagcctggccaatatggcaaaaccccgtctctactaaagatataaaaattagccaggcatagtacgcacctgtgatcccagctatttgggaggctgaggcaggagaatcacttgaacccaggagacagaggttgcagtgagctgagatcacgccactgcactccagcctgggtgacagagtgagactttgtctcagaaaaaaaaaaaaaaaagaaaaagaaaaaaaaagaaagcaaaaataaggaaatgtggtattttttgtactctctgtgctggtgaatggtcattgattggctacattctgtctggtctttgcacgtttcaggaggtcccatcacaaatgaaatccatgctgctccactttgacaggtttgatgttgtgtcatgagcatgctcagtggacaaccttgtgtgaccctaaggaccaaagaattacctaacacttataatccatattctacattcttaatacagaaggatttcttattgcattgcaaagtctaggtcagacgaaagcagcaggttgaacttgttccaggtaataggtttcttagtggctgagcagcctgcacacatgaaggtaggatatacagagagcaagaagcagaacaagtgggtgaacaatggtttggattgtgaaattatgttaaactttccattagatcgcctggtttgggagtgagccttcattcattattcattagtacctactgattttataccgcattctaatggttgcccatgtggccctgaactagatagaaattgtgtatttcaaaatagcaatgagtaaatttcaaatatcgcaccagaaagaataagtgaagcgatggatgtgttaattcgcttgatttaatctttacacattgtatacatatatcaaaatatcacactgtaccttacaaatggatacaattatgatttgtcaattaaaaatatgaataaaaaagaaattgctacaatgagaactattgctatttattaccttaaaatgccgagtgttgatcttaggaatttaaacacaatggcagcagctctctctctcctacctggaggttttctgtacacagcagatgattgtcactacatgtacagaaggtctgaagactcttcctttggaagactttaacattgtaggcatgaatggggaaatcgtaggggcacagtgagaccttgttaaggagggggcttcctgttcacgtctttctttactaagaaaatttaggagatacatgatggagaatagtacacatggtctgtagcacacacatttaggtcacatgccttcctctgccttatttatccattcaggaggatatgcacttgtcctgacaaccccctcacttccaccccagtaatggtaataatcgaacttataatacataacaaaataaaaataacttaccaaagcactaaacaatcttactccctggtcattaggtcaccagctaaacacacttgcttggttggcttttttttttgaaacagggtttcattctgttgcccaggctggagtgcagtggcacaaacatggctcatcgcagcctcagtcccctgagctcaggtgatcctcccaccacagcctcctgaatagctaggatacaggcaaatgccaccattgctaattaaaaaaaatttgtagtaacagaggtctctctatgttgctctggctcataccaaactcccggcctcaagcaatcctcctacttcagcctcccaaagttctgggattacaacaagcatgagccaccatggccagcctggttcaccatttcaaaaaatttttactaatttgtcttttctgaaatagaagatacaaatctgcaccttctacactatgctttgactatgtgaattaataagccagagtctaggaaatgaaacaaacaccaccattcacaaaacatgattctaaatgcagaaaaaaacaaatgatcccatttgagggtgaggaaaggctatgtgtatgaattaagtgacctttatgtaccaggcacttcatatatgttatttcatttatgagccaggctctagtgtaaccatcttacagatacagaaatggagtcttagagaggttaacatattgtttagggtctcgtataggcagttccgtggaactgaaattttaaatgtggtctatttgtagctaaattcatactcgttgcattctaccacattgctttctagacttagaaactgaaacggggagcagagttgctgcagaaagaaggggtttgagaaatctgggaccgtaggattttatagaactggtgaagaaatggaacctacgaagtaactggccaattacttgatcatgttgtgagacagagatatgatagcttatcctaaatcatggtctaaattgttgcgtttagattaaagcgtttgagaaatccacaaaagggttaaagtgcaatcactttctattgctttatttaagtcatagaaaagattaacatgtagtaagctgaactgaaatgacatgggcaaagcgaataagaagtaattttgcatttaacagatttccttcttattccttcactcactccagatggagggtaatgtaaacttcatatcataggaagaaatgcctattgatcgattaaacatcaataatggtgctctgtctccatctgagtatatgaaagtgactgttttcaaaattaacccctttctgggtcctacacatgttatcacgatgcatcctgaattttggaagccagactgcccacagctgtgcaattatgtaaagtgggctattttccagccatcatttgcatgcaatggtaaaaagctacttttatagtttagtttagatacaacacacattggaatactgttattgacttcatttcttcgagcacacatgatgcttcctaattattggggactttcctttttacggcacaataaacagattttctctgagtgcaagttcactatgcaagggttgcccacatagtggaaataaaaatctttaacttaagatgtttatttcttagctaggcagtctttctggcctgataagaaatacctgtatatccttccctgcagtcagagtgaacactaaaagagggatttgtatctactttgttttatttttttaaaatctgaatagcagcctttctagagtgtacaatccttcatttagtttgtgaatttagagcatgagaattgctgttggtttagacctgcaattcatctcacccagagctctgtccttgacaggggtcctaggtacagacctaatgactagatctggttgtcttggacatcaatctgaaaagcctagtgatataatccaatatatgcattgttttcattcagcaacaacttattactaccatgactgaggcattgttatccactgcagaggacacagaaaatgtatgggacccaatcaccacctttagaatttagtggggaaagtaaaatctgcatacatagatctaggtacaaagtagacaataataatcgctgagagagagggcagattactgcaggaggatttaaacaacagagataattaatattagggcatatattaggagtgcattgtgcatgaatttatctaaatacttcgtgaacatttttcttaccatttctaaactagaacttttttttttattgatacatggtgcatgggatgacatgtcataagttaacctatcttcaaagatttaggaatagttttatttcttcgaaaagtttccagtttcatcccccttgttcttgtaatgacattacttaacagaatctaatatatagttaggtgctgactaattacagatttctaataggtcagcattcaggacttccatagctatgaatcaaaagtagattagtgtgaaaagaggcacctctaggttagcaagatatatgatttaataggtaggataaaatattgggtgctatttccaattctgccacttgttcactggatagtcacttaactgctctatattttagttttcatagcaataaaatgcagataataagatttcagcaccattatagaaaattaatggtagaaaaggtctttagaatcctaatatttttttaaaaaaacatcattccatcattgttcaggtataatacacaggaagagaagttaaagtacccctaaagtaacattatgaacattttacacatgcataaaaatattttttaaaatgttataacttgtgtcttgtcattgctctgttatttaattcatgtcatccttatcctttttgaaatatttcatttccttggaaagaaaattaatattaagattttaaaaaatgccctctggacattcctctttctgtgggccccggtttctgttggccagtgatgccatttacacctagatttacctttatgtcaggggagaagacctgctcttcatgaaagctctgcagccttcatggtggacagatctctttctgaaggtgacctgctttcagcactgctggggactcctgagatgaaatcagtttcaagagctctctggctttgaagtgagttttgtggtgatgtctttttttttgcccttccagttcatgcttgtggcacaaagcaaactttatgagtccactcaaattggcagtgagtaggaaaaagaatctaccaagcaaatgcctgtaagctgtagtacctcagggattctaatccatgcttgcttgactggtgagtgcttctacttcaagagaaaaaacaaattctcctgacaaactacttggatactgtttcccgggagttaaaagaacaaaacctgagaggtagcattggttcctctggatggatccccaaccaacttcagtgttggctaataactttagctttctttctttcttttttttttgtttttttgtttttgggttccgtcaagaacatagaggctactggactgtaccacccctaggcctgggcaagaggagcttctgccctgtgccctgatcttcagagagcatcattctggcctcatagctgagctccttcatacagggcaaggggtgtgtgaatctaagggggacatgtccacccagaaccacatttccttttctacattatgctatgagtacccagaacctcagaattccttgcacagattgccatgagcctgtttataggtcctccatgaacttcttccagaatcttttcccccaaggatggctgaacccactgtggatgcatctctaagctcaaggggtggccaaggagtggctatttccagggggatgtggcctgagtctgggcttgcaggcttgggtgtctacatgtgtccttgtaggtctctcgtggtatattgtggggccagaagtaggaagacaagagaattggatcatgggctggggtggctctcttaggtctctatattctagcatagaactccgaggagtccaaaactcgaaataaagttggcttcccaaattttaaagaaggtatatctgtcaagataggcattttctattgaacatacatatctaacatattttaactactttttgcttgactgataaattttaaatatttggatatagacatgtgagtatctatttatactttcaccctgggctcagaaaaagggaggaatggaatactgccagatatgcacttccttcctgctcctcacatcctatcatagggaggtctgaactcttccttcaccagtctcagaggataaggttcctcttccaagttttaaagaccaccccttgattccaacccctcatatcattctatatcttgtgtcacaaattgttccctttttctattagatttccttatcttattaataagacaggtctctcacaccagtaagaatgactattattaaaaagtcaaaaaataacagaggctggcaaggttgctgagaaaagtagatggttatacactgttgatgggagtgcacattagttcaaccattgtggaaatcagtatggtaatttctcaaagagctaaaaacagaactaccagttgacctagcaatcccattactgggtatatacccaaaggaatggaaattattctatcataaagacacatgcacatgcgtgttcattgcagcactattcacaacagcaaagacatggaatcaacctaaatgcctatcaatggtagactggataaagaaaatgtggtacatatacaccaagaaatactatgcagcaatagaaaagaatgagtccatgtcctttgcagggacatggttggagctggaggccattatccttagcaaactaatgcaggaagagaaaaccaaatactgcatggtctcacttaaaagtaggagctaaatgaggagaacacatggatacaaaaagaggaacaacagacacgggggcttacctgagggtggagggtgggaggagggagaggagcagaaaagataactattgggcactaagcttagtacctgggtgatgaaataatctgtacaacaaattcccatggcatgagtttacctatataacaaacctgcactattgagtcagtacctcctacaggtctctcttcctttcagtcttggctcaatattatctgtctttatatttctaccagaataatttatctaaaacaaaaatctgatcaagtcattctcctttaaaatcattgatagttacagcataaatacgaagttatttaatatagtatacacagccctctgtgatctgcccactgtttatcttttcctttctgtcccttctcacaacttgtgttaaagttatattcaacttctggttctaggtgcttcaggagctgtggcttaaggtgcagacatggccaagtccaagaaccacaccacacacaaccagtcccgaaaatggcacagaaatgtcatcaagaaacccctatcacaaagatacaaatctcttaagggggtggaccccaagttcctggggaacatgtgctttaccaagaagcacaagaagaagggcctaaagaagatgcaggccgacagtgccaaggccgtgagtacatgtgccaaggctatcgaggccctcgtaaagcccaaagaggttaagcccaagatcccaaagggtgtcagctgtgagctcaattgacttgcctacattgcctaccccaaattttggacgtgtgcttgtgcctgcattgccaaagggctcaggctgtgccagccaaaggccaaggcccaggaccaaaccaaggcccaggtccaaatcaaggcccaggctgcagctccagcttcagttccaactcaggctcccaaaggtgcccaggcccctacaaaggcttcagggtagagatctctgtctgccaatatgaggacagaaggactggggtgaccccctgggctgccgtctgcatggggctggtgtcctcctgtgctatttgtacaaataaacctgaggcaggattcgttttaaaaaaagttatattccaataatgttgccctcttatgcaaccctcctcctcaaaacggacacttacctagctgcctcacataaatgagccttttttcttcttcttcaatttcttgtctgcctgaaatacttttattaactgccactcctcctaaattctggtcccaaattgcctcctttatgaaacctatcctgcttcaccactcccaaaaactcagctagagcccccaattctgggatctcattgtaccctttgaatgcctgtatcactatacttactacattgtattgaaaaaaacatatttatggataattcctctctctattcttagcaactcaagaatttggagtctgtccgatttgtcttgatacctcagcacagaaggtatttaatatgttgagtagcatcaccccactctccagtgtattataacgtttacattctttgttgtacagagaagttctggctttagcaatagagggaagctattcctcttcacttcttcctcaccgaatgactctaactagcaccaagaaacccagttctctaaccatgaagattggacccagtgattcagttgcacgggcacagcaaaattccctgacctcaaagcagtgtttatatacagacagactggctgataattaacaaactgaagggctgtgggcttttttgagttcaagggtataaagtatgtgagggtgatgggtaggcaagaaaccaagcagcagtcattctgcatatgaacatggtgtggcagtacctggcacgacacctggggaggtatattggcattgttcctgaagcttggaaatctggtatgttatgtgtgtccctcagcaacagatggtattttgggggagcttatatttgaagatgatagtttactaataccttacaatcattaaatgcctgaattagatgcatcttatgtgcatgtagatttgctctgtggacttaagatgaaatccctccagtccttagttgtattagtcttctaccacagttgagataagagcaagggtggaaaaggagtaaaggtttcgtctgcacttagcatgaaatccaaagtccttcacatggccaagaaaggcttgcaaaatctctctcccatcaccttgttccacaacccttccatttcttgctccttcatccttagtcaactgtgattccaccacagtggttttgttttgttttgttttgttttgtttaactctttgtcattcctcccactgaattagggcagggcttgtgaccgagtcgaccaaaagaatatggtggaggtaccactgtgccagttccgtgctttgccattaaaaagactagtagcttccatcacatccccatgggaacacagcctccatgctggaggaagcacaagcagccatgtggagaggccacatgaaggagaatcaaggcccctgatatcttaagtcacatcgtgggggctgataattagtcagcaatagacacttagaaggtcctcacacctcccaagttcttttctgtctctgggccctggaacaggtcctttctcttcatgaataattcttcctttcgtgtttgctgtgacatgcctgctcattttcatttttgtcacctctccacaacagttgatcctaaaaacaacctatcaaagctggctttctattttaatctctgacttgtcacttactttttgaccttgggcaagttacccaatctctctgaaccttagttatccttatcattaaaatgggagtattgataatacctacctcccaggcctgtggatgggatgaaatgaaataatgcaagcaaagtacttagtgcaaggcctagcatgtagtaggcacctcataatcataaacagtgtggttgatctcagcctgagagagaatcatatctggaatcttctttatgcgtattgcgggggaagagaagtgggtggttctgaaaacatttgttatcctcggatgagaacagctaagcgccatctatattgatggtcttcaggccctcaagtggctttgagactggagatgaacatggctcttcttattaaaagacccaggtctggcgtggggttataattttaccattatagccctggtcatctccttctatttgcacggttcttgtcctacactgaacaggagagcccagggaagctaatgatcctcatttgtatcagttagggtctcaacctgctctgaaatgatcttcattaggcttgtaagctgtatttattttcattactcttgtgcttgcaggaccgtttgctgctgcctttttctgtacatttctccctgcagagctcttccgctgtgtgagaaatgcatcttatctcttcctgtgcctttcattctgttttttttgtttgtttgtttgttttttgtttttttgagaggtagtctcgctctgtcacccaggctagagtgcagtggtgcgatcttggctcactgcaagctccacctcctgggttcacaccattctcctgcctcagcctcctgcgtagctggaactacaggcgcccaccaccacgcccggctaattttttgtatttttagtagagattgggtttcacagtgttagccaggatggtctcgatctcctgacctcatgatccgcccacctcggcctcccaaagtgctgggattacaggcgtgagccactgctcccggcctcattctgtttttatagaacacatggctgtccttatcacttacatacacgtactccctagagccacatctggccttaggatgtttgggccagaacacctgtgaggtccctctacctctgagggtgccctgcccactgtcttccacccattttagtgcatcatcgcagcagtcagcttcccataattgttgaagatttcaacctttaagcagctctgttctatgggatgaacacccaagcctaccacagtcgaggtagagagaaaatatttgattggaaaaaggtaagtttcccctttttagagccatcagacaactaataaacagtcatgaatgtcttctaatttctccgtgtgtgtgcagtctttggcaaaagagacatcaactcaatatgattaaaaattaagggcacagtggccttggagctctggcttcaccggtagaaaagaagaagtttgggatctagatggtgtgtgttcaggctaggaaagttgagattctcccagaacctggttaggagcacttacattagcatttcccatctcacaggaaggtctctgtgctcctgctgatcacaaatggcccgctgagagcagcagcatcacagagaaccgctgagcaggaaacagaactctccttccaggtgccattgtgaaataccaaacacatttggtatttactacagccctcgctcccacgtggtcttctcacagtaacaagtgtaattctgctagtaactgttttggtaaatgagtcatattgtagcaatcttcatgaatcaaagataattatatttttactcagctagcactggttaagaaaactctctcattcttcaattagttgtcttttcactgtcgtatttatctagaggcccttccacataatttcaacctagttccttgctcccttttccctatcagttaatgcctttttgatttgcatgcctccccacattattgtgtatgttctttatcattgttctttttatatatatatatacattcgtaggaaaccactgtggtggattaaacaaggcttgcctggaggggacagagataacagtatccatagctgggagagttatttataaaccatgacattaggttttcattctacaaagaggttattgttcacatctcatctgccttctactaacttaaaatcttactcagaatgaccatggggttgaaattgaattgccatttattactgtttttgagtgtaggtaccagaaattttgtcaagagctttaaacgtttagttcctgacaggtcacaatgacttcataattagtgtttattttcttcatttaacggatgagcaaaactgaagcttagaggttaaagaatttgcccaaggtcacacagctgtgacacaactattagaacctagttctaattctagcatctcttatgtactgcctacctcataatcttcttgtcttagttcatttgtgctgctgtaacaaaatatctcagactgggtaatttataattggtatgttaatttctcactgttctggaggctgggaagtccaagatcacgacgctggtggtctctgtgtctggtgagggttgactctcttctaagatagtgtgtttttaacatcttcacatggcagaagggcaaaaagggacccatataaagcctcttttatgagagccttaattccattcatgagtgaggagtcctcatgacctagttgcctcctaaaggtcccgcctcttaatacaactgcaatggggattacatttccacctgtattttggagggacacaaacattccaacgatagcactactcctacttacccagcatagtacactgggacttgaaagtcatttttctgctcttgccctgtttcaaggtggacacagaatcatcagacttcagatcttcatctctggagtcagccgtggtctgttccaggccatattgctgggggacagacagaggcagaggcaggaccaggcctccccagcctccatgtcttcatccacacttcttttcctgaatgtgcctggggactctgcaaaatgtgatttcaggtcaatttgtctctgaggcctttaaactcatatcttgtgccctactctcttctccatggtcctcgcctttctaaaagccacccatggcaggccacactgtctggagattccaatgtgtttgacctggggtgggacccagacatcaggtggttccattgtttagctcaagcagtgcttctcaaacttcagcgagcacagaaatcacccgggttctgattcagcaggccaggtggggtctgagagtttgcatttctaacaagctcacaggggctgtgaggcctgagagattcaaactcggttttctgcagtgtggcccaggcatcagcatttttactccccctcaccacccaatgatgttaataagtggcccaagttgggaacccctcttgtggactctccacttctgtgtctctccatcagaaactgttgtccgatgtgttatatttccagggcaaaacatgaacccccagagtcaggaggatttttctgggtatccattctctttagattcctacacccaacattgattcctatctaagacttgccttttcaccagaccttgatcaatgcatggctccaaaaggctcaactgtttacctgctaggtgaccttgggcaaatctgcccaccatgctggacctcagtttcctcattgtcagtaagacagagttgaaacaaatgctaataatttctctcaggtactctgggttataccagaacagggcaccatccttctcccagggaagattcatgattgttgccgctttgggaaggtgggggtgtgaggctgttagagctcattgcgtggatgggaggacaggttggaggaggaggtggtggctgccggctgggcctcccttccagctggggatccttcaccccgtcacacagccagcttggaaatagaccaaggaaagcctcaaagccactcccaggacaatcacttggacctcaaggaatatctgccatggaatattacagcagaaaaagacctgtcagctcctcagtcattctccaaggtgatatgaacatgagggcatctgcaaagaagcctctttactcgcttctgcatctgggagccgccctggctgcatcaattcctccccttgaaaccagcaagccggtggatggatgtgactgcatggctttccagggaattcgctgagtatctttcatgtcagtgatatctgtgagaaacaggaaactgttttcccatctcattcacataatagataagatgagaaattagctgctggatgagcaacctgggggctgttcattttgtcacaataaataaggctctgctcatgctggcgctgcctactagcacatttcctggtgcacgtgtgcatgcggcactttctcatttcagagcctcccagcctcatcctcactgatggctcctgttctgttttttttcccctctgaccctgctaaaggtttccccaacccagagacctctgaatctgtggagttttgtggccacttaaagctttgcctctgagcaaccacagggacccccttccccaaaacaccttccccacacctctaccctatgatgatctgcaaccttgcaccttaggtgcagttcaggcaccagctcagtgtcggcatcaccaggtgcctgttagaaacacagaccctgcggccctggctcagacttcccgaatcagaatcaacattttaacaaggtttccaggttgattcattcctgcacaattaaagtttgaagagtgcaaagctctggtctaaaagagctaacatggattttgtaatgctctgatgaggcactggagagcgagcattttgcctgacatttgggacttctggtgccaccccacctccaagccattgtctcagtacacactgtgatcagccaggtgactgctctgggcttccaacacaccaggaaaatgaaggggcagtgactgagtctgtggatgtggcaagggacgttgtgactagtgtccgtgtccataaatgccctgatgttttaggagggaaggcactccgatctgttctcacagaggaggaggggatagggatttgctttaaggttccacttccccctgacttctttaataatgtgcttaatgctgtaagaaactgacggggtctaggatgtgaagaaaatgagaacttggattaacgtgatattcaagttaaaggtgagggtttcttgctgcatgcaaatattaaagataaatattgtgtcagtttctgagggctaccacaacaaggtggcaccaactggctggtactgtgtggcttaaataacagaaatgtattgttttctagttctgcaggccagaagtccaggatcaaggtgtcatcagggttggtttttcctggggcctctccacttggcttttagatgccatcttctccctgtgtcctcgtatggtcttctctctgtgtgtgtttctgtcctcatctcttcttcttacaaggacaccagtcatactggattagggcccattttattgacttcattttaatttatttattacctctttaaagagaagggttggttcctgctgaagactcggagaaagaatctgttccatgcctctctccttgcttctgcaaagaccctatgtccaaataaggtcacattctgaagtatgaggggtcaggactctaacaaatttttgctgtgagggagaggggcatagtttagtctgtaacagacatgaatttaaggatttcacgtgaactgcacctgatgttgctaagagagggaacttttctttctcctccctccttttggaaattctgggatcaagaaagggtaggggtggggggtggtcaagagcacagcacactggcaacgcagctggaagaaaaaagtgtagccaaggcagggctttgtggtggtggtgtttaatgtttagaaaactaaaaaaagggaaatcaattatggggcctacctgaattttatttcctcaccaaaaaccaaattactcagcaaacttatcgcttgctattgcaggctttggtattaaagaaaacaatcaggcgggcaggattaatctctgacggctgccttatctttaacttgcacctttgttgttttctgatgagcttctccttttttgctgccacgttgtaccatacctcactggttcctttcattttatcatcaggcaagagcggaggacctttcagtttattaaaaaacctttatttgtgaagaacaaagaggggggaaaaaggcaaacaatgaggtcagataatctccttcctgccaggagtcactcacctgttatttagagtattatcagttagggggagaacttgcattctggaaaatgaggctctgacaggctactcggttacacacacacacactcacacacacacccccccccccccgagatcctgagatctgactggcacacatcaacctccacgaaaggtccttgactaacaaaagatgcaatattttatttctaagcttccaaaaaaaagggccttacaagcctgcccctttctatcccccagccctccccactttctccttcaatgtagccccggcttcctgcaaagaagaaagcccgggccatgagtggccacataactgtctcctatgagctgggaataacttagttgtctgtcaggggagctcttgtatcttggatgcatcttgctgttgagttttgttttggggatcagtgggcaggcaatggtttttggtgcatgctgatttgtttagtacggcaaggcatgcgcatggttatctgttgcagggctgcacctgctgctttcacatggctcctagaattggaaagaacactgcaaactccctaatcttccatgcctcagtttcctcttgtcccagagaggctttcgcaagatggtgttttaagattgtttttgagtgctctggattcttaaaccattgacttttcactttcagatatagtaatgattaagaatcaccaccatatttgcaattggtagcatttccctgagcaagtcacttaaacgtctctgagggttgagaagacacactaaggcctagtgtgtatttatgaatatatgatgtgtgtgctgatctattgtactgcatcacagcacatcaaagaagctcgaggttcaggttaaacttactgctgccagccagccactgtggttcatgcctgtaatcccagtgtattcagaattgggttcttggtctcactcacttcaagaatgaagccacggaccctcgcggtgttacagttcttaaacgcagcatgtcccgttcgcagtttgtttcttctgatgttcagatgtgttcagagtttcttccttctggtgggttcgtgatctaccctggcttaggagtgaagctgcaaaccctcatgttgaatgttgcacctcaatataagcagtgtacatccaaagagtaaggagcatttaacgcattgcaaagagaaagaaaacaataacaacaaaaacaaaacaaaacaaaaaacttccacactgtaaaatacaacctgaacgtgttgccactactggcttgggcagcctgcttttattttcttatctggccccacccacatcctgctgattggtccattttaccgagagccgattggtctgttttacagagagctgattggtccgttttgacagggtgctgattggtgcgtttaaaatccctgagctagacacaaaagttctccatgtccccactagattagctagctacagagtgtccattggtgtatttacaaaccctgagctagacacagagtgctgattggtgcatttacaaaccttgagctagatacagagtgctgactggtgtatttacaatcccctagctagacataaaggttctccaagtccccaccagactctggagcccagctggcttcactctgtggatcccacaccgggccgcaggtggagctgcttcccagtcccgcgcgcgcggtgcggtggatgggacccggcgctgtaaagcagggggcggcgattgcaggggaggctcgggccacacaggagcccacggcggtggagcggggaggttcaggcatggcagcctgcaggtccggagccctgcccggcggggaggcagctaaggcccggcgagaaatcgagcgcagcgcaggcgggccatcactgctgatggacccggcgcaccctccgcagctgctggcccgggtgctaagccccttactgcccgagccggccggccgttccaagtgtcgagcccacgcccctccggaaatcgcgctgtcccgcaagcgccgcgcgcagccccaattcccgcctgcgactctccctccgcacctccccgcaaactgagggagccggctcaggcctcggccagcccagaaaagggctcccacagtgcagcggcgggctgaagggctcctcaagcgcggccagagtgggtgcccaggctgaggaggtgccaagagtgagcgagggctgccagcatgctgtcacctctcagcagcactttgggaggccgaggtaggtggatcacctgaggtcaggagttcgagaccagcctaacatggagaaaccccatctctactaaaaatacaaaattagctgggcgtggtggcgcatacctgtaattccagctacttaggaggctgaggcaggagaatcacttgaacccgagaggcagagattgaggtgagctaatatcacgccattgcactccagcctgggcaacaagagcaatactccgtctcaaaaacaaacaaacaaaaaacaaaacaaactattgctgccttccatgaggtaggcgaggtggattagtttttactgctgtgtagcaggactacacacttaaccacgctttctgaaggtcagaagcccaggctggatcttctactcatactcttaccaggctgatatcaaggtgtcagctgaggctatgatctcatctgaagcttagggtcatcttccaagcacatcccaaggctggggaatgctctcagctgccagaagctgcgtgcagttccttgtcatggggtctctctaggagggtcacaacacagcatgcatttccctccaggccagtgggggaagctgtctctgatgcttcacatttttaaaggttcgcctgattaagccaggcccacccaggagaatctcccttttgcctggggtgatatcactcatatccacaggttcccccatgctcaaagaggaggaaatgatacagatgcaggcatggacatcaggaggtgggggtcttgggattcatctgagaagcccacctaccacacaaagtttccaaattctctattaacgtacctctagggtccacgaccccactcgaccagtcttaaaacttttcccatattagttcagaggtggggcagatccatctggggttggaagctctgacttacctgtttgctctgatttctctgcttaccccactgaaaaactggagaatcaatggtatggtttgtctaatgactacttggaaagaccttgagtgtgttatagtccaatgggggacagtggcaaagcctttgggaagggccattggttgagtggaagaagatatacaactggatagagccagggatgttggggaagccagtacgatgctgccaatctgctactttgcacttaactggacttagtaaccgtgaaccctactgcctcctcaatttttttttgaatttaattttttgtgtaaccgatcccaatttagaagccaaaatcaagccttccggtttttgaccttgtttcctgttgttttgtctctatttcactccagatcctaatcttagaggctctgacctccctggtaaccttacccagattctgaatttctcccttgttaatatctgattctatctttgtgtctgggctgggccctggctgttgtacagtttgctttggtaactcagggagagaagcccaatcccttcccttaacaatgatacttggacactttccctctccttggccatgctgagctctgatgtacaccctacttctcctgtctcctcttccctgcttccctctctccttttcttcatgactctgaagaatctttaggaagtgagtttgaaaaagcctggaaggatgctagcttctcagcttaacatgcttctgtaaactcttgtgaacttgctcatagcacgtgggctgagatcaagagttctaccctctctctggggactgaggtcctggccttctcaagaggatagggctcaggatgtaatgatagagttcttttccagccccgagagagtcggctcctttctccctgtcacacacacgcgcgtgcatgtgtacacacacacacacaggcaacacttcacacccatgatgatgatgattattaaaacaacaactgtggaaaatgagcagtgttggtggggatgtggagaaattggatctcatgcattgctggtaagaaggtaaaatggtgcagccactctggaaagcagtgtcacagtacctcaaaaagctaaatatagaattatcatatgatccagcaattccactgctaggtatttgctaaaggaattgaaatcagagacacagcagatacttgtactctaatgtttatagcagcattattcacaagagccaaaaggtagaaccaacttaaattcatctattgataaagatgaatagataaacaaaatgaggtatatacacacaatgaaatagtattcagctttaaaaagaaaagacatgcttcaacatggatgaaactgggaaacattatgctaagtaaaataagccagacacagaaggacaaatgcgtataattccgcttatatgagctacctagagtagccaaatccacagaagcagaaaatagaatgatgatttccaggactgaagggagggagaatagggagttataattaaaggggttcagagtttctgttgacgatgattaaaaagttctggagatggacagtactgttggttgtacaacattgtcagagtatttaatgccaatgaatcatatgtcaaaatggttaaaatggaaaatgtgttacatatactttactacaataaaaatacacaaacatgtttacgtgtgtgctttgaaagctcacaataaatggattatatagtatattacagagatacagacatcttttatggaaaaatgccatgttttagttcatgataacctgtcaagatgagaaaagttgacgggagaacatcaaagtgtgtaaagaattctttccagctagatggcaccatatgcggttatatctattgcatgtttagtaattaaatacaaaagcagcattctaaataaaaacatcatgctctgtatttttataatcaacttttcgaaagtgctaatagtttctttttcatgctaagaattgcatatcctgctgttttattatggaatatgtttaaagggatataaaagtgacatggaaagggaagataaaataaactggggccattagctcggagaaggaaaggttaaggtcagccattcagtgtgggtgaaagggcccagggttgggaggcagatttgggctttggttgtgcaccaaccagttttatggtgttttagcaaatcatttaacttttgggggcctcagttttctcttatatgtctgttacacaaaataagaggggttgtactagtgtcattcattcattccctgtatattcactgagcatctgctttgaatgagggactctgctagggcatccgtgtccactggagaggacaggaggacctggtcctggccatgctgaagcttacagcgtgatatgtcatcctgctgttctccaaggtgccttgctggtctctggttttctcatctgttttcatcttgtgagcacatagggcttccttccttccgtctggcactgaattgcacttgccaaatagcccctgtgagtgtgtcatcacccttgccaaatagcccctgtgagtgtgtcatcaccccacagactgtgaatcccagagggctggaggccatgtcttggaccatcttcagctaacggtatacattacacaaaatatatgctcactaaatgtcttcctggcttatgtttctaattgtgaaagtaatacagtgatcaattggaaaacagtggatagcagaaaagcatcaggcctagatggaggctattgctgtagtccaggagaaatgatggggcctgaactagggcggtgagcgaggagaagacggaagctggggggaatgatacttggcaggtggaattggccagacctggaaccttaagagctgccggatggggactcagcaggcgaagctgctggccacacccacagggctggggtgagcggaacatcttggccagtgggtggggcccactgtgagggagtaagaggcaggtggcaggtggaagcactggcacctggtgggcgtcaggagatgcagggctgtggagggcggggtgaaacacaggaagtgaggggacaggccatgtgtgtcaccctgggcccgagttagctcctggaggactggcagcagatgggagggctgctagggtggagcagggtcaaattctctcatggggctggcagagtgagtcaaggaccaggctcgggagaaaagtgtaacaggtagatcgttaaggcagggatccggaaaggacgcatcatattagacctgggtacagggtggggacttggtaagagagaaaaagtagagtcaagaataaaacagggtttgatgtttattcagttcttccccgagtcagtaactatcaaccatgtacctagtatgtgccacacatactgctggaccagagggaggtgcggaagggaagaggtgataagacaggaagatccctagctctgtagagcctgcatcctagcgagagggaccaggagagggaccaggtagatggagtaagagagagagagagagagagagagagagtgtgtgtgtgtatgtgtataggaagggaatactgaaggtctgagatatgaagttattaaagattttacaacaaattatttttactaaggacaggagaaacttccagagtctgggttttgacaaattatagagttgtgaacaagtggggttagatgtgagtaccagaagctggcaggccatcacagtgagtgactgaaagacaagtgtgtgtgtgtttgtgtgtatgtgtgtgcacatgtgctcctgcagagattaggattggaaagagaagggaaaggctggatagcgggagagagaaagtcaccagtacccagctcaataaacagcacacccccagccccttcttgctccctctggccacagcccctcctccgagtcaccactgcccttgctttcgacaagcctgggttagtttggcctgtttgcggacttaaaaataaatggaatcgctggatgctattttaaagttgtttccaaagctattttgaaactttttccaaaatgacacattaacttagaaagacggaaacagagataaatgaagacatgctgttgaaagccatgatggttcatctataaaaatggctgctgataatcagttgttccaaagtgtctttaaattaagggagaaacctatcatatggcacctagctctggaggtacgtctgtctttagaaagctcatcccgggctggacacggtggctcacttctgtaatcccaacactttcggaggccgaggcgggcagatcatgaggtcaggagttcgagaccagcctgaccaacatggtgaaaccccgtctctactaaaaatacaaaaattagctgggcgtggtggcacacgcctgtaatcccagctacttgggaggctgaggcaggagaattgcttgaacctgggaggtggaggttgcagtgagctgagattgcgccactgcactccagcctgggtgacagagcgagactccatctcaaaaaaaaaaaaaaaaaaaaaaaaaaaaagcttatccaatatcctgctattgaaaacctgatcgttctgctaccaggagaagtagaatgtgttagaaggggatctctgaacactggctagctaggctggtccccttggctattaatgtcctaccaaatttcacactttgtcttttgcaaagcaaaatataagaacataatcaatggaaggaagccaatcaatttttctttcttctgtatcttatttaattttcacaacaatattttgagatagacattattattataatttaccagatgggaaactgaggctcagagaggttaaataattgtcccaatgtcatgtagctgaaaaacactcattattaatttttcctgctctaaaatccagtctctccatcatgccaccttgcctctagctatactaggatatctcagtattacttttttcctttcgctttatcaattatgattattaaaatataaaaataacaatatatatttgatttgttcattcagcaaatgaatgaggcacctcatgttattgaggctgtcttatactccccaagcaatgtctcaggaattggggaaacagtggtaaacaaatatagatacggtttctgctcttgtggaatttggagttcagtgtgggagacatccaaaaaactgcacaaacaaatgtaaagtagaaactatgaaaagtgcaaagaaggctagagatataggtgttaggagaagctatactggagaggaaggagggatttgaccacactagggatttcagagaaaacttcttgagagacacatgctcctgagttgagttctcaaggatgaggaggagataagagggtgaaatggaagaagatatgcgaggagcatgtgcaaaggccctggggtaggagggaccattgtgagcatgaagaaatgaagggggaacagtatggctagagtacacgcagcaaggcaggacctattggaaaatgcaggagagataccaacaggggccagaccagggctttgtgagcctggaaaagggtttgaagccacctcacaatgagtttttactgagtggcaaggaaaaaatagacacaaattttcagctccctttactatctcttgtattctagagaatgcattgcagctaagtgtgaagtcccttggaattaacattatttgtttccttttgggaaatatgttcatcccacagtgctatccagaaccaaattaaaaataaacatctaaaccaaattaggctgcctagaaacactgacaaatatgagccaaattgaaaccaagtttagattctgagttcaagtcaggttaacatcactgtgagtctactgataatttaccgtatttaattttttaaagcttgctgtgtccattaattaagaaggcttatgttacttgcattgcacagtgagaaagagacagtattatcatccccagtggatccagaacagttaagagcttggcctcttgaacgtgggccacaataattcagcccacatcatttcaggcaggttcctttctactgatttcacgctgtatttttgttttagatgcacggagcaagcagcaaccccacaattacatgcacgctacatgagcagttctcagccggtaggtggcagatccctaggaagacttaaaattacttcaagggaatctaagaccccacaggtataccacgcattgtgcatagactgaatacaaataagatcatcccttctcccaatttataaactgtatatagatgcttttgtgattatgtaaatttatatttctttgtcatatttaggcttaatcagcagagattaaatgtataactactctgttggaggtggatctggccagttgacatttaagaagggagcctcatacttagaaagcatgtggagcctttgcctgattaagcaatcggcatattcagatttgacaaatatttagtgagtgtggggggtgacttatcctcacatgaattctaggatgctggtgtgaaggatcaggaaactgattttggacagagccatgatgctgaggggtggtagatgcaaaagaatcgtttataaacatccggtaagggaaatgcttgtgcaacccagtcactgctgagatacctctggaagaagtgtcatggaagcacccacatctgtgatcaaaggtgcctgcctctgtgtatgaatgcatgtgcacgtgtaagcagggctggctgtgagtggaagtgggccacctcacaagtgcacctgggataaatcgaaataaacttctggactcattttctgccaaacacctcagacatcccagtgcgggcagcttagtatctatgtgaagtcgtcttcctcccgaggaggggggatgggtagtttgtggtggtagtcagtcctccagctcaaacctgaaaggtatttttaattaccaaccctcaagccaggtgtggtggtgtgtccggaattggtggattcttggtctcgctgacttgaagaatgaagccgcggaccttcgcggtgagtgttacggttattaaagatggtgtgtctggagataatccttcagctgttcacatgtgcccggagtttcctccttctggtgggttcgtggtctcgctgacttcaggagtgaagctgcagaccttcacggtgagtgttacagctcttaaagccggcgcatgtggagttgttagttccttctggtgggttcgtggtctcgctgacttcaggagtgaagctgcagaccttcacagtgagtgttacagctcttaaagccggcgcatgtggagttgttagttccttccggtgggttcgtggtcttgctggcctcaggagtaaagctgcagaccttcgcagtcagtgttacagttcataaacgtggcgtgtccggagttgttcatccctccctgtgggtttgtggtctcgctggtttcaggagtgaagatgcagaccttcgcggtgagtgttacagctcataaaggtagcatggacccaaatagttagcggcaataagatttacttcgcagaccaaaagaacaacccttccacagtgtggaaggggaacttagcacgtggccacagctagctcaggcagcctgtttttactcccttatctggacccacccacatcctgctgattggtccattttacagagagctgattggtctgttttgacagagtgaagattggtgagtttacaaagccttggctagacacaaaagttctccaagtccccccccaaccccccgctgattagctagacacagagtgctgattggtgcgtttacaatcctttagccagacagaaaagttctccaagttcccacccgtcccagaagcccagctggcttcacctctcagtggcttatgcctgtaatctcagcactttgggaggctgaagtcggaggatcgcttgaggccaggagtttgagataagcctgggcaacatagtgagaccctgtctcaactaaaactttttttttaaatagccaatgtggtcatgcacacccgtaggcccagctcttcaggaggctgagatgggaggatcacatgagcccaggaatttgaggctgcagtgagctgtgatcattccactgcattccagtctgggtgacagagccaaaccctgtctctaagagaaaaaaaaaaatcatcttgtattatgctgttcttgctttgcaataaagaaatacctgagactggataatttataaagaaaagaggttgaattggctcacagttctgcaggctgtacaagcatggtactggcatctgcatggcttctgggaaggcctcagagagcttttacccatggcagaaggcaaagcgggtacaggtgtcttacatggtgggagcagctgccagagagagcatggtgggggaggtgtcatgcccttctaaacaaccagactctaaagaacttaccgtcacaaggacagaaccaaaccatgagggatttgctccaatgacccaaacacctcccaccaggctcaacctccaatgctggggattacaattcaacatgagatttggtggggacatatatgcacactattttacctctgatcaggtatactttgtataaaccattgcactttttaagaagactgattttttttcaccttcctttcttggcaaagtaggacccaggtattttattttcattttaaaagggcaaatgaagatctcagagccctgaggacactgccatctgctagtggtcatccttatactacggtgaccccatgggtaacttaataggagcgggggaggatgagggaaggtagctaacatctaagtgttctccacactcctgcctttttctgtgcttgttctcctgcaattctcacatcacaataaaggtggtattattttcctattatacagttgaggagactgaggctcagagaagctacatagcttgctcgaggtcatacagccaagagaagagcagagattctgaacacacgttctcctgattctggtctgggctgtttcctgaaaaccttgctccctcctggcacattcaagcagtgggaaattgacttccacaggaaacccacagcacatggaggctttgctttgccagaagggcaggtgctaggtcctggagtgagtggaagctagacaacaattactgttggggtgagctggaattgtctacaaagccccactataaatgtgatagctcaggcacaaaaacacattggacatccttatctcaaatgtccctccccataaagccctcctgccccaccaaccagagtctggcattaaaactctggctgggacactatcaacaaaattaattccaattcacattaattttaatgtgtgtgtacacatgtcacccagtcttttttcctcttgggtgattttcaaaactctgccataaaaacaaacaaaaacaaggacaagcccaagcaggttgagaatcaccagggtactgatgaaattaggttttcttattggcaatcttaatgcctcctgcctcaggatagatttatttccccttcgcctttttcaatttttgctgtccgtgggaatgatgaatatgttatcttcttgggtacctgaagactattatgccacttctcccaccttttcttccctaaatagaatcatctacttaatttttcctccacagtcattttcaccaccctaatcaatgtcaagaaagctctgttaattcaggtaaatcttttatcaaatgatagtctttggatgtttggctgccatgcttgaactggtacttttccatttttacttctcattgccttttttcattccttttatttatttatttatttttgagacagagtcttgctctgtcacccaagttggagtgcagtggcacaatcttgggccactgcaacctccgcctcccaggttcaatcaattctcctgcctcagcctccccagtagctgagactacaggtgcacaccactaagcccggctaatttttgtatttttagtagagacagggtttcatcatgttggccaggctggtctcaaagtcgtgaactcaggtgatccacccaccttggcctcccaaagtgctgggattacaggcgttagccaccatacccagccccaaaaacctatttttaaatggacatatgaaaattgtatatatttaccgcatacaacatgttattttgaaatatgcatacattgtggaatggctatattgagctaattaccatatacattacctcacatactttttttgtgtgttgagaatgtttaaaatctatacttttaagaaagactgcattttaaataagagtcctgagaatttatacagtaagtggtcattggaccacacctttaaattaatatgtttgtttcctacttcttagcgctaagtattttataatttcaaaagcagaataaataatactgataatttaaaaagtctactctttcagcaattttcaagaatacaatacattgttgttaactatagtcaccatgttgtacaatagatctcttgaacttattcctcctgtataattgaaactttgtactctgaccatcatctctccctcccacttccctccagctcctggcaaccaccattctcatttccacttctatgagttcaactcttttagattctacacataagtcagatcatgcggtatttgtctatctgtgcttggcttattttacttaatataatgccctccaggttcattgtcacaaatgacataatttcccttttcattttgttttacttttaatttaattttattttttgagatggagtcttgctctgtcacccaggctggagtgcagtggcacaatctcagctcactgcaatctccacctcctgggttcaagctattctcctccctcagcctcccctgtagctgggattacaggcacccgccaccatgcccggctaaatttttttttttttttgagacaagtctgactctgtcgtccaggctggagttcagtggtgtaatcttggcccactgtaacctccgcctcccaggttcaagcaattctcctgcctcagcctcccgagtaggtgggactacaggcgcctgccacgacacccgtctaattttttgtatttttagtagagatggggtttcactgtgttagccagaatggtcttgatctcctgacctcatgatccacccgcctcggcctcccaaagtgctgggattacaggcatgagccaccgcgcctggccctattttttgtatttttagtagagatggggtttttccatgttggccaggctggtctcgaactcctgacctcaggtgatctgctcccttcggcctcccaaagtgctgggattacaggcgtgagccatcacacctggcctaatttcccttcgtaaatcctgaatggtattccattgtgtctgtattacatgttttctttatgcattcatctgttgatgggcacttaggttgtttccatatcttggttattgtgactagtgggccaataaacatgggagtacagatatctctttgacatgctgattttatttcctttggatatatacccagaagtgggattgctggatcataaaatcattctatttttcattttttgaggaacctccatactgttctccaagatggctgtagtaatttacagtcccaccaacagtgtgcaagagtgcccttttctccacaacctctccaatacttgttatcttttgtcttattgataatagccattctaatgggtgtaaagtaatattgcattgtggtttgaatttgcacttccctaatgattagtgatgttgagcatgttttcatgtatctgaagaccatttatatatctttttctgagaaagatctgttcacgtcctttgcttattttttcagttgggttgttttcttgctattgagttgtttgagatccttatacattttggatattaacctcttatcagatgggtactttgcaaatattttctccattccatagattgtctcatcactctgttgattgtttcctttgctgtgcagaagcttggtagttattgcctgtgcttctgggatcatatgcacaaaaatcattgccagactaatgtcatgcactttttcccttgtgttttttttctagtcgttttacagttttaggtctgtgtttaagtctctaattcatcttgaattgattttgtgtatggtgtgagataagggtctaatttcattcttctgcatgtggatacccagttctcccaacactgttgatatagtttagatatttgtaccctctaaatctcatgttgaaatgtgacccccagtgttggaggtggggcctagtagaaggtgtttgagtcatgcctcatgatggcttagtatccttcccatagtaacgaatgtattcttgctctgttagttacagtgagatctgattgttcaaaagagcctggcatctcttcctttttctcttgctgcctcgcttgccatgtgaaatgcctactccccctttgcattccactgtaaataaaagcttcttgaggtctcaccaaaagcagatgctggctccatgcttcttgtacagcctgcaaaactgtgagccaaataaaccccttttctttataaattgcccaccctcaagtgttcctttatagcaatgcaaaagtgactaacacaactgtttattgaagactgtcctttccccattgtgtattcatggtacctttgggaaaatcaatggactgtaaatgtgtggatttatttcttggctttgtattctgttccattggtctctgtctgtttttatccaatactatgttgttttggttactatagctttgtaatacattttgaagtcaggtagtgtgatgcttctcgttttgttctttttgctcaagatttgctttgttcactgcctttttctaaggtgctttccttactgccttcttaatttcctcccaaatggtcttagatgtttgaaagagatcagaaaaattcccagcaaggatcttgcttatttctggacttgaacttgatgctagcaaagcctcagagggcaattatggtaagtaccctaaaaccatcttgttttgggggacagcaaggacaatgataaggaacatcagcttctctcttgcagatattcataccatgcaatggcaccctgtaatagtgaccattaccatctgccattgatactaaattctgtcaaggcatgtactgtgttattgaggactagtaacgtgaggattctgatctcacttggggtttggcatcttgagtaaagatggtcaaatgttacgtgtctcactgattagctgtgtgcccttgaatagggcattaaactactgcttgaaacttgtttcaacatctataaaataaaggtaaaaatacctacattaagggtttctgaatatgaaatcagttaacacagttattgacctaatattggagtgaatatgttctctgaacactgcgctcagggttggatttgcagattcagcttagtccctgcctttatggagtgttcagtccaaagaggtaatatctagcaaatacctggtctacggtaaatatttctcatgtagatatcactgtcttaaagtttaaacataatgaattctgtaaaatgaaatgaatgaagattcccaaaatatctgctttgttaagaagttgtaaatgtgaatatagcattcacattctttgttattatccttttgcgctgattgaaaggctataaaatgtttttatctcttggttttagtattgtaagcgagtatgattccattctggagatttgtgaaaaatatcttgtcttgagtaaaatgaaaccattaaacacacacacgcccctatgcttattagtaacaggttaaaaaaaagtcactctgataatgacagcatgtgctcacctgcaacgcaacttctcccgtgactgcctggttctacatcagagtctgaattcttttaccaaattatgtctatcatcaaaacaaatgtctggtgcattttgtgctctaacagggctgagagggccagatctaaggaaggatgtcctgggcctgaaggagcctgggccttgcctgccctgctgctggctgggccttttggggtatacagagttgtctctcttgttggagccacgaatgagacagctggaaaacacacattttatttcatctgtgatgtcagggctgctgtgctttctcccagtcctgtttcacgtatgaccctcagagggctgcttagagaatagtttattctcacttattttatgtgctgggcagaatttacatcttgtaaaatcagcatcaaagcctgctgtcaaacagcttatgttttctcttttccaagtcttgtttgtgtgtgttgttgttgttgtttgaaaaacccaagttttaatggtattaacctcactttactttagatgtctctgtctctgtttttttttttaaactctgcttcaaatcccagttctgcctcaatgaatctgatcttgatttggggaaatcttttaatcttgggtactgaagttcaagaatgaagggagcaagaaagaggaggaaaatacagtgaaaaaagagaaaggctcaggaaaaataaagacagacacagtaagagaaagccagagacactgagatgttagaggctacatccgtgtccatcacagagcaacacaaagcagagaagccacattctgagacaaagtctttgtgaaactttgtggacttagtgtatctttgtggcctagtggcctcatattctgaagttctaagatattaccacaaaataaccttacacaggtccactgaagttttcttaataatatgcataagtgttgcctcttgatgtcactcatgcaggctcttacgtggaaagaagattatgcataagttttagccctcaatggggatacaagacagtaaatactagctcattaaaactatggcaaataatgaggtagcaaattctctgtcattaggccgggggcggtggctcatgcctgtaatcccagcactttgggaggctgaggcgggtggatcacctgaggtcaggagttcaagaccagcctggccaacgtggtgaaaccccgtctctactaaaaatataatagctgggtgtggtggtgcacacctgtagtcccagctattcgagagactgaggcatgagactctcttgaaccccggaggtggaggttgcagtgagctgaaatcatgccactgaaactcaagcctgggcaacagagcaagactctgtctcaagaaaagaaaaaaagaattcaagccctagctggagaccacctcgtggaagtaccatagaggggatttcaggattagaaagggaaacgcagtctaaattccatcaagaaagtatctattcctcatggttcctggtatgaaatataacaattaaaatgcaaacatgaaatgcaaacaaatgtcatttccaaattagacttgtaattagaaataaatgaataagtttgttggtttggttattatgaccatataactaattactttgttaattataagatttgccaggatgtgtctttagccttaatatatgttaaaaaataatagacttagaaaataaataggaatgttggtaccagctgcatggagaagccctggacaagttgggcctgtccctgaggtgtaatggtcaggcccacagacaaaccatcccatctcctctgaccagcaccagatgtaaattatggggccaccattcagtggagtagaaatttttgcttgaaagtctaagggagcccacattgaatatagataacataaagtcaaggtttctgttttgattaagattattctcaaagctcagaattactggaatttgttggagtagttgaactttttgacatgaaaagatggattttcctgtgtgtaaactctattgtgttacagttgttggtgcaaaaccacttaatgcattttctttaggaactctcaaatacctgtttatgcatttttgtttaagactatataagcagaaataaaaaggacatttcataataataaggtgtaaaagctgttccagtttaatttatgctatgagttttttaaagaaatgagtgcatcatccttgaacacatctgtaaaattcactcatcaatacttatttgagaagaacaacattcttgaatgactcactaggataatttttacaaaaaaaaaattgtcttaactaggtagaattaagtaagtccaaaattttggattaatggtttgctcaacatgtctcatccaggtaaaaatttattccccagatttgctacttgaggcataaaagttttctggaaatcaggcatgtgaaaagagagtcaagtacatttgcctaagcagccaccagagaaataagtaaatattacttagtcgtacagcacaatcattatcgaaatacatttctcaggtgactgcatggatgtagcttttgactgcacaacatgcatgtttccagcttagggaccacagctttaggtttgtggggggacagggaggaaaggggatgaaataacactaaaacctctgtgggctaggaggtccaaaaagggcattctcttttcttgctggtgggaatgagaaacactgcctgtcttttggaaaacaagcttgcagtgtctatttcaatgcaaatatgtgtaattgacctaggaatgctcctggtaggaagttatcctgtagaaacacaaactcaagatttaagtatatatgaacaaggacttttaagtaaccatgttcctagtggcagtatttgtagtggaagcaacctcaatgaccattggtagagaaataattgagtacgttgaggtatatctaaccttggaatacaatgtacctgtaaaaaaatataaagaacttagaactatatccattaactaaggggaatgttcattatgcattaagtgagaagacaaagggcaaggaaatgtatataatatgaatgcattttgtaaaaaaaaaaaaaagagaaatggaaaatacaaacatttgtatatgtttgtatgaccgtgaataaagatatgtctttatcactgaaaattgaggagtcacgctagagagaagaggggttgaaaagaaatataaatcaatgaaaaaggggaagtcacccaaaatacaaacaagcaaaaaaaaaaatagcgagtagacactatgcaatccttaactatacatacttgcaggactagggtgtaaaaacagtttacctacaggttgtaggcagaagacccgacccacttccaaaaagacgcgtaggttgtacctggtgattagaatctttcatccacacaggtttctggatgctgctgtttggaaattctatggcaacttgaacctcctattccctttatcttgcttctctcagtactcagcatggtgctgtacacaggtggatgctcaataaatgggccactattgtggcagaggacaaggaagcagagcaagagtgctgaatgcagacaagcagggcagggggctgggggtccccatgtggtccagtcctcccgtggctggagctcaggaaacaaaacagagcctgctgggctttctgcctggcggcaccagaaagggacagaggaaaggccattcctggacaccctctcaataggtgtattgattctttggacaaaaagtgaatttggagctggcaaaagctgtgtccagtggcctgaacagaatgagaggggttgaccgagcagcatttttttggtctgtgcttttgccacaggatgcaacagcgctggccttgtttccaggatggggaatcctccagttctggcatgcctcttctgtgcactgtggtattcagtcccaggccggagatggagatctgacaaaaatgactattgggtgaagcaaaaaccatctttgtgaagacagctgagctgtatggggacactctgcctatggcaacagtgttggagccaaaacctcctctttctatagcatcgttcctacacattccccctcatctcattcctctccctcctccactttctcttttgtgcaacggtctgagctcatttgcttggattcttttcatggtcgatttcaattcagccattaaactgaatatcgtctgaagcggaggaggagaagaaagaacgctataaaagaagacaaatgaaacagtggggaaagcatgagatggcaagtcctttcaagttattacgctggagagactaacggttagtgatttgcctctcttgctggggatggttcagtcctatgttctctctcctttgttctggtccacttgcctcctgctgcccactgaagagacattcctgttagggaactctcgctagtggccaaagtggtgaatgaaaatgcaggtccaattccttcagattctaccaaaattcatgcacaagtgaacacgtagtcagacatacccacatatgctcctgcatgggtacacacatgcatgctggcacacatacacacatatacaacacacacatacacacatatacaacacatgcacacacacacacacacacagtgctattattgttggtgtccctaagagaatgaattctctcacaattgcccagtagtatggcacaaggcaggtgatggattaaaagttcttaacttgggtaaaatagagatacagttttgtggctttgggaagatctttatcagattctcagttctaacctcctatggttgaattccaaactacttgccaaatctccaacatcagcactctgaggtggctcagcagaagctgccagttttcagtggtgtctgtgttagtttcctagggctgcaatcacaaaataccacaatctgggtggcttgaaacactagtaatttattctttcatggttctggaggctggagggcaaaaattgagatgttggcagagccatgctccctctgaaggctctgaagaatctttccttgccttttcaattttctggtggctccaggcgttcctcggcttgtggctgcgtcactccaatctctgcctctgtcttcatgtggcctcctttctctgtctgccctctcttctgtttgttatgaaacacttgctattggattagggcccacctggttaatccaggatggtctaatcttgagatccttaacttgatttcatttgcaaagaccctttttctcaataaggtcacattcacaggttctggaagttaggactttgacataatagtttgggggagggggcaccatttatcgtgctacaatgtccaaaagcaagataagaaattcccctcatttaaaacccagctctggcttaccattgcacttagacttaaatcattgcttacatgccttacctggaaaggcttccatacctttccatgatttgtaagaccttgcccatctggccttctccatagctctccactgtctcttactgtgctccagccacatgattcttccttcagtttctcaagcaggctaactgcgtttcttcctctggattttgtgcatactgaaacctctgtctggaattccttcacccctccctgtcattgggcattccttctgtaacctctcagcttaaatatgagattggtgtaaaattaattgtggtttttgccattacattgaaagtaatggcaaaaactttcaagtaatggcgaaaaccacaattacttttgcatcaatctaataccatcccctttaactatatgtaagtaggtcttcgcatcatcctctatagcagcaactccttgattatttccttctcaccatttacaatgatttatttattagtttattgtccgactctagactaagagttcactgagctctatcatcatgaactatctcttagctgtatcatggactttattcatcttgatccctgttttagcccccaaatctggcacatagtaaacaataaatatgtgttgaataaatgaacgaatgaatgaacaaaagatgctcttattttgggagatgctcagatggtacccatgatggtggcagtacttcatacacatatgaattgcatcaaacactgggatcattaaagcatgaagccatttcttattacacatcccagactatcctaacagattaacaatgtgttcagagatttctgctgtgtaatgggttagtattaggttggaagaaacacctgaggcagcaaaagtcagacagtgatggggctcagtcaaaggctgaaactctccaactcttcctgcttccctttgccatctttcataggaaacggaggtttgtggtctctgtcccctagagctacccagaaagaactgcattagccctcacagagaagcattccttttcatctggtgcccagaagaaacacgtgtgacagggtatgaagtgggacgtttcctgttgccttaggtttttgctcaacaccctaaaggtgaggacagtagatccaagcacctctgcttcataggacagcagccacggggctgccaagatcccattttagggactaagaatcaccaggcttatcttgtaaccctcactccaccaactgtagatgtagcccatttaagcaaaatcctagaattcatggaagaagagaatttgaggagtaatgaggtaaaagccaaaggggaacctctagaagagcagggtgagagaagaaagtgcaggtccaggagccaagggtcaggctgggctggtggagagggtaggctcagaatgggagttggaggaacatgaacattctaaagccagaaagtgagtcctaactattaaaatgggactgttctgagtgggacagatggctaaaaggatttgcagctgagaggttctcagggcgaggagaggaggtatttcaaagagtgtttttgaaagctgtggtttcgaaagaaattaaaagccacctccttcttgttccccgtggattttagtctatgcagtaaaccaattagatggatgaataataaggtctgacatttttagttttataaatataatcatgattagcctttgctgaacattggcatcaggagctgtactaaatgatttatatacttgggggtgtgcatgtatctgcctgtgtgcgtgtctacacagatgtactgtgccacacacatataagttctcatcagctctcctgacaacctactgaagtaggtatagctattatcatctcattgtagaggggctaatggaagcgtaagagagaagacaatttatctaaagtcacccacttagtaagtggcagaactagaatttgagctctgatcttactccagagccccaagattttagccactctgctctcctatcattgtctataaaaatgtatgcacatggctgggagtggtggctcacacctgtaatgccagcactttgggaggccaaggcaggtggatcacttgaggtcaggagttcgagaccagcctggccaacatggtgaaaccctatctctactaaaaatacaaaaattagccaggtggtgttgcacatgcctgtaatcccagctacttgggaggctgaggcaggagaatagcttgaactcacgaggcggaagttgcagtgagccgagattgggccactgtactccaccctgggcaataagagcgagactccatctcacacaaaaaaagtatatatatatgtgtgtgtgtgtgtgtgtgtgtgtgtgtgtgtgtgtgtatgtatgtgtatatatatatgtatgtatgtatgtatatatatatgcacatatatattctgttggcttgaaagggaggatgaagaggggataatctggtttctttaagaaaaacacataacttatcattgagttctgtacaaaacatactactctgcctgaggattgcttagaagcctgagaagctgggaatgggagagtgcagactgagaggatttctggggcctgtccaaggtgcgagtttgtttttgctctgatttgtgaaacagagcaggaatccatcctgtcactgtgttcccattcatcactgacgtctgggtcacacagactttaaggtgctgagggagatgcagagcaaagagcagtcaggaaagctgtgctggatgctcccctggatggtgctggatggtgacaagggcattctggttgtggggcaggctgctgctctctagaagtgggatttggggcaatgcatttcacttcactgggcttcagttttcttttctgtgcagtgaggcagttgggttggcttcccaggtgctgcccaattctaagttctgtgattctgtgagacgatggaaaatggcttgagcaagaaaggagtgaaggcaggaaatgagcaaagtgtgaatgaagcatttaaagcaaagaagaactaaaagaaagcagagttaatcactgactttcttgccttgttagcattccttcctaaagaaaccaattccgaagaaaaagcacatgtgtacctccttggtcaacttgtagcaggagctagggaagcaaaagaaacttaaaataatcttgccattaaacacaagagtctgatctccagaagcacatgtgtttgttgcatcttcaaggagacccagcatgcttggaagactgcctgataaatatgccacattgctttgcacaggttcaaacacatccctaatcatgtcagcattttgatgcttcctggggccctactctttctcattagcattttcagaaggttgtatgactcaaatttattagttagaccctccccctgtacccgaattgtgaggggctggagacagaagagacagggtaatgaacttggaggacactcacgccccagccacacattcttctgggaactggaaaagtctgtgtcttccgttgtgaaagcatgggtgatgaccccttcagacactgtctgtggagaggcagaggtcacaggctgcagagtagggggcattcatctgaaggaccctcgctgccaactctatctctgtccttgaagaaactttttttgtttttttgttttttttttttttttgcttctgtagacacttacaggcaccctggtgagttgaccccagggactcattttattttgagaccagctccctggctgtcacattcacttcaactgaactccctcctttcatgagaatgacctagagatgaccctccaaaggagacagtgtgtctctgatgtttggcagaacagataactatagtctattctcaagaatagtgaagagagatggtgaagaaatacaagcacatgagtgcctctgactagctatttagatgtgggactaaaaacactaatttgattttaaaatgtttattgatacataatagatgtatatattttggggttacatgataaatttatacattcttataatttgtaaagatcatgtcagtgtaattggaatagccttcatcttaaatatttgtcttttctttattttgaaaatatgtaaattattttcttctagctattttgaaaaaacaaaaacaaaaacactggtttgagaaaaggttagatcagagcatgacaagtttttgatgctgtttgtgaagaaagtgatgaggaaacaaaaggttttgagttaataagaatggatggctccttcggcccaaccaataggtggatctgaaaatagagatagaggttttggaaaatctgcttaaagtaaccctgggattgagtgagtccttaatagaggtgtccggagtaaattaagttgttactctcgcctaatccgtacaaaggtagaaaatatattgatcctctgtataagcaaacgcaggtgcatcggcatgaactcattcatactacccccaagcaagtcatctcttttacatgtaaaatgattcaaaagggttttaggataagtaatctagcgctgtcaagtaggacgggtctgggaggacagaattagccaaggagatctttataaggttcttgtggagatttaatatttagatactgagaacgtggacccataatggtggcaatagggctggagaagaatttgctacagatgacaagggcatagagctattggtcttgcagagaagctcctcaatgaaaaagaaaaaagttggcaaaatgtggaaaaaatatttaccacaaatatgatgaacaaaaacaaatcttttaaatagctaaaaagtgtattcaaatggccagaaaagacactgagacctccaacagcaatctggcagaggaagtggggagggggagttcacatagagaaaatacaaatgggttaataaacctgcaaaaatgtggaacttcactaatagttaacatactaaaattttaatcagtgaatttttcagcaatcacattatttgtttaaatatgataacatttatacactgatggtgggtgccttagttgccataacttttctgaaaaggagcttgctgatatacatcaaaatatttattattttcaacttttggtttgcattctgcttttcagtgagtatcctaaagatataatagccaagtgaacacagatttatttgtttatcaagatggtgtttggaatagcatgaggaagaaagagacgagccaatcaagtgtccaatgttggggatttgtggaataaattatggcatatcctatcatatgatgaactattaggaaattctttaaaaatgtatttttaaaagtgaaaatgtttctacatactttggatacatactttcatgtaatggttgatatagctttttcacagtatcattgattacagttatttatatatagacatatatgctgtgatatatacatttatacatcacatatataacatataaaagtcatatttatatatacatcacagcatatacaggtctatatatgtgataaaaaaattgaattctctatttctgtaatctgttatgtaaagtaatgcacaaacaccattactagcaaggataaacgggggagaatgataggtcttgctgttttatggattataatatgccaccaaaaatttttactctgatatatcttatttccaaagctaaactgacagataggaggccactgttctggactagctattgcagtaagtaattttgagcaaatcatttcatgtccctaagcatcagattcctcatctttgaaatggaatctatgataacatatggtattcccagttttggagctgtattgccttaaacttaacagatcataaaatgctgacatagcattgttttcaatttttgacacctggctgagtagaaaatattttgtatggtttcaatttgcatttctttggttactaataaggttgcagcgatttcatatatttattagcaaattgaaattcttctgtgatttctgttttttatgatttgcaggatttctttatatattctgaataggaatttttgttacgtaggttgtaaatacttgatcagtttcttaactgtccttcaactttatcatacagaagttttcatcatatagaggtttaaaatatttatatatataaccttgcttgtctttttaaaaattactacaaaaagaaatcctgacccccaaattacaaaaatatgctgctacatttgtctcataattatatcactacattttatagttgtataaatctataaatctagaactcaaagtgtgttccatgaacgagcagcaccatcaccttagaattttagaaatgcactctcagctcttacctcaggcctcaggtctgctatttacaacatcttcctgtgcacaccaacgtttgagaggtattggtctaggaaataattttatttgtgagataaagatacaatattatgttttgctgcttctgtatccaattgacccaacactgtttagttctgcatttctttggattgcaattttagccctatactcaatccaaagtctcccaaagctcatgtggaggaggagaatgtgtctagagaggtgaaatcatttttgttcttttagtactcagtaggtcaaatagaacactctaaaaacagtgtccgccacgtgcattaattctgcaggcacacttagagaagacgagaagagtgatttgtttgagatgcatgtagtttaggtttgggaaaatatttgaatacactctgacaagtgggacaaaagtttctcacataaaggtgacaatttatacattttctgagtcatttgccatgtttccttttggctacaattcaataagggttgtacaagtgtactgttctgtggggaccctctccttctttttttttttcttttttcgagatggagtcttgctctgttgccaagctgtagtgcaagtgcagtggcatgatctcggctcactgtaacctcctcctcctgggttcaagtgattctcctgcctcagccccccaagtaactggtactacaggcatgtgccaccacgtccagctaatttttgtatttttagtagagacggggtttcatcatgttggccaggatggtcttgatctcttgacctcgtgatctacctgccttggccccacaaagtgctgggattacaggcatgagccaccgctcccgcccccctgaccttcttacactgttttcttgatattgataaagcctaaaaatcatgatggattcctaggttaattttaaagtgcagacataaataatatggaccccaaactaagaaatatcttgacaatgtagcagagaacacactggcactattctactctaaataggcgatgaattaggtttcacagaattagacacaatgtaaaaatctttagaaatatagaattaactattaaatgaaatacaaaataaatactttttattcctaaataatggaaatattttgctttcctggagacaagtgcaaaagagagcgtagattgttttcattttcatgtttagcctgcaatagggttttatttgttgaaattgcaagtttatatgcaaaaatgctttgtacatatgcagtaaatctagtttgctggtggatcaaattactcaagatggaaaatgcaaataaacccaggatttttgttcatagtttgaaattttagttttgtcactttgacatgtgaggacagcacttgtgccacctcacccaccacataggagacgggggcgggggcataatagcttcctgagaccaccataacaaagtgccacagattggcaggggcacagatagggggtacttatgcaacagaaatttattgtctcatggttctggaggccagaagtctgaggccaaggtgacaatagggttggtttcttctgagggccaagagggaagggtctgttccaggcctctctccttgcttgtaggtagccgtcttattctgtgtcttcatatggtcttccctgtgtgtatgtttgtgtcctgtttttataaaaagcatcagtcatattggattagggcctaccctaatgacctcattttaatttaattacctgtttaaagaacgtatctttaaatatagttaaattctgaggtacttttgggggttaggacttcaacacatgacttttggggagacacaattcagcagtaacagatggttctcggaagggctgtgaacagagaggcagattgcttgagttaaccttagtcttgccactagctggttctcttagtcttttagatctccgtgcttctgttcctgcatgatgtatgttgattcaggctaagactcaaagactgacatcagtcttattagtgagccatttgatgatattaggtgtgtgcagcccagacatccccatttcctgcaaaattctttggtcatcatttagtatccaaatgagatggtttgaatctctatcacatatgtttctggaagtattcctgatattccttggactatcagaggagcctcaatcctggaaaccatcgggaagcagctgtcttgcctcctgagactgctctcttcttggatggcccttttcatgcagggctcaatgctggttccttctccccagtgtcctaacaaaggctgttgtggagaacagaactttattggcagccttaggggagaggaggggtttgaggctgataacaatgcagtgtgctacaagaaaaatctttaatgaattgtagatttctgtgtcttaaagattccatgccttttcttaattcgggacatttcttactgagccgtaatctcctacttcagcttctacttataacccctttcttctcctctagaactttcttctatttctcttccttcctcctttccagttccctcatacacctcagcccagcctctcaagctgtcaatgaacaatccttaacatcctgttattttcatatgcagacacacaactcttttccagttgcatctttgcttttaggtggcccctgggagaagtggagtggggctggggctcacctctctcaaccaaagatctgtcgagaaatgttccagcggagagtcatctcctccgctgtgaattatgccactaatagatcaaagctgctcagtctctctcttagtccattttgtgctgctatgacataatacctgagattggataacttatgaagaacggacatttattccttacagctctggaggctggaaagtcaccagcaagttgagtgtctggtaagaaccctcttgcttcatggtggtggaggtgaaagggcaaaagggggagcacgaatgctgtgtcctcacatggcagaagagcactgagagtgaactctctcctgcaagctgctttcagaatgacattaatccattcatgagggtggagtcctttggacccaaacacctcccaaaaggccgggtcttccagcaccaacactggggattcggtttccaacacatgaattttggggaacacattcagaccatagcagtctgttttgtttaaaaccagatcctctccttttatcccatcctcctttcagttacactttatgcagtagcattaggaatcaatatttatttatttatttttatttatttatttttgagacttggtctcactctatcgcccaggctggattgtagtggcactatctcggctcatgcaacctccgcttcctgggttcaagagattcttgtgcctcagcctcccaagaagatgggattagaggcacccaccaccacgcccagctaatttttgtatttttagtagagatggcgtttcaccaagttggccaggctggtctcaaactcctgacctcaagtgatttgcccaccttggcctctcaaagtgctgggattataggtgtgagacaccatgctgggccagaaatcactctttaatctgtaatgtagatgaatagtagctttgattacgtactggtattgtgtaccatggatatcatggtacacaaaaaagaaggcatactttgttgtactggttgtatactaccaatgattagttaagcagaaaagcattatagggccgtctacttgatttcctctcaattgaagatgatatgggtcagggaagaaatagcccacttcatgctcattactggtggaagatgtcaactccttttttcctattaaagaaaaatacagctccgaatctcctgaaaaccctctacagctgggctaatgttttagcatcttcaccttgccaggcctttctgtagtcagtgctgtatatctcaacagacccaggggacacagaggagcttagtggcaagaacacacactctagaggcagaaagtttgggtttcagcgcttaatttgtgacttgggttctgtgaccctgggaaagtcacttatactctccaaggtccaattcccttacctataacatggggaggaatcctgctcacattcccgtaggatcaagtgaaatttcattacctagaagaactttttggctagaaagacttgaagccaaggccaaactaggtaactgctgtacaggcctcagatgtgcttgggcatgtctggaggtttaactggcagattggccagtctgggtttgcctgataagctcaggggaggcacaatgagtggtttgattgaatcggacaattggttcccgagagtaacagttggtgccatgtgtaatggggagctagaaaaaagatgctcattctgagtccaggaatgctggttgaaaggaagagagcaatcattgtgagtacagatgaaaagtgtcttcatattgccttgcaactcagtctcgaagaaccttcaccatattccttgagagacgggaactggtgtgaggaggaaaagaggcatccctggagatgccctagggtgctaggagtgaaagcagttcccctgtaagacctagtaactctgggcaatgcagaatgttagcagggtgatgctagctgctgtgttggggtggacttaggttaagtggggcctaaagattatattaataaaatgttgcagactttctttgagaaaagaatgcacaattacaaatataaaatttgatatgaaagcgaatatttctttagaatattacaataaatcacaataaattacattaaaaatctgacaaatatcacaaagctcagaaatcatatattttattaatgatatgatgtacctctccaataccttttttctccctttctttgttggcatgccttttgatcatctcttcatatgacaatgattttaaaatatcagtttctttagagagaatgaaaacataatttggcctttcttttaagatggttaatcaaaatcaattcttaattattgattgttagaatgaataaatgaatgaaaatgcaatgcaaacaatgtgctctttgtagcattcctacagcaggtgctcaacaaacacaaaaattctgaaaaattatattttgagtgattcttgtaagaaacagagagacaatctttgtttttactaggtttgatgagagccaaattccctgcttacatgtttacatgtcttatgattacaagatatttccacaaagaagcttccgacatgctacctttcacactttattctttcctactacctacccctctggtgcaaggtaccataggacctgtgcatgttgagttaaaccttctggtcttgctccttcacatctggatgtcaggtgaattggcacgaaaggcagtagaagaattcctggaagccatttctctgctggtacagctagagtaataacttaactgtatctggaagagattttgatctagatgaatagatcccattaaaaatctaaaataaacttcccttaaccagattccaaaaatgcccctggccactaccagagcacattgccagggccttttctatgttctttgaaaggacccttcacttgaacggtcctgaaacttatgcttcactatatgcctctggctgtaacagataaactacccaatttcagtggcctagcacaatagtttatattttgttcatatgaagacccattggtgggtggcagtagtggtattgagcagggtggtgggatgataggtggtaagggagaccttgctcagtcacgtaggaacccaggctgagagacgttctggcatcttcaatatgtggcctccaaagttgccccaggcactgacaaccaggaagagaaaaagaaggcagggaatcatggaggccttatgggccaggccaggaagtggtgaccatcacttcctcccacagtctattggctggaactcaatcacatggccatgcaatcgcaaaggaggctgggaaatgtagtataactgtgtgctgtggggaaagaggaaatggttctggtgaatcatagtagtctctgacacaggaggggatgaaactttccttcagttgggactggagtgacacgagtatggcaagacaacagtgttagagccataggaagcaagctgaaaggtcatcatatgttcacaaaaaactcccagtatctttttgaaccagagaaggcatatgaggctgtggtaccaaggatgtgtcctgtttgttgacagagactattgttttgtaactggaatttttacgctttgtgcccccaccctactgcggtttttggaaaccagccaaaaggatgatggtaatgactatgagtaaaaggagatgtctagggataaatttgaacagtccaatcactaaattctacctattgccattcactgaaggggcttccaatggttgcttttattttactctgagttccagtacagaacatgtctcatttattttcgggtcccagtgtctagcacagtgttattttattgggttattggaaagaatactccttttactcctaaatacataaggattttataagtgcataatactttttgatatataatattgttcaaagccttgacagaatagattttaatgcccaagtttaatgaattatgcttatcctgatccacaattcccagatactcaatattaattgaacttgggttcatgttttaagatcgattctttccattagaccttttctacaacaattaaagaaaaacataagtcttgtttataaacatattttcttggctttcttggcatgtggaaattctctaaatcaattggacaaggtaagtccttcatgtcttctggcaaatggaaaattgcttttcccttgaagctcttttctccatgtaagctaaaaatccattagtaaattaggctttgctgactccatgcattgatatttgatccttggaacctctcaagaaaaatcaatgtgtggcttttcagttaattaacataatgttaatataacacatgatgccagcatagctggaatactcattcttagtgttctgcttgagctgagtgagcagagagggtcgatattttccagaagagagcggatccagactactcaagagggactggcatgggactactcttaggttagatagcatctgtctgctttcctgatgaggtttgctaaggccggaagaaaagaggctggaataaatttaaaatgaaaaggtggaggattcaaattctgtccatgaaagggcagttagtggcagcaatggaatctgactgagacaacagattcaaattaagccctcttagccatgagtttgaaataggatgtgatgaggaagcgggggctgttgcacgtatgacttggacagttctctctggttagcagatgtaaccataaaaaataaccacccagaactggggcccaattctcagacatgcagatagtttccttcatctcctctgcctttaaaaacattggtggttcacgcctgtaatcccagcactttgggatgctgaggcaggtggatcacaaggtcaggagatcaagaacatcttggctaacacagtgaaactccgtttctactaaaaatacaaaaaattagctgggcatggtggcggatgcctgtagtcccagctgctcgggaggctgaggcaggagaatggcgcgaacccgggaggtggagcttgcagtgagccgagatcgcgccactgcactccagcctgggtgacagagcaagactccgtctcaaaacaaaacaaaacaaaacaaaaaaacattttaaactgtggtgaaatacacataacataaaagttaccattttaaccatttataagtatgtagttcagtagcattaagtacattcatattgttgtgcaatcattaccacctctcatttccagaactctttttatcttacaaaactgaaattctgcacccattaaacaacaactcccaaattccccttcctccagctgctagtaaccaccattctactttctatctctatgaatttgactaccttatgtacctcatgtcagtgaattctacagtattcgtccttttgtggctggcttattccccttagcataatgacctcaaagttcagtcatgttgtagcatgtatcagaatttctttctttttaaggctgaatgatattctattgtatgtatatagtatgctttctttatccattgttttgttatttccagcttttggctattgtgagtaatgctgctatgaacacgggtgtacaaatatctcttcaagtacctgcttttgatccttctggatctgtaattgttgaatcatatggtaattctatgtttaatttttttgagtaacttccataccattttccttagtggctgtaccactttgcattctcaccaatagtgaataaagtttccaatttctccacatccctgcttattcttttctttcttcctttctttctttccttcccttcccttcccttccttccttccgtctctctttctctttctttctttctttctttctttcttccttccttccttccttccttccttccttccttccttccttccttctctctctctctctctttctttcttcttctttctctttttttttgatagtagcaatcctaatggatgtgaggtggtagcttattgtgtggttttggtttgtatttccctaatgattagcgatgttgagcaacttttcatatgtttatggcaagttgtctatcttctttggagacatgtctatttaaactttttgcccatttttaaattgagttttgctgttgttgtggcatccttcctccccctttaaagatgaggtgttccgtacgactctggttttgtcttcagtcaatcttgttcatggcactaacacttgccatttgatctcagtttgttttgaggcagtgatttttgaattgtgctctcctgaaccctgaggagttgataggagcctgggacaactgggaggagagaaggtgaggggtggtggtgaagtggggatgtgtttagcttggtccagctaaaacaactcttatttttacctggcctgcctattgagactcccatctatgatggcttttaatgttttctgtgcaagaaaaactgtccaaaacacttgtcacagggacgaatttggctttaattacctctctcagctccactttgtttaaaaacaagaactgccactgtgtgctttgaattgttttcccagaagtgagttgagggaagcatcgttccgtttgcttctgtaaataattgtggagtgcccactaggtatcaggcactgtgttgatttccatggagttgctcatggctggctggcttgagggtacaatctgtgaccttgggttgggtaaagggggattgggaccagaatgtaatcctagcctcatgtgcttgatgctggagcccctggacccgcccaggttcagaatccagaatggggccaggccagtagattccctcttgcccaacccagcctcctgcaggggacccacgtggttggtcaagggcagcggctgggtccagacactgcctgctgacaccatttactctctccaccagcacctctccaaaccccctctctttcccacaaccgtttccccctgctctcctccaaatctcacgcaccatctgccgtgactagtgttctcattcaccttttcctgcttatctcctcttcagcaggaaagtgcttcggaggctgacagcctaatctctccgctgatcctgtgtttctgaattcatcatcccgcccctcaggctgctgcacccgctgctgcctcccctgagttgctgcccaggctcagcaggaggaggaggaagatgaggctgcaccagatgccccccactcttccccctagagaaagaaagaagaaaaaagaaaaagaaaaagggtgggggagcaagggagtcatccagggcacagggaaagaggctgtggacaggccttgtggttctggcggtggctgaaagaagggccttctgttcccgggcttctgggaaggaagctgctcactgctgcctcggttctgagacctgccctttctggtttccagttaccactgagcaaggtctactggagagtaagctttctacattgctagtccgatggtagctgtgaaagatgtttcctttttttgttttttaaattgtctttaaattgagagaagctggggctttatcacctagtaagaggggaggaaatccagttgcaaaacaataccttaaaacatagactatgacttacaaagtgaggccattgaagtgtacggtgctaccacaaaattttttaaatgcacgattttcatttttattctacctcaaacacacaattttcatttttattctacctcaaacagtctccaccactctgtccctccatggcccctgcaccatggggatgtaggttctgcttcatatactaccattaataacacctccaaccctttaacatttccagaacagtctctgtttatttcctctttcatatgcatgcacaagttcttcctatatgctttcttcccttccaaacctggcagataggctggacctatttttctttgtttgctcattttagtatcctggagtatcaaataagtatgcttcaagcacaatattgaactgctgaggagagcactttggggaaatgaaactcaggtaatatgtccactctctggaaaggggaaattatgataaagtgctagagttttgtcactgttactgaactagcatgtcttggaaggaagtaaattgtcattattgcagctgttctcttcttgctcctctatccccagccccaacatagatcaggtaataaaataaaatttctggaacaaatggaagaaaaaactgtgtggttgcagggtgggaggtgcagctgataaaataatgccattgtgcccaaactttttgttacctttttaaaagctgctttctagggcagctgcatatcacttgctcccattcaatgctttgagctgcaaaagtttcactttgtaaggacactctacagtaagtggttttgtccagttgatccactgagcaggtaaggattgattttagaacactggtgttttagagacttcttgcagcattttcttcttgtgatgacatgaatgtcattcaagagccacaggataacacagctgtagggagggaagggacttgaaaaatctcggtcataaatgccataattagcaaacagcgtctcataatggcaataggagggtcccaatttttgttcagcttcattcctgggaagaagcaataataaagcaaactctggccagaggaaaagttataaggtccacagaacatgtcaaaagacaaaggcaagaagtttggtagtttcttataatgttaaacctataccttctctatgattcactaaagccactggtgtatttactcaagataaatttactcaagtatttactcaaaataaataaaaatatatgtccaccaaaatacttttataagaatgtccatcatagctttattcatagtaacccaagacaggaaatgtccatcaacagaagaatggataaataaattatatttatgtaatggcatacttactattcaataataaaaggaaacaaactgtagctataggtaatatcgtggatgactcacagaaattatgtgtgtgaaagaaaacagacacaaatgagtacatatggtatgattccatttatgtgaagttctaaaccacacaaaaccaatcattaaggataaaaatcagacgagtgatttcttctggtggggagggggtaggattgactgagaggccgcatgaaggaactttctagggtgagggaactattccatatcttgatagagtgtaggaaacatgggatttatatttctcaaaactcatcaaaacctgttgaactaaaaattcagggttttgcacttcacagaatatacattttacctcaaaatttaacaaaaccataaacaaatatttttataaattagtatataaattagcagcaaatgtgggtgcagtgttccacaactggagggtctctcgtgaattcctggtgctgtatctgtgaatctcagatctggccacatgttagatttacctgtgaagtttgtattcacagagtcccagtctgtgaattctgactccagaggtttgtgaagttgtccaggaatctgggtttcagagtaaattccagggtttcttaaggcatatcttagaagggagagaattcataatagtgaattgtaatagagaattagataatagctgattttttttctttttcttgtttattctctaccacacctctgagacaagcagttggtgttttttaaaaggctgcaataatagctggtcaagatgctatctgacatttttgagttgtgacactgatgaataaaaagataagtttttttttaattcgaatctatgtgtagctttataagagaagtaggtgtaaagtgaagatagaggaaagaaacataatgaggctctagggtgtaccaggaatggtgttaggcattttgatatagataatttcatttaaattttctaagaagcacatttatcattgatgatgcatttccactgcaatcaccatagtccaggctcttggctattaacagtcatgccttttatgctccagcaaaaccgacttcattgcaaatctcttaataggcaaggctatttcagggccctaggtctttgcaattttggggatgcttttcctcctaatctgtcagatgtatttctattcatctttgaggctccagcttatgtatcccatattatatgcagtccttcctgctccttctcttaccctgtaggagaaatctcattcctcttcaaatagcaattgtacctgctgtcctaggatttgtaccgaagtaggacttgcagttctcttacatgaattagagttactcaccggtaactgatttaatgctaaatctacttgaatggagaagagcactacaaataaatattttggcagtcaaatgcaggtttgcacatgactgcattctacttttagtattacatttatcacatgccattataattttttatatacatttccttctctctcactagacactgtatctccttaaagatggaaccatgtcttattcatcccccagaacctggtacaaaacctagcacctaatcagtgccgaatcaattattgttgaataagtgaatggataagtgtgttttcttaagtctggcttgtatccagataaatgttcagtaactacccagtgatctcaagataaaatataaaccctcaaaatggatttcaagaatatcattgtcctctgccctatcccacctctagctccagctgatcttatgggctaatagttactaaattaaatctcctggccacgatatattgatctatttcttgaatatcatgcactaattttttcctccatgcccttggttaaattgctctttgcttcacgatataatgaaaaaagcatgtctgaagagccaagagcgtgtcttggttcccaccctgttagctgtgtgactttggtcaaatgactttacagctctgagtcttcgttttttctcatttatgaaatgggataatatctgggatagcatatgtagattgctctggaagctgcatagagctatatgaatattatttttctgcatatccttcgctgtgaagtttaaggtccaagtcctctttgaagttagggaagctactttttcccccaaacttctatgtaactcattgctgaaccactaactatagcacttcaacatatactattattattaacagtctcatttgtaccctttctttctcttgtactgaattgggaatcctttaagggtaagagcaggggacttgtgttacccttcttttcatgtccctgatcacttaggaaagcagaacaatattaagttgtattaatattaaattgtcttaaataaggaggatggaaaatatatttagaattatagggttttggagtgataaattcttaaagataattttatacaacctttttataaaaactgtaacatacatgttatgtgtcttttctaaggttacagtgaataatactagctgatttttttgtcaacatctagacactatgccacataataaaaatgagtgatataatttaatgaaactggagttactatcatcccagttttatggataaaaaagatgttgctcagaagctgagattcaaacccaggtacatttttccagagcctctacctttaaacctgcatttggcacagaaggtttctgattcccataccagtgctcctcctgctatatcaaaaactgttatctcttctcaatgacagtggttcttcaagtgtagccccagaccagcagcatcagtgtcacccaggaacttgttacacacccagattcttgggtgctaaccagaccgctgaatctgaggccttgggggtggagctcaacaacacatgctttaacaagctctcctgattctcacgttcaagcttgaaaaacctggctttaggttaaatgcggtatttttctttttgcttcttacattggtcatttcattgcttaacagatttttatattatatacttttataacaggagtgagaaaatatgcatctctctatcagtaatcaatgatttctgtattttgcgtatgaaacttcattttaaacaaagagagctcacaaacttgaaatttgccaccatgcatcttaaaatttaagtatcttaactagtttcatgacttttcttgtttttacatttatttttatatttttacttgactgaattgtatggaacaattcacattttacctgcagagtgcctggaattcttaacaaaaattgcatcttctctacctcctacccaagagtttctattctgattagaaccatttagagggcattacaactaaaaacagagtaaaaatgctctttattagaatatgggccagatttaatcctaaacatgttatatataatacataataattagggaagaaacccagacttttttttttacataatgcttacctatagactgacaaaaatgttaccttagccaatattcataagcttagttcatatgaaaatgacaagaacaagggttaaatgtcttaatgtgatttcttcagagaagtcattaaaaattatggtggtgatttttccagaatgtattaaagtgcaaatataaactcgtgactatcatgagagtggtatgtgctgtttgtcattaatgtatttttaatattacttaaaatgggtagctaagttaaggaacagtctatcctatttttgttaataaccttagaagggtgacagtttaacattcctaccgctgatgattttattccagtcaaaagagtacaccaaaggaccaaaggactctaaatcctttgggacatgttaaacatccaaaatttttgacttttgggctccagagaataggaggttaatgactccatttttcacagaaggaaaaatgtaaaagaaaaaaaaattgatggttgttggaatgtcacctttaagatttcaaatcacaacaagttttatgtgtaatgagattttcttagtttgaggaaaggatggctagtttcttgaatactctaagatattagctggggagtatttatacagagactgtaaatgaaataaacaagtttctaatctcattttgcacagaacaacttgtactgtacttttaaggaataaagttagtgtaaatattatatgttttatataaaggtaataattgttgatgtgcttagaaattcatttggaataatacatatatttttatcttctaaagaaaaaaacagtcatgattgtttaccagggattgaactttgaattgttttctgaaaagtaatgcattataaggtcatactaagaattaagcatgacacataggtaggacttcgggttaattcaatagaattttagagttgtaaaggctgttggttgacatatagtttaactcccatctaaccctacatctttttagtataatctctgctagaatgtttttcaactactgtttgaataccttcccccagaaataaaaaggcaactgattctattagataattggattccaccttcttctctcttccacttattggcacaagttctgtctgctgaaaccactctgaaaggcctagcctcttaattctagtcaccaacatcaggatcatctctagttggtgaatgtccctcttcaaatgaagtttttagagcaaacataattaatacagctgctgtcttaaagcaatgcagcctgtggcaggactaacaatgatccaccctgcagagctagttgtcagacatatatttatcttttttgtaatatatttttctttttaaatcaggtttattgaggtataatttacataaactggaattcaccctctataatatagagtcctgtgacttctcttgaatgcatacggttgtgccaccatcatggtaatcaaggtatagaacagtttccccacggtccttgtgcccctttgtaggcaactctaccctcagtcctcattctcagcccctggcaatcactaacatattgtctgttttttatagttttgtcttttcttcttctatcacatctttattgctcaagtgcaatgttattttagttatgagggtctgcatcaggactacatgatgtgcgtgcaaatttatggagtacagaaattttttaaatgatgagaaaaaaattaatggatgagaatttgaaaaggcaggaaagggtttaaaaacaaaaaagaaagaacaaaagaagggcctgtagttgtgatagaagtgccttggatgttgatgtccaacatctgtttggaaatctaatttgccattgtgatgaggtaacccattagagggatgggaaacctgtgagaacgtgcagctagtttcacagagggagcagtaagtctccaaagcctcagtactcaagaatagttagaaagaagggttatgtatcctttaccataatagcgactactgtccgaggtgctgaatctctattgcatgttagggcatatatcttagtttcagattctggtgacttctatccaatctctctgggaaattcagatccaggtgagatctgaataggattttgttggacagaatctaatgtgggtttgggacactgacttttgtagaaacactttcagaaaataaaagatatttgtttgaaaataattttcaaataattgcagttgctttgaaaacctttttttttcctggccagttaggaaggtatattccctcctctatttttccaaccccacccatttttgtgcttcatgatttgcttctcaggttgggttagttgtaactttcttcctgggtttaatcctctgtggaaggtgctcagagctgagagtcctgaggtttgagttctggtctcagctatgccccaactagctagctaactacctattgcttcccagagaataggagtaggtttgtcagagccagcaaataaaaatacaagattctcagttaaatttgaattccagagaaacaatgaagacttttaaagttatgaatgttttacaataagttgttaaaatatcctgaaatataaaaatgtttataaaatgttaaataattgcattgtttaaaaaggtgtttttcatttgtcggtggcttctagtgatttgggagaatgaatattagtatataacccttgtcaaagggtaatttttaatattcaaatattaaaggtagcttgaatctgtgaaaccaccagactgtactgggttcctgtatttgaaggtgggaaggggatccacacaagacagtgtccacctggatgtcccctggagtgcttctggggttgttactatttaaggtgatggcactcttcccagttcaagtgaatgatattttctgtggtttttcaaatgccttttcttttacttatctttttctgtttgcttatcgctcattttggcctcccatttgtgttttaaatcttcactgtttattttaattcagaatgtcatctcatgaaaaatagattttttattctaggccctggacagagcattgctgatttttatttatttatccatctttttcctgctttagggaaaacacaagtatttaaaatgtattgttgtctgcatctgtgagtagataaatttagtgcttatttgtgatggtgctgtagtgtagtttcttactctcaattttgccaacaccaattatttggctacaatcttgagcatattatctatactatgtgtatacctacagagtcttactaggcatttaagatgaatgagagtagaatgaacaatggaaatggacattagataattatggttaattcttaccaagagtaaatgtaacttcaggttttagctttttagaaaatggctgtattaaaaattttataagttcatctgtccatcaaaaatctagtgagtacagatcagaataacagattaatgttaaacattatttctgagtggcagcaaattttgttctagatggagctgatgtctcatacatgtgtgactgacaggttcataatggcacagtacatttactctcccactcctctcccgtgtggattaaaaaagaatcatttacaataaaggtagtcacatttccgataacttactgttaactcatcatgtaatggcaagttctttcaatgaatagtcaagcaatatattttgtgttgatttactcttggtgatgcctctggctctccagaccattaggtgttaactaattaaggtaagtcacagaaatgagattatggttttctgagcatggataacttaactcaatattttagtgaacagaaccagctgataaaaattggtcttgttattgtcacctggcatttatggccccccaaactgggcattgctggatctgtgaaggtcatagcagggggctattcctcaagaggaagctcaaagacaggataataaggccccacatttctctcagaattgatggtaaaaggaacaagttaagcacattgagattagcacaggaataatggacagagactggagctgagagacagttttcttgattatatctctaaccaccaaaataatttgttacattgtttgtcttccttttataaaatggacaaaattttgagctaagagagactttgatgatcctcaacccaacatctcactgtatatatgaagaatctaatagccaggtgggttaattgagctactccgtgacacagatagtatttggtagagctagaatcaggactcagttctgcagatccttaatggaatgttcttgcaaatgtggttgaaaggaatgagcatggagtttaggtttgagtcttagtattgccatatctgagttaaattacctttttaagtaactaagcccttggattcagattccttatgtgtaaaatggagtgtaatgatacctgccatctatctcttgaggattttgtgtgtatctagtgagatatgaagagtcttgtgttacttagttactgctatgttacaagttaccccaaacacagcagcgtaaaatgataaccacttattatatctcacagattttgatgatctgaaatctgaacccaacttagctgatatatctggctctggttctttcatgaagctgtagtcaagctgtcacccagagctgtggtcacatctaaaaggtgtggagtgaggtgtgtttccaagttcatctgcatgattatttgcagaattcagttccctgcaggctgttggctgaagacccccttcagttccttgtttatgaacctgtagaagaccactcacaatatggcagctggtttcctcagggcaggtgaatgagaaagcaagagtatgagcaagatggaagcaagccattttgttatctgatcctggtggtaatatcccatcatgtgtgtggttttctgttgactagaagcaagtcactaggtccagcccacactcaaggaacacagattacatgaaggcatgaataccaggatgtgaggatcactggggctccagtagaggctcctaacacaaatattattctcattgttaagggtagttgcaaggaaagcgttaggtattagataaatatctgctttaatagaggatagacctttacaaaaaagtagtaataatattttcatttataagtgttgattgactctctgcttccaagagggatttgaggtgatatccatatctactaccagtatacgctattcctcctgcttagaaaaaagcctccttcccagctcttgttcacctgagaactgctaaatccacccaaatccttctgcaaatccacccaaatgttacctcttggatatgttaccatggtccaactattatactttctaatgtaaattcagccaaagggcacgtatgatctgaaatacagttgcattttctagtagtatcagagtcagtggaggtgcctagcagttaccaagtgtgtcttccgatagggacagtaatgaatgacccaaggcagagggacctacagttagttctattttgaagactagaccttcaatgatttgctaaaaaaaaatattggaaccttttcaggtaccttaatagggctggagaaacatttgaagaactttgttgtatggaatatttatcaaagtgaaggcagaggatcacttgcagcaaaaacattggaaggctttaaaagtgcagattcctgggcgttgcttcagacttgctgaatcagaatctctggagttgatcccagaaaaatgcgttttcaacaaagtgattctgatgtaaagtttgataaacctcagtctgaaggaaccctgggaagcttgtgagagacatcacccatacagatgtttttatttgcctttatattggctatgatttgtgattataactcttctaagacaccagtgattgtaagacacactattatacgctattaagaaagaaagaaaagaaaaactctggtgcttataattttaaggctctataaattgtaaaatccatcccatttgaaagatgttaaaatatgagaaaatctaaaaatcagtgcaacgcgacaaaatatctttttttttacttgaccagatctgtaagatagaaactctatattctgtttcctagagacatactttataaattcgtgcactcatccatccaactttttctttttttttttttttttgagacggaggtttgctcttgtcgcccaggctggagtgcaatagcgcaatctcagttcactgcaacctccacctcccaggttcaagtgattctcctgcctcagcctcctaagtcgctgggattacaagcacctgccaccatgcctggctaatttttgtacttttagtagatagggggtttcaccatgtggctaggctagtctcaaactcctgacctcaagtggtccacccgcctcggcttcccgaagtgctgggattacaggcgtgagccactgcacccggctcatccaacagtttattcatttattccacatatagttactgaggccctactacgtgtcaggcactgtgtttggcagtggggagatagcagcaaatgagacatgccccacagggtttcccttttctctaggggggaagacagaaactaaacaaacacataaatacgcatatacctgctaattaggaagagtgcaatgaaggacaaacagtggttgttgcctggcagttactctgtggatagagagggtcaaaggaattggggatggtctgaggatacactctctctgtgacgctgatgggggccagtgagaagcaggaagtaatggtgggtgtagggcagtttgtattaagaatgacttctctaagaacagcacatgcgcctgtgaacctgtgcaggttgtcctttccttagcccagaatatagaccacaggcgtgcacaccagtttgctctcagtcgacggacgtctgcaaagggcagccatggaaagggtgaacctgatggaggatgtctgacattgtggtcaaagagaaatggtgagggcgggtgagagttctaactctctcacaaatgcagccctgcaaaatcagctgctgtgctgtgtcttgcttgtctccctttctcccagcattctccgaggttgaattccctgttgacttctgcgcttaccgcgccactgccatttgccttagtttggactgaaccgaataccctgagtcatcaatgtcattctgagatggattctttacaatccttaatgtgacaaactggattgataccctgcccactacctgccacctcgctgcaatttctccttaaatctcttcttccccctccctttggctccctacaatacacgcaacaaaggaaagaaaggtattttcttgtgagtgctccacgtttacacagcgtggttaggcaagatgatcggattctcagtccaccctcgctctcattttccttctcatgctaatttgacgtgatggaattctacagccttgtcagctccctaaatgcatttcagtctttattttgtgagaattttctacaaaatcgaatcaatctaggtgtcatctggcagtctaaaacaaacgagattgtaaaaatgtttattgctgagcagtaatttgaatagaccacccccctccaaacaaaaaccccttccatagaaggagagcagatcagttgtctcagagatatttaaaataaaaggtgcgtttcatcttaaaaatggaactcaagatgttgtttaactaagtgtgccatgcattcagtattcacagtaaaacataaaagaaataacatagatttttttaaagatatttttctgctgcacgctgcttgtatcaaactacctgagaggtgatttgagaagggcattttagaataaagacattgttctgacagcaaatacaaatgaaataaaattggcccaaggctttgatgccggaacccacatggagagctgagacatagcaactcactagcttcatgcactagaggaatagaaccagcataatttgtagtagagtatgaagcaaagatgaaagaggaaatatttttttgaaaattaaaagcacatagagagattaaaacagacttttcaggttgaactaattcttctgtttcaaaaacttacccatacacataagaagagaataaaagttcagtcataatctatttgtccctgtggtcaagggaaggtttgtgagaggggtggaatgagctgtgtccctgtgatttttaagagagtggggagaggcaaagagagcacgaacgtctccttttgggcatcgatgagattgtttttggcttttgactgaagcctatgacatgccttgaaacaaacctcagaatctgtaatgcaagaggctgatactgattttactcacctgagtagctttgccctaagtgcgaggaagatgctgaaagttctgtctagttaggcataaaacgattaaggaaggaataaaaccagcaacaacaaggaagcaagaacaaagctgtctcaggcctcgcaggtgatcctatgttcatgaggtatttttgacaaattggtgtgagagaagtttaagaatagaaactccgtcttaaatgactgtcatttgcccattctttttattataggttaatcacaaaaactgcaggagaggcttgtaagaaagattccgagtgcttttgttgtactattggtgaggtaaatattgtgttgctggaggtgatatgatcagactagacgtataacagaaattatggttgataactgataactatccttatatattgcgaattattttgcactcatttgaaaaactaaaacaatgatggctgattttggaaaagacacttctcgaatttctttcctgctctttcagtctctaaacaaacaaaggcaatgcaaaagctcaaattaaaagtgaatttaaatcttattcctttaataaataaattcataatttatttttcctgataataaatgatttcacctggaagggttgccgtcttaggcaagtcaacattgatgataatgtggaaatcgtatggtgttgaaacaccaaccctggttcttcttattcatatgatctggggtaagatgcctacactttttgagccttgtgttctttacatataaaaataaagttaacatctatttttcagggttatcataaagattaaatgagatatgtccaattgcttagcatagtgcctgacacatgttagatacaaatggttttccttctaagggttaaataattagatgtcatttatcacagaagacccaagaaaagcaaatggaaatagccctaacttttcaagtcttttaaacctctactttttttctgattgtagaagtgacacatattcttataaaatattaaagaacaaatcattgaaacaaaaaatattattattcataatttcaccacccttactatttgtctgctaacaatgtatgcatttattatagtcctttaaaggcattttatattttatattatatgttatatatacatataattaaagaaggaaagcctctcaaaaattatcttttcttaactcagccagctcttcaataagagcaaagcagttagaatctgtattctattcttctttctctaagtataatccattagcatttctttatgttattaaaaactcttggcacatataattttttggttgtatattctatttatagaagtgtgtcataaacatataggatattttcaagagtttactattgaaatgtacattgagataaatatactcacatagtttgaaaaattcctttaatttctgagtattttccataaaggaatttcagagtaaatgagtatgaacatctttatgactcctgaaacactgccaactgctttcctatagaatagggtcattaatatatcaccaggtgagagtctcagcttcacctcagccttattaacactgagtattactattctgaatattttgcaaaagtaaaaaatgatatcttgctgttgaatttttatgactctggttgaatgcttagaattattctttcacctcctgtgtcctagtttggctattgggactctcatattttctcatccatttaaatgtattctctgtatagaaaagataaacacttggtcgatttgctgtgagtatttttcaatattgtcttttactttttaaatacatacggaagttgctttgtttttaaagttgtattttgtcttttctcatgaatttgtttctttaagattaccacttaaaagaaggtcctgggattattatttctttttcttttaaaaaaatttgccacccaaacagtttctaagctgtattaaaaaaagcccatgatttccttttttttgtgaccctagttagggaaactgaagggtagaatggaagagaaaggtcacaaatacaagcctcaaacatgatgaaaattatttatgaggtttttttttaaactaaatgccagtggaatttcattctgtggtttcaaggtttggaaagaatagaaagagttgttgacaacaaaatggaatgttaaaatcagcaggtttcttgacagatgggacaaagagttatatttgagacaacaagagacagtaaaataagtggcataatctatccagttttttgctactctcaaacacttttcctatttgtgtttgtctgtgcctgtctgtgacagatctaactgaatctggccctggaaatctgtgaacagcaaaagaaagatgaatgatttttgaatagaaggaaatttacacaaatgtgattcttctttacaccaacaagaaaccgtatgaaaagtccttctcagcttatggtcccaattaagctatctcaacacactttgtagcaaattctgtaaccccctaacaaacacagttggccacatgcacaaatttcagtaatcaaaacatttttctgtctcagtgtattctactttctaattttctttgcaaacaattccagagcaaggtagaaatcaaaccagaaatactatcctttcaactctgtgctcataacaaaacatattattgagccatgaattttgcatgtaaatgtgctgagtataaagaattacatagtcaccacacctggttgtaaggagcttacagtgtgagagagaccatgctgggtgcacagtgtaagggaaatggaaacagtaagataaaaatatttaatcagagtaggagtggaccaaaaacgtcacacatgacatcagaagagatgtattaatatatttattcacctaatatatataaatggatagtcatttgtgattagcatcaaggcctcaaggtactttctgtgtggcacccactcataataaaaagtctctgtcaaaggtgaagtagaaaggaaattcctcaaccttataaaagacatctgcaagaaacctacagctaacatcgtacatatgatcacctacatggaatatactagaagtctccagaaaagctacactaatgacagggaatggcaggatgtggtccgtccagtcattgtctacagtgctaaagactttggaattcattttctaaatgataggagccatggaatgcatttggaccaaggaatggacatctgattctcatttgagaaagctccttctggcaggagagtgaagataagtctggagggtttaagactggaggcaaagagaccgattaagaggattttgcagctgggcacgatggctcactcctgtaatcctagcactttgggaggccgatgtgggcggatcacttgagcccaggagttcgggaccagcctgggcaactgggcgaaacctcatctctacaaaaaatacaaaaatcagccaggcgtggtggtgcgcctgtagccccagttactcgggaggctgaggtgagaggatcacctgagcctagaaggtcaaggctgcagtaagccatgactgtgccactgcgttccagcctgagtgaccgagtgagaccctgtctcaaaataaaattaaaaaaaagggagatcgtgcaatagctcaagtgagcaatgacaaggagctgaatgatgatgggatggatggagagcatggagtggatctgagactcactttgaggcaaaaatatcagaatctgatgaacatgggaatgagggagtaagagtgagaggagtcaagcctaatgttgaaggtgtctatacactgttggaaaccaaatgtgcatccatgcttctgagttgtttaaagacactaaaggaaaaaaaatggcatttgacattaagttgagaaaggaaaaatagtaaagatccaacttgtatttttctaaacaagctgaaatacacttcatttttgacccaaacttgcaggctaggattatactttgttggttgtttgtactaagtgattattttcatgattttgaatttcgacctcatcttttgatgggagttttgaacattttctgcaccctcatcaaaagtgattttaggtttgaaagactgcattctacaaggatctgccaaacaatgacaatgagggtttctttcatcaggtctctgagaaggaactttaagttataaccaatggtaagttactgctggaactattacttgtttctaaagattaagatccataatgagttagagtctgaacataacagtttcacattctgacctttttccttcatggttgcaattccttgatgtcaaatgtgaaatattagcagtgtagaaagagacttttgggtgaaaaatgcctttgcttccaggaaagcttgctgtttttccttttcattcctgttcatttgggaatagatattaggccttcttgttctgtagctattatttgaggggggaaaatacaaatagaagccaagagtatattttaaaaattgaagagcatcaagacatcgcagcctgagttggccataaagatttacaattacatttccatcacaaagaccctggcccatcatatttggccatgaccatttatgttttgatttctatttctttggcgggacaacaccccaattagacagatgagtgttcaattctgattttggagcgtatccttgctggcctaggttactccgggactcctgtggctactctccactgaactgtgccttggtagttataatcctgctatccatgaattcttagcatataaaaaaccatccaggtgaatacactcatagtaattatgcctgaattacctggataattgaccagaaattcccctgaattttctaggtccttgcctctgagtcctttttactctgtgctgtataaattgagtggtggtgatggggtggggggagggggtgtcaggaattcattccttaagcccagcaactaggtcagactgtctactttaacctcctggtagcaagtagtattcttctttcaagtatccagaatcatcactgggaattattattacgaaagctgagttcttactgtagttctgatttgcttggaaaaagaaccattcttattcagaactcatatattgctaatataatatacaactccccttttcacaattgtacatatttacactgtacatagattccccgtgtatcttcagcaaaggaaaaacaaaaggagaaataaccagacttctgctgcttgcaagaaacaaaacctgcagtcaccaactgggctgctccagtatttcaaaccattccaagaagaagaaaaaaaaattaaaagtgactccacggacagattttcctttcatcagggtaagagctgcatttcattactttaaaaatcctcgttcatgtaaacaacactaaatgcttcctggtctggatatataaaattattggatggccactgctgcccattcatcgcagaccctgatgtgccacagtcgatttttgagaactgctctgccacttaatgtgacaaacacccagccttgccgtttaagggatctttgagaaaggccatccccacgtgaaacgaatttaacagcagcaatttgtcatcttgcccttcctttgctaggggaaaaaaatgctagtgatttcttttgacttaaactgggcattcaaaaagctgtttttattaatgaatcatattaagccactagtgaaaagctccctgactctgtttaaataacaggctatgattcctctcccctcaagctctccccccaccccgatttggctctgctgctattaattgaggagtttctttgtttctttcctaatgaagctaacagaacacatctgtcaggtgcccgtattctttgcctgtctatagtatgtaatagaccagctggaggctataatgctacacaatacccctggccgttacagcaactatttattcctgggcttttcctccgaaagggatttgaaaaaaaaaaaaaagtctgaaatttgggcctaattgctatttacccagcgatagacacctgttctagctgcgacattggctcatggatctcacacctgagaccttagggagagtagaggggaaatttcaagcagctgccagtccatttagagatagacagctttaacttgtggggtttgcgtgtttatatgtatacgcatatattttaaaatactgtttgtttagtatgtacacccataaccagagggtatatattaaatgctgtgtaccattatttcacagtcaattgcttatctgaaggccgtacacatactggcgtacagctaccactgtgattgctttaaaataatgcactgagactgaattcagtatcaataacaggcacgtgtccttcaaaatgtccactccaggccttgggggaaaatggtttcttaggatgaatcagagggaaaattttaatcaaacataacttttcttggaaagattcgacatcgtttcagtcatttcctttgccaaatagctacgacttctctctttggacatgttaaacttatttttcccttctgtcttggtcagagtagcacaatcttctgtttttttgtttattttttgaaatcagtaatgatatttgtccttgtttcttggtttgccttcaaatacctctcatatatactcaagagaaacagactacgagcatgatgacagcattcacttcttgcgaaaatacaaaatacaaaaaccaaaaagtaattaataatggagactttatgtaacacaagttaatacgttacctaatgttatgtttagtagcagtttgaaattcaagtttattaaaatgttattagatcacaaaaagtactgccttcatttgtaaaagaataaaagttattattagtatatacatatatgaatgtatgtgcgcgtgtgcacgtgtgttttccctgactttatacattccagttccgttgcctctgttttgcttgaagtatatatacttgaagagaggaggctgggaatagagagatttagcacaagctcactggcaacaaaacagaaataaaacattattgccctgctattttgtctggccttgaatcagaagacaatcacactgcagagggctagtggggagggggagcttaggaggttagatggggaagaaggagaaagcagaggcaaggttttttttttttcttgtcttgtcttttatatcttttttttcccccagtcagtaggacttctgagctttttgatagattctccattggtattgctagagcagcctcccatttacttactgttttgagaaatttggcctttctaagcaaatcaaataaacttcatctaatttgctcccaaatagaaaattatttattatttctcccaaaggatacatgagccatattcaatagtggtgagaatccacaaaataaaatgaaaggggtgaaagaagactttaataaaatgcagaactacaattcatacacgaaatcagaatgatctgagtgatattaagcatatgtgcacatatgtgtgcacgcacacacacacacacaacatgctggttaagaaattccctttagtcccatctgaagccagaggtgaccgaagagtcagagccttaggaggtagctggggatgacaggagagacggacagtactcacatacaaatgagtgctttgcctcggggctcacacagttggatagagagctgatgcagagacagaaattcatttcccatgagaaaggagagaagtgcacagggaacagggtcacaccagaacaggtgataatgaaattagagttaatgaaggctggaagaaacctagagtggatgggttggtgaaactgttatctgagatgcacactaaaaccagggatgatatctcagtacgggggaaacaatggttggagatgcatggtagaaaagtcctgggaaatataagaatcctaccctcatctctgaagcaggtcatctctttgtttctgtgttgcaagatttcgtaagtggatgattctaggaggcagattatatgacggagagccagatagagaatgtctctgagcctcggtttcctctctggtaaaatgggaataatagcacctaccttcttctttttcagaagataaaatgggatactgtttgtagaacacctaatacaggaacacatagttggtgtcacatatatgttagttttattatatttctttataagcaattaggtcattattataaaaacaccagtcaaggcattgcaaatttgttcatccatgtagttgtcaactgtctagatccctaatagtgaacatgccacatcacaaaagagaaatgagccttaaatatgtctgttcttaatacattttatatctgaagtatattatgaaagaaatggattttgtcaggagccaagaaactaagtgatacacagataacacataggacagttgttaaatgagtatttatgttatggcagggatcagtgttggtcctagaattaagtgaattttgagcctggtagagatacagattgagatagctaggcatgattttcctctcagagcatcctgtttgcattgccaccctattaaactgcagagtgaggcatttttgcggcatttgctgaacaaatctttctttctctgagctgtgattcatttgcccaggagtacattttcctgggcccacagaagcagtgaatgacattgcatgttgaagtactatttggggctgctcaaaatcttctggatacttttctgatcttgaatacatcccacactgaatcctaccttctcaggtagatgccggacacgccatcaccatactctgtgggagctgaggttcaggcatatgacctgggctctgacaatcggacatgcacacatgagatttggatgcagttgaaggcatcatgagctcaatctccaggcaagcatagtggcaaaggtgtttggaggtgtttgggttttgttgttgttgttgttgtttctttgttttagagatggggtcccactatgttgctgagtagctgggactataggcatgagccactgtgcctggctgttcagttttttggtgttggtactggcttcctagcattcggttctacatgctgtattaccaaatggtattatgaggtgtttcaatagcaaagaatttggtgtggttgattagctttatggtctagttctctgagtcttctgaaaattccaagagctccctaatgcctttaataaagtctttgtttactttcaccagctagagtgtattcagttgtttgctattaaaaatcttgactggctaggtgtggtggctcatgcctgtaatcccagcactttgggaggttgaggcaagcagatggcttgagccccggagtttgagaccagcttgggcagcatggtgaaactcagcctctacaaaaattagctgggtgtggtagcacttgcctgtagtcccagctacttgggaggtggaggtgggatcattgcttgagcctcagaggtcaaggctgcagttagctgtgatcatgccattgcactccagcctaggtgacagagtgagaccctgtctcaaaaaaaaaaaaaaaaaaaaaaaaaagagggagagaatcttgaccatggtgcatgtattgcatgttttataatgccatgaaaagcaacgatattttagttaaatagtattgtacaggtggtgcctacttcccaaggacccattcacccctctgttggtcattaccctcacttttggagggcagggaacatgtagcaattcacagttctctagtgtagctgtctggttgtggggggaacttaactctaccttgactctagaaacagtcatgtcactcaagcctatgttaatcagtgtgattctatttgttggtcattactatagagcagatatttggtccagtgagtagtgcagggggtagtgttccagatgcttctgggaaggatctcctgagggagtttccagcaacaacttgttttctatctatattgaaaatgtaattcaagggattgtttgctgccttctttcagccacaggaagggagccagctccaggatgaatatgatacaatgaaacacatagcagaaggccagaaagaaactatgtactcgattttatcactgggccaccaaatctacccaacccttatgtccaccctagatagggactttctagttatgggaagcaactaatactgtttttgttgtttatcatcttgcattggattctgtttcttgcaacaaatgcatcctaaattaccaaatcctctttttttgttaaaaaaaaaaaagtggagcagcatcgtgtgactcaccgttatttcatgaaccattaggaagggggaaaaagctgtcaattaaactgacacaatgtttttgttacttccagttttttttgtatactttctgcaaaagctctttcatacacatttagacattttcgtttgtcatttattgtttccctgcacataaaaggaaaatatcagtaaaataaattcgttgaatattctagaacatcttcatattctctaattgcccctccagttctatatgtctgtctttctctatccagctctgtgccctggggagctcaccactgtgggctgcatcttccaagctcagtgtcttccaggtgctgattggcttagccagtgaaaggcaccatcaggagactggggaatgagaaaaggaatattggagtatttctcccagctatggtgcaatgtctctggtagtcactgtaaccctctgggactacagcttccccagttcttactgagttcctattaagatctcctgccttaatattttcaaaactaggggtagtaatgacttctcagtgggaccttagttcttttattaaagcctttttatttgaacccccgatggtgaattctgatccctgaccattccatgattggcacagagtccaactcttctagataacttttctattcaaaatctttatcttctgtgtttttcccccttggtcattccctgcgccatcaagaaaattgatggtgtgggatttttttaaaagagtgatcactgtttacttcagtaatactttcaagatctaactttgagcggcagataccttccttgggatgacctaatattgcttcctatgtaataataaatctcttatgttcttacactcatttgtcccatctttcccatttctgtggccctcctcagagtcttgcctggtaaatattgtcttctaagtagctttgcctccagcctttccattctcctgctcatttatgtaccatggtcacactcaggctcaaaaaccatctaatgcaaccaaatgtgcatagaacaaaacctagtttcttgtctgacaatcaagatctttcataatctcacttcctccagatataattgttttaaaaaacacaaatctttattgtgctctaggtatataccagacactgttctaggaagataaatattttccaaggttagggcacagccagataagccaataattatactgcataagaagtgcaatatatacaacccatatcttgttagatgacactagtctgggcagagaaaactgggtaatttaaacaagaacaaacatcatttttatttttattttttagctttggggaagatgggatagactcttgggccaccccaccccatcatttttatttttattttttagctttacttgagaaagatggcatagactcttgggccaccccacctagcttcaagtccctgttctctcatttacttgtcatgtgaccttggacatgctacctaaactgaggaagctgcctcagtttcctcttttataaaatatggataacaatgatagccatttcatagagttgtgagaattaaatatagtttaaaatatttgtttggccgggcatggtaggtagctcacgcctgtaatcccagtactttgggaggccaacgcgggtggatcacaaggtcaagagattgagacagacaaagacagtcaagagattgaggccaacatggtgaaaccccgtctctactaaaaatacaaaaattagctgggtgtggtggtgcgcacctgtagtcccagctactcgggaggctgaggcaggagaatcacttgaacccgggaggcagaggttgcagtaagcggagattgcgccactgcactccagcctgggcgacagagcaagactctgtctcaaaaaaaaaataataaagtaaaataaaatatttgtaaagtacttagcacggtgcctggaatgcagtaattattcaatcaaagttagctattttagaagcaatagtatttacttgactcttccctgtagcaggactttgggttttcctaaaagtccctgcttcctcatcctgcacacacttcttcaagttcttgaggggtgtcttaacttttcttttccttttgggctatacccttctccaggccatcttagcagaagggggtttattataaaaactcatgaggtctggtgctggtcctgagaagctgatggctttaggggacagctgccttccatttcactctcatgggccctgggttctctactttttggcatatttctgcctttctctttgtgctccctgcccttatttctttttgttagataagctactgtgctctatctccactggagagaacccaactgattggtccagagattagcctctcccaatcaggctgactttcatgtgctgtgtctcattaaatagattaatagtcagtcaatgagtaggccctttgcaggtgagatgtccaacctggttctgtcagcggctcccccagtgcaagttctagctcaaccctgcatcattggcatggggatgtaggctggatggcataaactaatcaaagtgttgtccaggcaccagtcctggttcacgagctattaatagtctgagtgagaaagcacaatgctaatataagtggttagagaatgttacagcaatttgactttgctgaaacagccaaatgcatgatcagtggtcttaaaagtcttgaatcaggatacggaccagctggggtgttgtcaaacacacctggtaaattgcatgcctcacacacagagtactggtcatggtcacatgcagtaggaccacaggatgctcttcagtagattggaaattgaaaccgcacaacacaaaactggtccttcaccacagataaataatatgcctttatatcagatgcataggtataagtatttcgtaatgaacagaaatgagcatcctgtctgagtagacaaattagttaaatcaccttctctggatgagcacagctcttgggtgagggtatggggacacagtttagtaaacagctagccttgaggatttcaaccccaacttaccctatcagccatggcttctgtgcagtgcacaaaccacacagccacatgcagcctcacatggtagctgtgcccatggcctcctggactcagagacctgtgcttcagttcacacgtgggatttcttttatcaggaggctctttagcagggccaacttcaacagaagtctgatctccaatttgggatagaactcaagatacttgtctccaatatcacgaagcccaaacaaattcagatatgtttataaccactgtttcagtaattcccaaacaatgagacattccatgatagagatgatgcttctgaaatagtctgtgatgtttggaagctggtctgcacagaactcctagtggacttgcgaggcaggtgtcacctaattccacctgccttctctggtcagtagataaaatagcgaccaccaatgaattatgtccccagtgtctacatgcccttgtaatgtggcactatagctccggtcagcaagaggatggacctatttcccacccccttgaatcccatctggctttgtgacttgttttgaccaataaaatatgtaggccttaagatgttcatggctttcactgttcccttattggaatactaagacgccatgttgtgaaataacctagtatagcctactagaacatgaggggtgatatgaagaactaagacatctagctgatagctaacattaactgccagatgcatgagtgagcctatctagatctaccagcttgagctgagcagtcaaatgaatgtagccctatcagtgatcctgactatgactggtagaagaaccatttggataaggaaaccacaaaccatgagaaataacaaattattcttgtaaaccactaaattttggagttatttgtcacacagcagtagatagtgaagacatcatcctacaaagtctcttctctgaccagtcaaaacattgtgaacatatattactgctatttctgtattagctttttacttccactaagccatatgcttttttttttttttttttttttttttgatgaagtttcactgtcacccaggctgcagtgcagtggcacgatctcagctcactgcaacctctgcctccctggttcaaccgattctcctgccctagcctcccaagtagctggaactacaggcgggtgccacaactcctggctaattttttgtgtttttagtagaggcggggtttcaccatgttagccaggatggtctcaatctcctgacctcgtgatccacccgcctcaccatcccaaagtgctgggattacaggcgtcagccaccgtgcccggccaagccatatgctttttgaggcctctttatacatctagtacatctcagatgattcctcttgaacatctcagagcaaatatcaaaatgccttcatatagtagacactgaaaaaccatgtactttaaaataacgcagttataggttgcagtgagcagagatcgcaccactgcacttcagcctggacgacagagggagactccatctcaaaaaataaaaattaaaaaaaaaaaaaaaggccaggcgcagtggctgacgcctgaaatcccagcactttgggaggttgaggcgggcggatcacgaggccaggagatcgagaccatcctggctaacatggtgaaatccagtctctactaaaaatacaaaaaattggccaggcatggtggcgggcgcctgtaatcccagctactcgggaggctgaggcagcagaatggcgtgaacccgggaggcggagtttgcagtgagccgagatggcgccactgcactccagcctgggcaatagagcgagactccctctcaaaaataaaataataaataaataaataaaaataatgtggattattcaacattttataatcaaagggtcacacaacacaagttttcacttacggtttcgtgctgaataatgatgcatcatctgtttagaaatgtggattgaggccgggctcggtggctcacgcctataatgccagcactttgggcggccgaggcaggtggatcacaaggtcaggagatcgagaccattctggctaacagcctgaaaacgcgcctctgctaaaaatacaaaaaattaggtgggcgtggtggcaggcgcctgtagtcccagctacttgggaggctgaggcaggagaacggtgtgaacctgggagggggagcttgcggtgagccaagatcgtgccactacactccagcctgggtgggcaatagagcgagactctatctcaaaaaaaaaaaaaaaaaaaagaaatgtggatggaaaaaatttggcaactttgctggtcatggtgactcccacctgtaatcccaggactttgggaggccaaggtgggtggattacctgaggtcaggagctcaagaccagcttggccaacatagtgaaaccctatctgtagtaaaaatacaaaaattagccaggcgtggtggcaggtgcttgtaatcccagctacttaggaggctgaggaaggagaatcgcttgaacccaggaggcagaagttgcagtaagtagaaattacaccgctacactttaggctgggcaacaaagcaagactctgtctcaaaaaaaaaaaaaaaaaaaaaaaaaaaaaaagaatatggcaacttaaggacctacctttgctacttaaggggaagaaggaaaagacaagggaattggagactgatactctgtatgcatgtgaggctttggagagctctccctgcaggttctggtcagtttgatcgaagtaggacctcagcttccccctcactgtggggttagatagttgagagttgggctgcttttgagtgtctggtcccagtgaccgtgattgctgctccttcccagaaggagacagttttctacgaagtttggttgcccaccacatttagcatctgcttttcttccaggagctcttgctgtgctccctggctgggctgtccagctctcacacgaccttctcttctgaccacacagtcttgtgctttctcttctaatgctacccacagtgtggtgcagctcacgctggcagtttcttgttccatgtctgttttccattctggtttgtaaattccataagggagcctgtctctctttttctggaacatgggtagaagggtttaaatagcacaaggagctcttaaactgctccacactgcacacatttactgatatgtgaaaacagtaaccagataatctatccaatctattctgatgtagtttctttgcacgttacttgttacagttgtaattaaagttcgattatgaaatttaacattggtttatcatgccttccctatgacctaactttagtgtcataaaatggaactaaataatttctaatattggtctgattctttcaacatctcttttacacaactctccatttggaaacatttccttattaatgttatttgtcttggttcccaagctcgtattttatctacttaatgttctttccaaaatttgacttatattaaaatagctaaaaggtaacttttgtggtagcttttagatggcactagatcaaaagctttcttgatgatcagcaaaattaaatttataccaccttcccattggggcctttttgagaaaaaaaaaaagaccatctactttgttgtgtataattctaatttaagaatctagacagtctataattaattgccttacatttttctcaattgcagttgtgacattcgtgtttcctgtttgtctccagaaacttttaaattcctggatataaagatacatttttaacttctagcagtttaggtatacattttgctgatgctttgaataataccaatactttaaattttcgttttctggtaatggtaaattggatgagagggaaataacatcccaaattagagtctagcagggaaacacaggtttgcttctgtgcatgcaatatatttctttcctacaatttcatttacagtggagctcttggattgattgtaggtgaacaataacatctagtattagaagaaagaattttaatgatggtaaacttaaagcattatttccgacttaaaaagttgatcccttgactctataattatattttgtttgaaaccccttacccttggcttctccgggtatttgtgaaggttttaactagacaaggcatgaattatctggaaatgaataaaagctcaagaaactaagaaaaaccagttgcactaaaatgccattaagaactaattataatctcttctccttctcctctttcttcttgctaacttctgtttcatcttatcttaacctgttctaatattaattgttagtgagtgatagctcgggtatggataggagacaaaaaaattcagagtagtaacaagatgaataaaatcagatagttaaaaataacctctaatacccaaattgctgcctaataacaaaattatgttattatgttattaaggtcagtagctcagatgaaataggacaatgtacaaattagcaaaaatgttgttaagatttttcattgctcaacaaaagtttattgaccaacaaatgtttactgacatgttcaggcacatggaggatctcctaaactgtacagccttacaggtcccagtgaaaaccctgttgctttgtcacaccctttaaggattcccaagcaaccaccatctgtagagatgctgcttccagtgtgcccaagaaatgagtcacagggaatcccatggaaatctcagagaaattcacgtgctaattcctggtgatattgcagaggctagtgccataggagttgacattgcagtactttactctgttgtttcattcccaagtttggaggttgcacccttgctcatgatctctgtgaccagtgtcttgtaaagggtctgtctgggcttgataacactgacttctaccatttgctgcttcttttcctagatcttatcagtggaggaaatggcatggactcaagtatgcaggctcttttgtcgccttagtgtaacccaacagaggacaaatggatagacattgtccccatttccagtgaccttacagttaataagcaaacagaacaatgaggaagcatgtagcagagtctctaactcccaagaaaggttaggtctaagcctggctctgaagaagggatagatgtttcctgggttgtgggtagggaagcagggtgaattctcctgaaggagaggtgcattgatcagtggaacttgaaggaggtacagtgggtgtcagcccagagtatgaggccaggaggagtaagatgggctggagggtcaaagaggggccagaccatgctgtgtcttccagcctcaggtaaacacttcgcaatgggaacactttaaagagttctacagaggggagtgataagtgccatcattccttcctaaaccttgaagatcagatctgcacataagacactcctgggggtggctagggaacatgggttaaaacaaacgaacaaagctgggcatgatggctcacacctgtaatcccagcactttgggaggctgaggcaggtggatcacttgaggtcaggagatcgagaccagcctgggcaacacagtgaaaccccgtctctactaaatatacaaaaaattagctgggcatggtgatatgcacctgtaatcccagctactcgagaggctgacagcagaatcgcttgaatccaggaggcggaggttgcagtgagccaagattgtgccactgcattccagcctaggcgacagagtgagactccatctcaataaataaataaaaccaaacccaggtggcttcaataaagtataggaattaaatttagtcgctttagaagtcaatatcaaggagcgagtcaaacaacaaactgattcatggctgtatatacagcagagaaaatgctgtataatattgaaactcaaagtttatagtcagctagaagaattaaaaacttaagccacatttgttgaatttaagagtgactgtgctaattatgcagtcatactgttggtgagcatatgaaagcatgttttgattttcttctttaaacttgcaaactcaacaaagggaaatttttggtttgtttacatgtttagttttgattaaccagactgtccttaacttagtaagagtagtttttgtacataattatgcttaaacattcaaatcaacttttctacattctagatctactaattgtaggtggtcaaactacttaaggtaatagcttggatttttagaatttgccattattctaccaagtctggtatttaagatgctatgaggttcctctctgtgtgccctgtatgagtttgctgtggctgctgtaacaaattagcacaaatcgaaaggcttaaaacaaatcaaatttattgtcttactctgttagaggtcagaagtccaaagtagggctgcattccttctggaagttctaggggagaatccacttcctttcctttcccagcttctaaaggctgtccacattccttggttcatggccccttcctccatcttcacagggtatcacttcaacctcagcttttgtcatcacatctcatatttctgcctttgatcctcttgcctcccttttctaaagaggaggatctaaagagctccttctttgtaattacattgagccttctggaataatccacaataatcttctcttttcaaagtccttaattgtatcacacttacaagggtctctttgccatgtaagataacatattcacaagttcagggtattaggacatgtatatctttgggccatcattcagtcttccacaggccctggataaactaaaagtttgttaatcatgcaatttaaaacttggaaataaaacaaaagatttaaggtatattcttttaatgtcatactgaggttttgttttatattttgagcagggtcacctaaatatctagggcccaatggagaaagaacatgtttctaataacatattctcaaggttagcttacaaaggtgtttctctgtcaaacacttccattcactgaaagaaaacagcttatgatgaaacagcttacaatgaatctttaagaaggcatgtgacaaggatgcacatcctgcacatgttcccctgaacttaaaataacagttaaaaaaaagaaaacatgcttacatttgccttttataacctcatacataaacctgggtaacatgaaccagtggagaaagaaacatgttccaattacatattctcaatgtttgcttaaaaacccccaaatattatttaattatctaggaactgtacctgtgtttgattttatttctattacttaaagtttcagacattgggttaagtattaaatatatgttaacttgtaaacctgaaaggagagggaaataattgttgtccagaaagataaccccaaaagttatggttttattacccttatgacctacaggacattaaccagttttttctctaattcagcaaacttattttagaattatctccttgtataatatcttctcatcttaattttaatgttattttaatggttcaactcattaataagttgaatacatttttaacacagatgcatgcaatatttgtacaagagttttaactttttgacagttatggtttgacaatgaatttgttgggtaaatgatattaattggcccaacagcaaactatattggcataatcaatattcaatatccctcccactctaagagtctatgatgatctttatttctcatcagtactcacaaaccaatgttatactctcagggaaacctaaatagatggcattttcggtctaaatgttgattgaagcttaagatttttttcctctgacattaacactataaattttctgtgcttcaccatttttctaactgatctatggagttggtggcaatagtgatgagtagccgatgcagcatgctataacatttacctattaataacttaatggagcttgacaaccagttttactcaaaggtaggtaggaaagaggaacctagagggcttgaatataggaagttgacttgtctgtcttgaacgtgaggaacaataagaaactgatgtggctgttaatatgcggtgaaaccagcttatgatgtttgtgatagctacaaaacaggcaaaaatcatatactgttggggaaaaatagttaactactcttggtttaaaaataaagagaggaaatcactactggtgattttccttttgaaggtaattggaaacaaaatataaattgtcgtataaacacactttcaaaaatgtatgactattctgtgttcccaaagtttgtagtgtggcaggtttacagtaacagaagtgtgtacgtaactctgcagaaagacataaaagagtattgtgttaaaatttcgtagacaaacttgcaccccatcagcaacttggacaaaattaacatgtttctaaagcaacagaatgttgcgatacattaccaagatggcataggggctaagtggttccatgctatgacagtcagatattatttactagagaattttttaattaagaagaaaagaaaaaaccaaggctcagcaaatagtagaaagctatacggattgcaccctctgtgtcatattatagtttcctttttgttaaacttggtaagaaacacaaagaagagtaatgcctcagtgatgaagaaggttggatacaaataataccgggtcattccccttgtttgcaaattgtactttgactttttctcactttgacttccattcagttcttcagccatttcaaattcactctttaattgccatggcaaatatttattttgttacatggcaatttaatctgtattttaaatttcaaattaaaacctgtttgtttttctagcaatgcctgtattaagtaagcagctgtcaatatgttcatcgcacactgaagacatgtagtcacatactttgggcatggaggtgggaggtatgggagggttctcactaaataaatcacctagcatggctttggtaggaaggacccttactacctccctatgaccttaaggccagtgtctaagaaagagaattctggtaatcctagaagtgagcagaactttcaaggaactagagtggaggattccttttttttaatgccagagaaagcaaagtccagtagaaacattgaaaagattcccttgagatgatggtactgaagaatgatttctgagcactaggaagaattttaattaggctgctacggatacctatagatagcatcaaacaacgtctatttggctgcctagctagagaatgacggcccctggatgtgatcaaagcccccctgagttctcgggggttcccctcgaatcaaacccatcgtagctcatttagatgctgtgcagtgttcagcgtggctcgggagttgcttttcctcccagtgcttaacctcctttcccctaagatacaaatgtcaatattggatttagtctagttgaatggatgtgtcagaggggagattagtgactggcagccacaaaagggtttttcaactggcaaaagtaaatttttcacaaatgaatcaaaacagtttgaggtggaaaaggagcagggggaaaaaacccttgccaaattttgtcatgatgcctcattaaatggatttgaatacttcagcgtgggcactttatctagaagctactggattcaccccataggaggctccagagtgagggaaagagagcatctgctttaatatcctcaaaagggcattttctgtgaaaagtctcagtatattgtccccttttatggcatgaaaccatccgcagcctagcttcagatgatcagagtgcctcgctcattataacaatccttagaccatttaatgtgataaatttaaattgcggaagttttttattggtggttgtattcatgctttttagaattagttgtgctgcttgttgttttgcttatttgtttgttttgaatgattttggatagtcaaacatccctgctttgactgattgagaataaatggaggtggttcccacctcctttcttgaacaattcacattgctggcataattgctaaggtcattgtttctgtggtcacatttatgcttctggtcactttgaatattatgggcatgtctatttcagggaactggtgttccagcaggaaggaaaaaatgaaaaacatcctttgggatgtagttattgattgattaattaaaagcagtcatggattatccttctcagatttagcaaaacacgctaattgttataaacttagaagtcacaagaaagaaacatgaaaattatgggagaagggtttggcagtaccagcttatctcctaatcagctctgaagattgatggagaactgttgacaaaatgttttagaaaggtgtcctccaaatcctaagaaaacgtcattacattcatgacccacttcagttcaatcttctaaatttgaggttttgccaaatggctgaagaaagcagtcaatttgttaaagtctaactttagagcccatggctggttcttgatagatccctaaatttgctatatcaaaagattaaaaacactcaagaagtttctactttataaggcattttaaaaaggcttctttttttaataataaaaaattttcaggctacataagttaggattagatttggccatatgtaacagaatgccaccaataccaaagccttcaccacacaaggtgcattttctcacatggaggaagttcaggagtttgtcagcagaaggctggtacagcagcgccacatttcatctggacctttgatagttctcacttggcattctgcaccttgagcctgacacattaataaactacaaggcactggtaattcttttttttttaattatactttaagttttagggtacatgtgcacaatgtgcaggttagttacatatgtatacgtgtgccatgttggtgtgctgcacccattaactcgtcatttaacattaggtatatctcctaatgctatccctcccccctccccccaccccacaacaggccccagtgtgtgatgttccccttcctgtgtctatgtgttctcattgttcaattcccacctatgagtgagaacatgtggtgtttggttttttgtccttgcgatagtttgctgagaatgatggtttccagcttcacccatgtccctacaaaggacatgaactcatcattttttatggctgcatagtattccatggtgtatatgaaggcacttgtaattctaagtgttttaaggtgttcacaattttggaagacacaggtatacatacatttaattatgatgaatacataaaataacaatataaagatatagaaatacgatgcatgttttttctttctaaaagaatttaggaagaatgataataataagcatgaagtaggaaaaaaaagaagacatttgtgtgtagggggaataacagtttttctccattcctggttgcaccaatcctcgctagggagcgtggtgttccagcatgcctttcctgcagtgtataagcgctcttatgtcccttggtcacagagaatgtggccatgccctaggctgtggcaacatggtgcattataaaagggtcaggaacccttgttctaaaacatgggtgataaattgacagccacgagccaaatatgacctgcagatgtaagtttttgaccaatttaaaatagttaccaacatttcaaaattgagagatttcagagaacaatttgacctctagcttttcttaaagaattagattagctaatcccagcaatttgagaggccgaggcaggtagatcacctgaggtcaggagttcaagaccagcctggccaacatggtgaaacccatctctactaaaaatacaaaaaattagctgggcgcagtggtacgtgcctgtaatccctgctacttgggaggctgaggcaggagaatcattcgaacccaggaggcagaggttgtggtgagctgagattgttccactgcactccagcctgggtgacagaggaagactccgtctcacaaacaacaacaacaacagcaaaaagaattagattagctttggacctttgttggttgggtaacatttctctgaagctgatcaattgcagccacttcagataaagcactctccaatttcccacctacctaccctctccttactgctttctattatctacctggccctgtaggtgcttatacgtgcttggtgtcccctgtaagcaagcacattctgaggctggtgtattcttttagggtcaaagtgtttgtgccaggtttcttccagctttgggatacctcccttcatatttgtttgtagtagtatattttgggagtcctcattcttgggtctgggtcctcacagcctatcacagtcaagacagattagacatgggaggagggagagaatacagatttgacctgctcccctgtttttacccaataaggattattgtgaaacctcaggtcatttagaagttctccgaatttatcctggaccacatttgaaagctcagggaaaacctcacaggtactttcaagttatcctggtaaccaggcgtggcagagtgatccagcatggcagccaccaggttttgcttattggcactcaagcaaagctgactgtgccttcctgatagttctctgctgttttgctgtggcagattgcacagtggaaactggtggtgttatggtctcagctatggtgaaatgccagtgttcccagaaatgccctgagatgaaatacttaggaatatctcagcgaagtgtcttggagggccagctatgcttagaaaattctcattaacggccaggcacggtggcttatgcctgtaatcccagcactttgggaggctgaggcgggcggatcacgaggtcgagagatcaagaccatcctggctaacatggtgaaaccccatctctactaaaaatactaaaatcagctggatgtggtggcgcacgcctgtaatcccagctacttgggaggctgaggtaggagaatcacttgaacccaggaggcagaggttgcagtgagctgagatcgcaccactgcactccagcctggagacagagcgagactctgtctcaaaaaaaaaaaaaaaaaaaaaaaaattctcattaactatgaccatgttgcactctgtcattctgaacctactgaggtgtccgctaccccaggctgttaccttatgattgctaaacaatgccattatctaatgattttcattaggacaaatgaaaaagttagagacttcctagttactctttttgcttctttgcattctgtatgagtttccaaagcacgtagcaagcgactcagcagtagctgagactaactcatttatggggcgtccagaaatatacctggctatctcaatctctgtgtcaaaattatttgaacagttcagaattctttactcccattagctgtacctggagagtacagaggtcaatgtaatagtgtaaagaatcttaaaagatagcagttatacagtgcttagtacaggttgagcatccataatctgaaaagctaaaatctaaaatgctcaaaaatacaaaactacttcagcattgacataatgccataaatgaaaaattccagccctgacctcatgtgacggggcacagtcaaaaagcagttacacaacacacagtttattcagcattcccaatggaaaataaaatttacctttaggctatgtatataaggtgatctaaaacataaatcaattttggtttaggcttgagtctcatccccaagatgtcttattttgtatatgcaaatattccaaaatctgaaaaaattcaaaatccgaaatgcttctagtcccaagcatgttggttaaggggtattcaacctgtatgtgccagggactaagtatgtcctcaattcttttgacaaatctaggtggtactctaatttcttctatttcatagatgaggaacccaaggcacagaagggttaaagtacatgctttggatcatcaagctagaaagtagtgcagcaggaatttgaaatgaggtagtatagctttagagttcacactcttaagcaaaaaggtaattcctcttcgttatagggcagaatagttctgcatggtgaagccaaactatgttaaacttcagcttcactttatgattaacttactgtcatgacaattaactttacataaaaatggtaataagggctgggcacagtggctcatgcctgtattcccagcactctgggaggccgaggcaggcggatcacttgaagtcaggggttggagacaagcctggccaacatggtgaaactctgtccctactaaagatcaaaaattagctgggtgtggtggcaggcacctgtaatcccagttactcaggaggctgaggcgggagaatcacttgaatctgggaggcagaaactgcagtgagccgagatcacaccactgcactccagcctaggtgatggagtgagactccgcctcaaaaaaaaaaagatagtaagagcatagcaataatagtatcacaataagcattagctggcagtgtactgaagactcctgaaacatatgctgcttattataacattttgagtttttctctcatcttatttattacaatatttataaggataattttaaaactttaggtttggattgattagacgggcaaagaagactaagaagaggtacccagagagttaggagaaaaactaagagcatgggaaaataaagtacatcaagaatgaagaaatggttgcatatgttgaatatctttcagaggcctagtaaggtgaggctgaacactgtacatgaagtttgtcaacatggaggtgtccttggcaagaacagttttaataaatcgtagaggtggaagatccatagatatgggttgaagagttaatggtaattgcaattttcagcaacataattaactagatattctgcaaaccttccaataccaacactttaaagtgctttgtaaaatataacagctatcttgctagatgtcatgttgaactgtcaagaaagtaagagcaatcccaatgatcataaatttaaaaataatcagggtgataaagcaaaactgaagctacagctacctcaaagatatttacaaatctcattaatgaagacagtaggatttgaatggcttagcccagtggagagactaggctttggcccatgtgaggtggggagttagaactgatatctccatataaacctgagtgcctcaaatttctacatctttgcctttcatcaaaaggaaatgtatctaactcaacctgtactctacatggaaaaaagtcacctctgagacttcataacaatgtgtcagtcctcatgtaagcgttggctttgcatttatgctattcacaaggtccataaatcctcacactaagaaattaacttaaagtcatcttagggcatttggtagaagaaaaataaatctgctctggagagacatgcttttaactcaacctcacagaatttctaccgttaaagtcactgggatgacaatgagtttataatagaaaattataaaaacaatagaaattacaaaacacaagtcactatgagtgacagccagcattataatcagcagaagtaggaccaaaataatttaatattaaattaaattatttaaggaattagaaggcagaatagaaaaatgtgaggagaaagtaattaaagtgaacttctagatgtgaaaaatataatctttgaaattaaaaactgaatgaaataattaaagcaaaagattagccagagctaaagagagactagtgaactacaagatatgaaacttaaggaaacttacagaaagaatgaaagaaatagaaaatataaagagagagtaagagatactgaaaaatgagttttaccatgtgtctaaataaagttccagaaaaagagaatgagacagagaatattcaaaatatcaaaggctaagaattttctagaagcaaagacaataaatcatcagatttagaaaggacaagaaaaggaacaataaaaaaaaaatcctaccaagattcactgtatgagcagaacagagagacaaatagttcttaaaggcaattagaaagaaaagggaaaacatccacagttcaactgtaggtaaagacttgaaaactgctgaattctaccaaatatttaaaaaagaactaataccacttctcaaactaatttcagaaaatttaagaggaatactttcaaactcatcttataaggccaacattattcagattccaaaactgggaaagaacacaataagaaaagaaaactacaggccaatatccctgaggaaactagatgcaaaaattctcaaccagatactagcaaactgaatccaacagtacattaaaaagatcattcacattagtgggtgcagtgcaccagcatggcacatgtatacatatgtaactaacctgcacaatgtgcacatgtaccctaaaacttagagtataataaaaaataaataaataaataaaaataaaaagatcattcactatgatcaagtgagattcatctcagggatgcaagcatgatttaacaaaaaccaaatgattatttcaatagacacagaaaaagcatttgacaaaattcaacatccttcatgatgaaaactctcaagaaattaggaacagaagttctgtacctcaacacgagaaaggccatatatggaaaactcatagctaacattatattgaacaggaacaagacaagtatgaccatttttaccacttttattcaatgtagtattgtaagtcctagccagagcaattagccaaggtacagaaataaaagacacccaaattggaaaagagagagtcagatcgtccctgtttgtatatggcataattgtatatagagagaaccccaaagacatcaccaaagactgtagaactaattttaaaaattcagaaaagttgcaggatacaaaattagcatacaaaaatgagtagcatttctatgcactaatagtgaactacttgaaaaataaatttaaaaagaggttccatttacaatagctacagataaaaaagatacctaggaataaacttaaccaaggagacgaaagaactctgcaatgaaaactataaaacttcaatgaaagaaattgaagaagacacaaataaatgaaaagataccatgtgttcataaattagaagaattaatattgttaaaatggccacactacccaaaatgctctacagtttaatgcaatccctatcaaaatgccaatgacattcctcatagtaataggaaaaaaaatcataaaattcatataaaaccacagaagcctcaaatagccaaagcaaacctgaataaaaagaaaaaagttggagacattacacagcctgatttcaaaatatgtgataaagctatcataacttaaacagcatggtactgacataaaaacagacacataaaccaatgaaactgaataaaaagtccagaaataaatttatacacctacacccaactgactttcaacaaaggtgccaagaacacacattggagaaaagacagtctctacaataaattttgtggtgggaaaatcagatattcacatgcagaagaatgacactatattctatctttcaacatacacaaaaatcaggtcaatgtgaattaaacacttatatgtgaaaccaaaaactgaaaccatactagaagaaaacatagaaaaaatgcttcatgacattgggctgggcataaatttgttaaatatgacttcaaaagcacatgcaacaaaagcaaaaatagacagttgggattacattgaactaaaaaaattttgcatagcaaaggaaacgattaacagaatgaagaaacaacctatagaatgagagaaaatacttgtaaattatctatctgacaagaggttaatatccagaatacataaggaatttaaacaactttccagcaaaaaaaacaaaacaaaacaaaaaccaaaaaccagataacccaatttaaaaatagacaaaagaggctgggcatagtgcctcacacctgtaatcccagcactttgggaggccgaggtgggtggatcagttgaggttaggagttcgagaccagccaggccaacacagtgaaaccctgtctctagtaaaactagaaaaaccagctgggcgtggtagtgcacgcctgtgatcccagctactagggaagctgaggcaggaggattgcttgaaaccaggggacagaggttgtaatgagccgagatcatgccactgcactccggcctgggtgacagagcaagattctgtctcaaaaataataataataaataataatacataaaaaatagacaaaagaccttaatagatatttatctaaggacatacaaatgaccaacaggtatttaaaaaaagctcaacataactaatcatcagggaaatgcaaatcaaaaccacaatgagataccacttcactccagttagaatgtctactaccaaaaagacaaagtaaagcaagtgctggcacagatgtggagaaaaaggaacacttgcacgtgttcgtgggattgtaaactagtacaaccactatggaaaacagtatggaggctcctgaaaaaattaaaaatagagccaccatatgatccagcaaccctacaactgggtatatattaaaaggaaataaaattagtatgtcatagagaaatctacactcccatgtttactgtagcactatctacaatagccaagatatgaactgaacctaaatgtccagcaatggatgaatgaattaatacaatgtgatatatatacaaaatagaatactattcagcctttaaaaagagagaagtgatattatttgtgacaacatgaacctggaggatatcatgttaaatgaagtaagccaaacacagaaggacaaaaactacgtgatctcactcataggtgaaattttttctaaaaagttgatatcatagaagtagaatgtagaaccatgaaacactggttaccacagactgaggaggggaggatgaggagaggttggtcaatgagtagaaagttacaattaaatagaaggaataaattctggtattctgtttcacaggagggtgactttggttaatagtaaaataccatatattaccaaatgaatattcttgacacaaataaatgacaaattcatgagatgatgcatatactatctgattgaataattatacaacatatatgtatcaaaacatcaaactgtacccataaatatgtacaattataatgtcaattaaaatttaaattatttattcaaaaatggaagccaaaagactagaatatttgcaaattgttgagaaaaaattattcttgaacaagaattacatctctctttaaaaatattattttaaaaatgttattcaaaaatgaaggcaaagtaaataattttgaataaacaaaactgagtgtaccactagtatcactaagggaattttaaaaagatgtcttacaagaaaccatgaccccttaagaatctgccaaataaaaacaaatagtgagcaaaaaaacttagttatcatgtataagtctaaactaaacttcagtgtatgaaacaataattattataatttgggaatttcagaaaacaagatggagctaaaatgctggacaaaacacctgtaaaatgagaagtgaatattgaaaataaagtgtactaagctacttgtattgttcaagaggagatgagaggtattcagtaattttacattttgttagtgtgcatgttaaattattaatgattactactgaaagaatagaaataaagtatgtaactcccaaactagttgatggggaaaaaaatggatgaaagacatgatgaatcaaaagaaggacagaataggcaagtaaattaaaagcaaaagatgaaatggtactgataaaaatatgtgactatattcatataatatactactcagcaataaaacaataaacttctgatacatgcaacaatgggtatgaatctcaaaaaaataggctaagtattagaagacagtccaaaaaagacataaataatcaatttatatgaagtcccaaaacagaccaaactaaaccacagggaaagaaatcagaatagtgcttgtttctgtgacgagagtgagaataaagggaaaggagcttaagagaaatttctaggatagaataatcttgattgttgtgttgattacaaaggtatacatttgtcaaagctcatcaaattatacactgtatattttacattaggtaattatacctcaatatgtaggtgtgtatgtaatcacaataaatgtaaaggaactattttttctaaagaaacagaattgccagattgaatcaaaaaaaaaaacaacaacttagtttggtggttgatatagtttggctgtgtccctacccaaatctcatcgtgaattgtagttcccataatccccacgtcatgggagggaccaggtggagatattgaatcatgggggtggttcccccatcctattctcatgatagttcattctcatgagatctgatggttttataaagggcttcccactttgctgggcactcattcttctcctttttgctgccatgtgaagaaggacttgtttgcttccccttctgccatgattgtaagtttcctgaggcctccccatccatgctgaactgtgagtcaattaaacctcttttctttataaattacccagtctcagtatgtctttattagcagcatgagaacagactaatacaatggtattgacaagaggcatatctaaaacaaaagcacataaaaagattcaaagtgaaaggataaaggaagatacagcacgcaaatactattactaatactttttaaaaggtcatatgtttaaggccaaaaacattattagggaaataacactcactacatgataatagctaacattcaccagaaatatttaaaatttttcaacttgtgtccgtctaatactaagacctggaaatacataaggcaaaagctgatagatgtacagtagaacctacacatttatagttgtactggaagattttatgttataatacatatatggaagattttaacaacacaattaaaaatattgatctaacattgatcacaattaaaagtatatatgaaccaaacagagaatacagattcgccttgagcatacatttgtgaaatttgtcacataaagtaacataaatgattacatgtgaacacatttcagaaccagcataaaacagaccatgttctctgaccacgatacaattgatagtaatcaataacaaagagataatgtaaaagaacctacatgtttgaaaattcaaaattcatttgtaagtaactcatgagtcaatatgtattacagtggaattttaaaaatactaattaaagaacaatagaaaaggtttaatatcaaaactttccctctctttttctctcagttatgtatcaaaaatatatttaataaagggcttatatctagactacagaaataactcttacgactcaataataagacaaaaaatgaggaaaacacatattgataagatttatgaatggctagtgatcacataagttgttgaacatcactagactttggggaaatgtaaattaaaactacagtgagatgactttaaatattattgagaataattaaaaaagaccgaaaataccaagtgttggtgaaaatatggagcaattggaaatctcaaacactgttttccaaagtagttgtaaaattgtataaatatttgggagaagaatttcacaattacttataagttaaacatatacttaacatataactcagcaattttatttctggtatttactcatgaaaaataaaaacatgcattcaaaaaatgatttgtatacgagtatgtataccagctttattcataacagccccaaactggaaataacccgaatgcccattgagaggcaagtgaaataaactgtaatataatttgtagaatggaacactactcagtaataaaaaggaatgaactactaatacatggataaattttaagatgaataaatttcaaatacattatgctaagcaaaaaaaaaaaagccagacagaagaaaatatgtgtatgattccacttatattaaattttagaaaaggcaaactaatttataatgacagaaagcagatcaattgttccctgggaccagactagggtagtggtgaaggttggctgcaaaggggcacaagggaattttggcatactggaaatgatctctttattggttatagtggtggttacacattcatcaaaactcaatgaaatataaaaatttgggcattttattgtatgtaacttatattttaagaggtttgttttttaaaaaagaatgcctgaaatgacaagctacgcattcaattcaagaaaacccgaaaaaagtagaaggaaaaacattttaaagatcataaattcataaataataaagataagatagggacaatcaataaagaagtgttctttaaaataaaaacctaaacaaattaatttctgacaaaaaagaaatagcacacatatacagtgttaagaatgaaaaaggcacatggttacagatgtagaaataaaaataagggagttacataaataacttcaggctaataaatttaaagatattcaaaacagacaatctcctagaaaataatgtataccaaaattgacttaagtagaaatgggaaatctgaaaagacttacaaccaataaagaaattgaatcagtgggttaatatctactttttctttaaacttctgcctgaaattattaggcccagatgtttttaacaaagttctatctaaaacacatccaagagatgactaacataattacaactgtaccaaaaaaaaaaaaaaaaaaaggaaaaggaaacacatctaatgatcaaaattcaaatcctataaaacacttccagagaataggaaaaaagaggaatgccccaaatctcatttaaaaagtaaactcatgtaaattagatgacagtgtaattgtaaaatatgacagactcatcttatttataaacatagattctaaaaaaatctgcagcattatgggcatccccgccagcaccattacagctgcattatgcaggcacagaggcatagaggtctgcagtgggcatccatccaaggtcgaggattactaaactactggacacacattctgaacttgggaagaaattagaaaataggaaggagttgatgactatagagaaaagatgacgtagtttaggggattggagatctcaagtcaaagaattttccttgtatgaaaagtgagtgagaagggtaggccaaagatgggagtgtttgtgtaccttgaataatgttgggctgcctggtctcaccctggtgttgcattcaaaagaaacatcagtccaacatgtaaggaagcataacaagcattttaaattttgaactaaaatagcttaaaaaggggcaaagaagctcacgcctgtaataccagcaccttgggaggctgaggtggaaggatcacttgaggtcaggaggtcgaggccagcctggccaacatgatgaaaccccatgtctactaaaaataaaaattagccgggtgtggtggtgcatgccggtaatctcagctactcaggagggtgaggcaggagaatcacctgaacccaggaggtagaggttgcggtgagctgagatcgcaccactgcactccagtctgggtgacagagtgagactctgtctcaaaaaaaaaaaaaaaaaaaaaaataattattacattttttgtcacagcaaaacagtttaaatcccctttgcttatcagtttccctgggatctcgcttctcacctctgttgtagccctatctccttctagaacttcagcctacagttccagtgcttttctcttcctcttccagttctctcttcttcaaggagcggcttcgggccctttatcgcgtgcttcaatcaagtcttatctgttccatctagttttttcagctgtgcccattgtctgaatcagcacaaagttcaatagcttccaattttggctatcacttgagttgagttcccaatcttgcacgtggtatggtttctgttggtgatgaggtcagggatgtaaccaagtgtagcacagagtgaaagaacattggagatgagaagactaaagatttgagcggccaaacttgaggctatgtcaagtgatgtcaggagttggggtgaagaagaagacatgtgcttatgtctttttcgagtgaggagaatgaccacaaaattgctctatggttcttgtaaagagagacgaagttgccagacacataagaatgatttttattcaataaggaagaaaaataatggtcttaaaggagtgagagtaaacagcttctatctgagagagctataggagaaacagtattcctgatgtagagtcaagttttggttaagaaaagtggggcagacgggggcgggtatggtttacagaggaagttaaaatttatgagacatcaatgaagagaaatttctagaaggtgcagtggaaggattttggttttgaggaaaaggggtggaacagatttgggatttacagcaccgtttggggaagactgagtagaagacaaaaaatatggaggggcttcgttcttggtgatagataaaaaggcatgtggaacattgtcattgtagttctgatcttttagagcaggggtccccaaccctctgggctatggactggtaccagtctgtggcctgttgagaaccaggtggcaaagcaggaagggagcggtgggagagcgagtgaagcttgatctgtatttacagcggctccccatagctcacattactacctgagctccacctcctatcagatcagccttggcattagattctcatagaagcacaaaccctactgtgaactgtgcatgcgagggatctaggttgcctgctccttatgagaatctaactaatgcctgatgatctggagtggaacagttttatcctgaaaccatccctcccacaccatctgtggaaaaattgtcttccatgaaactggtccctggtgtcaaaaacgatggggaccactgtttcagaggaaactgaattgcttggatctaggtgtatgatccagaggcttcgtatggagaagatgagacatttctgataggccagggatagctgttgctgcaggagcagtagagctggattttgccttttcatagagacttgcacttttttttttttttctgagggaatcttgctctgtcaccaaggctggagtgtggtggcatgatcttggctcactgcaacctctgcctcccaggttcaagcaattctcctgcctcagcctcccgagtagctgggattacaggcacacaccaccaaacccggctaatttttgtatttttggaaaagacagggtttcaccatgttggccaggctggtcttgaaccccgacctcgtgatccacccacttcagcctctcaaagtgctgagattacaggtgtgagccaccacacttttgagaatgtatcctaaggaattaatcacagcagcacattaatttatgcatgaggatattcatcaccatcttatttttaataacaaaaagttgggactattttaaatgtccaacaataaagaacggtttaatcaagtatgaatattcattacagaattctgtgtagacataaaaaaaattatgtaggtatgaggaagaaatatggtatattattaagtgaaaaatatataattatgtgtaggtgaatgtaaatgactagttagttcttgagttgaacattggttttataagtgtgcattatattactaaaatcataaataaaatagaggatcattgctgaatgaaagacaactgtcatgatctaagaattatgattaataaatttccatctgaggttcagcttttaaaaaattcatatatgaaataaacagtatcattctactttttgttaaaaataatataagccatgctttgtcttcctcctcatctcccaagcctttgaactttttttttttttggcctttgaccttattgatcattctctgtattttagcttagtctgaatgtatttgttatctattgctgtgtaacaaattgctctcctccctaaaactttgtagcttacaatgataaacatgtattatgtcacagtttctgtgggttagcaatttgggagcagctttgctgggtggttcttgcccaagaggtgtcaatcaggatgttggcaggggccacaggcacctgaaggcttcactgaggttggaagttccacttctaagatggcgcactcacagggctgttggcaggaggcctcagtttcttaccatgtgaacttcttcataagcttgctcaattgtcctcaccacatggcagctggcttcccccagagtgaccaatccaagataaagagcaaggaggaggctacaatgccttttatgacctaatttcgggagtggaaaacgaatacttctgatacattctattcattagaagctagtcactatgtttgctcaggggcaaagagatgcagctgctgggggttggaagttgggcaggcaggtgttaaagtaataaggcctagggggtatgagtggagcagtgacagctctgttatactcccatcactcactaactcttgaaatattaatctgtcattccaataagaatttgtctcctacctttacagcatgtgtaatagattgccttctaagtacggttcatatcctcctcactcatcttcccaccaaatgtccaggtgctctcacctaatttatgtattcatttaatttaattattttaattgtaggttttcagtattgactagcatccacatggttcctcctatttagattgtaagatattaggtggctgactgcatagaaccctggagttgaaaaaaaaaagaaaaccctggagttcctgcaagccaaccctccatctgctctacatgttctttcaaagcatttttcacaaatggccattcagattcagcttgcatacttcaactgaaaggggctcactatcttaccaccatgtgacgtatttagtaaaagcttttgattacaaagacaatgattttagaaacttggcatatctaaaagagtaagcctgtgagatatattaatatactatggcagcctcgtaatatgactcaggatggcctttcatacttgagatcagatactagatttttgctcttagtcttttcagaagctcatctctgatgcaccggtaagtgcttttggcaggcaatgatcatggagtacatatagtttctcctatcttccccaactctggcaccgagttaggggtgatgatataccctgggtcagttttctcttccaaaagacagaaagaaaatagaaaaagattcttattcctgggtgctggccctgattcttcagtgtgtgagtaaatgagtcagtactatttacctaggaggtttataatgattatttcatgttttaaattcaatcctgattttcctgcaaatgcagcattcagaggaaaagaaagaactcagctgtctgtacaaacatatggaaatcaatgataaatggacagagactgcagagtatatttattaaccaagcttgtataaatcataatttttcaaccatttattaaactaataggattgttttgggaacatcaaagaattctttattaagtaaataatcatgtttatccactcagttatggggaaaagcaaatcattcacactgcatttactctgcctcatcagatttcatttctcttaaatgtcagccattgataatttttaccaaacaagctgggaagaaaagtccaaattcctaccagccttcagccacctctccagttcagggaaaggactgttgctggcttttcagatttccatttctttcttccccaactgggtaaattctccatgaggcttaaaatggctctaccataatgaactcaaatttagatagttggcagccttggccagctcgctttctttctttctctctctctttctttctttctttctttctttctttctttctttctttctttctttctttctttctttctttttctttcttttctttctttcttttctttctttctttcctttctttcctttctttccttcctttccttcctttcttttttttttttttttttaattgatcattcttgggtgtttctcgcagagggggatttggcagggtcataggacaatagtggagggaaggtcagcagataaacaagtgaacaaaggtctctggttttcctaggcagaggaccctgaggccttccgcagtgtttgtgtccctgggtacttgagattagggagtggtgatgactcttaacgagcatgctgccttcaagcatctgtttaacaaagcacatattgcaccgcccttaatccatttaaccctgagtggacacagcacatgtttcagagagcacagggttgggggtaaggtcaccgatcaacaggatcccaaggcagaagaatttttcttagtacagaacaaaatgaaaagtctcccatgtctacttctttctacacagacatggcaaccatccgatttctcaatcttttccccacctttcccccctttctattccacaaaactgccactgtcatcatggcccgttctcaatgagccgctgggcacacctcccagacggggtggtggccgggcagaggggctcctcacttcccagcaggggcggcccggcagaggcgcccctcacctcccggacggggcggctggccgggtgggggggctgacccccccacccccctcccggacggggcggctggccgggcgggggggctgacccccccaactccctcccggacggggcggctggccgggcgggggggctgacccccccacctccctcccggacggggcggctggccaggcagaggggctcctcacttcccagtaggggcggccgggcagaggcgcccctcacctcccggacggggcggctggccgggcggggggctgacccccccacctccctcccagatggggcggctggcatggcaggggctgaccccacctccctcccggacggggtggctgccgggcggagacgctcctcacttcccagacggggtggctgctgggcggaggggctcctcacttctcagacggggcggctgccgggcagaggggctcctcacttcccagacggggtggctggtgggcggaggggctcctcacttctcagacggggcggctggccgggcagaggggctcctcacttcccagtaggggcggccgggcagaggcgcccctcacctcccggacggggcggctggccgggcggggggctgaccccccacctccctcccaggcggggtggctggccgggcagaggggctcctcacttcccagtaggggcggccgggcagagacgcccctcacctcccggacggggcggctggccgggcggggggctgatccccccacctccctcccagacggggcggctggccgggcgggggggctgacccccccacctccctcccggacggggcggctggccgggcgggggggctgacccccccacctccctcccggacggggtggctggcccggcagaggggctcctcacttcctagtaggggcggccgggcagaggcacccctcacctcccggacggggcggctggccgggcggggggctgacccccccacctccctcctggacagggcggctggcatggcaggggctgacccccacctccctcccagacggggtggctgccgggcggagacgctcctcacttcccagacggggtggctgccgggcggaggagctcttcacttctcagacggggcggttgccaggcagagtgtctcctcacttctcagatggggcggccgggcagagacgctcctcacctcccagatggggtcgcggccgggcagaggcgctcctcacatcccagatggggcggcggggcagaggcggtccccacatctcagacgatgggcggccaggcagagacgctcctcacttcctagatgggatggcggccgagaagaggcgctcctcacttcctagatggggtggcggccgggcagagacgctcctcaatttccagactgggcagccaggcagaggggctcctcacatcccagacgacgggcggccaggcagagacgctcctcacttcccagacggggtggcggccgggcagaggctgcaatctcggcactttgggaggccaaggcaggcggctgggaggtagaggttgtagcgagccgagatcacgccactgcactccagcctgggcaccattgagcactgagtgaccgagactccatctgcaatcccggcacctcgggaggccgaggctggcggatcactcgcggttaggagctggagaccagcccggccaacacagcgaaaccccgtctccaccaaaaaaatacgaaaaccagtcaggcgtggtggtgcgcgcctgcaatcgcaggcactaggcaggctgaggcaggagaatcaggcagggagattgcagtgagccgagatggcggcagtacagtccagcttcggctcggcatcagagggagaccgtggaaagagagggagaccgtggggagagggagaccgtggggagagggagagggagagggggagggggaggggagggagagggagagggagagggagcttgtatatgtatttctgtctttttctttctctcccctttcctttctttcttctttctttcttcatcctatgccagtctctttattatctgaccacccaggcacatctcagtggcctactttgtggattaggcatgagccagagaccctcagcacctgggacaattctctctgtttctactcttgttctccattgcgcagccagctggtgtgggctcagagaacaatgacttgaatttccagtgttaacaggaatacaacacaatcaggaagtagaatctgctgcctgacagcaaagacatattcagatgtttgttatttttatttttaatgtcagtgttgttgtgaaaattatttttatgcattagaattttataaataaaaatgtatttaaccataatttaacaggtactgggagagttccagattccactcatttgtagttattgatctctctaaggccagtcactgggcatagtgagaaatatgaagatttattgagttactcagtaaacatttaccgtgtactggcaatgtgcccgaccctgtttgtgacactgagaatacagaaatgaacaagaaaaacaatgctcctgatctcaggaagctgctattctagtgggaaaagacaaatattaagtatataaataagtctataaaattactaccaagcagcaagtgttataaagaaaataaaaatgtaacagaataatctgagagtgactggcagcagtggggggtgggcgctactttagaggactggccaatgtaggcatctggaaggtgacatttgacctaactttgatgataagtgaaatagggcacattgcttttcctggaagtttactgtcaagaaagatgataagactgcacttaatgtagtatataaccttaagcatgtatctatgaacgtcacgttaaaaatggcagagcatcacacaactcaaggaaagaagaaaatatctataggtccacagtaatacaaataaataattgaagaaagaaaacaaaggaaggaagggagggagggagggagggaggaaggaaggagagagaatggacaaataaatctttctgcagaagaattccaaatgatatatgtggatactcccctctcctgggtcacaggcttaatccccttccttttcagtgtcatctagacttagtgacttgattccaaagaatagagcatggaaagggaaaaacagaaattttacagtggagaaacctcacaaataccaccttatccaagtgatcaagattagcttcatcaaggacaagtcatgttgacatcacataccctctgatataatgtgataagaagggcacttcacttctgtattatccattcccaaaacccagtctgatcatgagaaaacatcagaaagactcaaattgggagacattctacaaaattcctgaccagtactcttcaaaattgtcaaggttataaaaaacaataaaagaccatcacagattaaggagaccaagaaaacatgctaaccaaattcaatgtggaaacctggaaaaaggaaaggacattagtggaaaaactggtgaaacccaaataaagtctatagtttaatagtgtaccaatgttaaattttttgttttgacaaattgccatggttatgcaagatgttaacattagggtgagtggggtgagggtacatgagggatctctgtacactctttgtaactcttctgtaaatctggtgcaaagatggtattctagagtgggagaatggctttttagtggaataaagtatgaagtggatgtggggcatagcaagcattccatttttattaagtgaaatcttacaccaaatagctatcacttcctctatacttctactgcttaatcacttttgagttacctcttttactttcacattgtgctatcattccctcactagactgagattttttccttttaatttctttatttttattttttgtagagatggggtcttgctaggttgcccaggctggtcttatgtgatcttcccacctaagcctcccaaagtgctgggattataggcatgatgagccaccatgcctgaccctgagctttttaagggcaagagccatacctaattagcatttaacgtggtgtctggtgcaatgtaggtccatagaaatttgcttaatgaatgaatgaaaggagcaaaatataaggtagtttccagccttgaaagtgaatataaggcacataacttaatttagaaagcagtggggagtcactggagattgttgagcagaggaatggtacaatcagagttgaccttaaggaagattcctctcatggcactgtacaacatggagtgtggggaaagagactagctaatggcaggaaaaccatataggagatttactgcattcctgctggctactgttattgagggaaggggtttgggagaaagagattgcaaagcaatgtgaagaatccactcaggctgttttctgaagtgttgctgcctactttttctattatactctctgtctaaataattatggaatgtctactgggccattgcactgagctgagccccatgcatgtgtgagaagaagtctcgtaaaacatggattcatctggaggaggcttacagtcatttattttgcacagattggttgttgccttggatgactttgtttgtttgctagggtaaataataccaggggctgaaacaaatagcaataaaatttcacatgtgagttttgtgaaaacatattgaagcccagcatgggtccagggaaggtgtgggccatagcctgctctaaacagtcattcaggaacacagtgactccaccctctacatgccataaccatcaaataaaggagaaagagtgtggaggtggcaatgccgctctttactacctcagcttggaggtgacacgtatcatctccacttatattccattgcccaaaaccagttatacggccagaccaaaacccaacggagatgggaaatgaaatgtagtagtattcccaagaagaggcagagaacttagatactgggggtttctagcagtctgtcatagtttttattttttctttaagcagattgttggtttttattgttgttgttgtttgcatatatgggcttccttcaactacactgtgagttccttgagagcaaggattgaatctcaaacttctttaactccattacagggacttacgtggtagccagcctccaagatggctcccagtgtttcctgcctcctgtattcatactcgtgtgtagtactcttccatattgtatagacctggcctgtataaacaacaggatagtgaggaaaggatagggtgcaacttccgaggttaggccatacaaagcattgtgacttctaccttgtgttctcctggatcacatgctcaggaggaagtcggctgccgtgttgtgacaacagatatgtagccctatgaagaaatccatctggcaagggattgagacctcctgccagcaaccagcagtaagttgccaagtctgtgaataagccagcttgaagtgaatcctcctttcatccacagtcaagattttgatgccttgcactttagagttgtcaaagcatttttattacaagactcacatccatccattcatttatcaaatatctttcatttgttcctctgaagacattgctgcataactattttaagacttcatcctggccgagcacagtggctcacgcgtgtaatcccagcactttgggaggccaaggcgggtgggtcacgaggtcaggagttcaagaccagcctgaccaacatggtgaaaccctgtctctactaaaaatacaaaaattagctgggcatggtgacacatgcctatagtcccagctgctcaggaggctgaggcaggagaatcacttgaacccgggaggtggaggttgcggtgagccgagattgcgccacagcactccagcctgtgtgacaaagtgagactccgtctcaacaacaacaacaacaacaacaacaaaaatacttcacccaagtaagaggtagtgaattggattcttaccacatgccagctcccagtggttggtaggaatggccaatgttgtttccaagtctctgagtttgttttcgagaataaaggatggaagccttatccatcagtaatgcttgccaaggacatggaagcagagagcagtggctcgtgagctgtatatttgccatctctggtctaggtattctgactcttgtttttcaagtgtatatcctcagttaggagccataggctagaaagtaccactcggcctggataggggcccctgagctgcaggtttcacaaatggcataaggagaaagctgaagccagatactttttggccataagtcaatcaattaatctgcttttatttattttctaccatgtggcttatactatgtaagaattcaaactggttgctgaaaagcatctttcctggctcttgtagaagacttcacttctcaactctagccttacagtcttgtgatttgatttttctagcattacagtcaagggcaaaaacatttgttaggtaactactaaaatttagaagaggcatgagatacattctacctatcagggctcatttatattctgagcagagtctatgtttgctaaatgcataaattttcaggtacttgcaaaatgccagggtcataaatctttttaaaaaacaaagcttatttattttccctaaaaataaagtggctttttgtttcatggaaaatagagacaaactcaaagaaaaaagtagaaaaccaagtatccacccttgatttcacctgtcagagccaaccactattttaaatgttgtgcaaggtagaaaacacatatacttgggataatatatatacaatcgtgttttgatttcctcagttatcagcataacaaaaaagtatctcctgcattattactaactttttgcatatataatttaagattgttgcttattttattatatccatttatcaaaatttactgatccatttccctaatgtgaagttattttcatggagggaaggaaggtgctaaattactataaatcttcaaataattaaagacactactgttaaagagggagattattcatcgactcatgtaatcttaaacctgcaaggctcccttagggtcagtggattgcagtgcttttatcttgtacaagaggaaaatgaggcacagtttcctaacttgtccaggattacccagccagtcaacagcagaaccaggtttatagccccaagcttctagcaactgtagaaatatcaaaaggagaaagcacttttctttagcaggtattcagcatgatgtccaacctttgaagccattgctaccgtaggtgtggttcaattagaaatcaacaaagttggagtttctcagcctgcctgtttagatgaatgagggcttgccggtaggaagagtttgagacacatgtatagcaggaaaaagcttacctgggagtcctgtctgtaaacatgggatctagctgtgcttttgcctgactgtggtttaaacaaatgtagcataagcaggtctacatccttggatctcaactttctcacttttcagtgagggaactgcattagttgatattttaatgttctaacattttagcatctaaacctactcctttttgtcaatttcaaactcagtgaacatgggtgggagttagcaagaagacttaagagtttactaatgggacgaaagtcttaaaccactgctcaggtgtgttgttgagtgaattgaatgagcatatatggaatccaaagctctttgcttgaataaaatatttctatcagtaccacagagtgcctcttacctctctatattagggtggcagatcaacaatttgaggttaattcaacttcgaggtcacaactagcaagtgaattgtgaagcaatctgtgggaatgactgactacaacaaagctttgttcaactttctccattgttcaactctgcctgatgctttcagcttcaatgggaattgtctttgatgttgcggtttctcatacgtttgacgtaaacatattctactgggcagtactttgtaaaaacagatacatgcatgttttggcgacttctgaactctttggtactgcaatagcagcatagacagccctcaccttgccagttttctttgctactccatgtgtctctgggctgggactcttttttcactgattctttgaaatactgtcttggactgaagtgaccaccttcaagaagaagaagaaaggggtactgactgatgttgataatattatcaattaaagctatttggagctttgatataatttctttggatgataaattataacccccttgtcattcttattgctagtttgttgtgtatttctgagattccctgttatatccccattaaaaaaacacacacaaaaaaaaaacagctggcttggcagggatggagtcgaagtgaggtaaccctgcagctgaaactctacatattcacccttaatttaaatcctagaaagatgaaggagataatattggaagaatgattggggatttctgtgatatggggtattctgtgacagtacaccccatattctgtgtggtatcctctccattgttaggagaagatttattcatgcaataaatgtttactgagcccctgatatgtgtcagatgatattttcagctctaagggttcagcagggaaaatgcaaagtgcacaggagttcttgaatagctttactcctcaaatttactccattttccagttgctcaggccaaaaaccaagagtcagctttaaccctccctgctttctcccttgctctacttccaaactccattgactctgcctccagctgtttccagactgaccatttgatcattttgttcccctattgctaccatcctgggtaaaactaccatcattgcaataatgacatcacctcctactgcttctccccttgcttactggcccaatttaggggttgcatcctggctccttcctctgcctgaaatacttttccaccaggtatagacttggctgacttccttcaaattgtttcttcaaaatttactttctcaataaggtctacctggactacactgtttcatcctttgagcagagtgtctgcacagtgtttcctattccttttagcttacttttagctctactttttctttattgcataaaacttatccttttctaacataatagaccttatttattattttttaattgtctgcttcctgatacccatgcaagatccaccagggcagagatcttgctctgtcttatttactgctgttctcaagtgcctagaacagtgcctgggcagtagtgggtgattacataaatatttcctagatttagggttttaatctttaatgtttaatcaacttaatctttaaattgattgcaaatgtatgtatgcaatgtatgtatgcggttttccagaagcagtctcatagattttatcacatagttaacgggaactgtgactaaaaccagttttaaaactactatgttatgtttaccataacgtggttgatttggggatttaattagaataaaacacatgaaattgtaacaatgtgacttcttggatggtttcttgacccatgtactggtatgctaaaaatccttcttacgaagacctgtaagtggggaagcaaaaaactattgagaatgtctttcttagcaagaagtcaagagagcaagtgataatgaagctggtaactaagttgttatgttaataataatgctaatactcataattattgtatgtggaacttttcatttggaagtctcaaagtgctttgtaaactagtctaattagtgacatttcataacaccctagtaggacggataagtattactatacccattttatatctttagataaaataatttctaaaggtcatatagtaagttaagattagaaactaaagcaatacttggaatctcccacccctcgaattccagtatgtctcctggtgcctataggtgtatgagttcgtttcttccagcattggttcatgaactgtgggaatctgagtctgatgcattgttcaggatgtcatgagaaatacaatattctatggtagcctcagagtagttgctgaaactaaatgatagacttattgtgttggtttttgttgttgtttgtttgttttgttttgttttgtttttttgagactgagtctcgctctgttgcccaggctggagtgcagtgccacaatctcggctcactgcagcctctgcctcctgggtgaagaatccttcaagtgattctcctgcttcagcctcccaagtagctgggattacaggtgcatgccaccacgcccagctaatttttgtgtttttagtagagatggggtttcaccatgttggccaggctggtcttgaactcctgaccttgtgatccgcctgccttggcctcccggagtgctgggattacaggcatgagccaccacacccagcttattgtcttgtttttaacagagattttcacaactgataatattccctttgccattcaattcacatatttgtctttccttttgtgggtctacattattttggccctgttcaattgattacttctccagccttacatcaaggatttctgttctagtcccagctgtcaaaaccactgtgacccccaagcaagtctccaagcctcctgaatctcagtttcttcacccataaaatgagcatgcttaagtatctctatgtttcttttaagcaataaaagaacataattcaatataggaaaatcctttgagagtatttcttcagggcagtctgcatgttgaaagcatataggcaaacagttattggagagatgccttgccaatggggaagagagcctctaaatgttctgttattaaaaatggtctgaaataggtttggggtcagtttcattttgcatctggggccctcttaatgatgattacaaacttttattttcttgggcacaggttaaaaaaagcaaggttggtccctaattctctcattagggctttatgaaatgagtcccccttcttgggaaaggctcttcctcctgtactttactgatttctgtctctgcttctttaggaacctctttgtctctcctggggagtgtcaattcacatcttaatcactttgtgtgtaatctcattagagataatcccatttgccagagtgtcagtatctttctttggtaaagaagatggaattcctatcatttgatttggaaacccaatccagcttgagttataaatagagcagtcatagctgagtttttttgacttttgatgctggcattgaaatagatgagagacgtgttctttaaacttgtcacactaaatccctatcaatcttggctttagacagaaaggacataaacttttttgccatgtaaatgaagcaagcattttgttcaattacaaaaaatatataaaatgattttcataaatcaatctggtaattatgtcctcttatgactaccctatttttatttgtggaggtaaaagttcttataataaacaaacaagagaacaaaagacacacacacactcatgcacacaaaagacttccctccccttgttttactttgaacacttgccttatagtgattctcatcaatcagttctgagacagtaaaattccagttcattcaagcaaccacatttggtggttgagagcttggtcaaggaggcccaggatagatcctcatgtgaagcctgatgatgtgagcagtgatcagtttttgcaggaaatgccaatccatattgttccctgttagtcataatatacattgcattaaatgtgtgggaaaaaaaacctcccatggaaaccccatctctctctgccgttcccctttcccacatgcaacaaattcaaatcctcatattcttgaagtggggagtgggggatggagaacagcagtcattctcatttgatggtttgaaaaaagaaaagatgttggtaccactcactgactggctaatgaataatcagatttcacagcatgagtgctgggctggtaatttggttgcacgccatgctccaaacccatggaatagtgcttcattaatgtgaagacctgtataatcaaacaattagcagtctctctgcaacaaaagcagcttttcatcagcatatatactttgtcaaaagatgagtcccaaatcagtggatctgatagcagctagacttatactaactcatagcaactatgacatggagggtgaagtttctgcttttcacccttaccttgagcttaggatctgatggcagcttgtgctttggcatcactgaatggtggcaaacatcagtaggaaatatgagattaggagtatgccttctaattttatttatataatctgctgttttatagtttctatgtttatcctcattttatgctctttagaatttagaagcttggaaagatactttgaattactgtggggaaagggaaactttgatccttttcttaatttgcttatttacatcaatgatttgtgtcatcttcattctaatatagctgattagcctctttggagactgtctcagtaaccatggagaaagggtgctgttttatggcaagatctctcgtttgctttgttaactaattcacatcaaacgaatgcccaacagggctgcttatagggccaggaggcagagaccttgggttcctgatgccctatggtttcaagtctctttccaacccctaaacaagccctaaatatattaggttgctttcaacatgtcgctcagtggcaaggaggtggtaagtattaactccgtactttttttttttaagcaaaatgtaaattatcaacaaacttcagtggatttgtgactgtttcatgatgagtttggctattctaaatcagggtagcaatttttttttctgtatttaggatacagcatatatttaggctttgcaggtcaggaggagaatcaaagatatttgtatgtactcatataacaactgttttgcttgtgcttctttcaaaaacacatcacaggctaaatttggccagtgaatccttgtctgccaatgcttggtctgaatcacaggctttaaaaaaaaatatctttcttgcagtgattcatggctgtaatcctagcaatttgagaggctgagacaggaggatcgctcatggtcaggagttcaagaccaacctaggcaacaaagcaagaaccccatctctaaaaaaattgaaaaatttgctgggtatggtggcatgtgcttgtagtcctagttactcagaaggctgagtcaggagaattgcttaagcccagaaattcaagtctgcagtgagccatgattgtgctactgtactccagactgggtgatagagagagactgtctctcaaaaaataaaaataaaaacaataaaaaaatctttctctgtggttgaacacagtagcctctgtatatctgctatggtttggatatggtttgtccccaccaaatctcttgaaggtgggcctgatggaggatgtttgggtcaccgggccaatttctcatgaacagatgaatgccctccctcaggggtgagttcttactctgttagttgttcctagagctggttgctaaaaaaaagcccagcacctctcccttctctcttgcttcctctctcaccacatggttctggctcccctctgccttctgatatgagtagaaacagcctgaggccctcatcagatgcccagtcttgaaccttgcagccagcagaatacttcaggttactgagcagaatacttgagtcaagtaaaccttcattataattacccagcctcaggtattcctttacggcaacacacaatgaactaagacagtatctgagtttctttttgtacatggttgttgttccgttagaaataataaaaattttgcaagtgtgtgtgtgagcagtagaaattgttagcaataatcaataaaaatatatgggatggctctaattcattgtggagagaggtaaaaaaatgaataaacccaaaatactcctttactctctttttgttgactgagagtggtggtggagcaagatactcagtttacctgggttattcgtgtggatgaatttcaggtcaactgatggagcatgaccctgacagggccacagtttgggatgtggtctcaggataggtgtaatggtttcacacaaagggaaaacactgttgcatggcacaaactgtatctctactcaagtcagttctcaaaaagctggccagattgtcaaagaaagtatggctgaactaaggacaactagcaccaatcccagaaagagcatgccctacatgactgaaatctcagatcagactctagatttgcatatgaagacaattatttgcaaacacagtttctagcgggatggagcaagggttctaaggacaagttatgtcctgttgttctcatgccttcgctgacaggttacctatgtggtaaatcagagaaacacatcagatgtcctatttctggactccagcaaggtgtttgatagcatcctttgtgagatctttgttgacaagatagggtaatacgtattggaagctaacatgttgaggtgggttaattagtagaatgccaggctccaaacagctgtagatagagatttctagtgactgcccattggatgttgttcttcacgccattctcttccacattttcattaagatgtgcatgaagacatagaaggtattgttgtcaagtctgcaagtaatgagaagcctggagagctcacaagttcaatggataacagttagagaatcaacaaaatctctatgacttacgatcactgtcagtgaactacaacaaaatacaattgaaactggggtaaatgtacaatttgtcatttgagttttttgaaaacaccaaaatactaataactaattgtataagccctgagtgggaaagtccttccttagcaaaagcagaaatgaaaatttgatttcagttttcagtagtttcaataggtccatgaggtaattaacattacctatgactgcaattatctaaacaagttcacttagagtgccacattttattgtatttctttcacagcatatttagatggcatggtaaaaaggaaatagataaaagtatgtttaataaagaaatactgcaaagtgggggatgcaaaaccttaattactatgttgaatgaaggactgtagaaggaatggtgcctcttctctctaatttctgggctccaccacagacctgctgaatcaaaattcccgagtggtgccaggggatctgcagttgtgaaaacctctccagatcattctgacgagaagccagatttgggaggccaaatcctcatgaatggaaaaatctattaaactagatgaaataactaattaacaactgagatctgtagtaactttctcacatttcttccatttgttttggaatcttatcactagcctgtggcttgtctgttcaggaacaaataagttagcgtttctgattctttctctgtaagggccagttaattttatttgccgagtccctgctttttgccaggcattggggtgataaagatgaaaaagcaattttacatttcattacactgaccccatgttcttgttctaatagtttgccaatgctgggttctctcttatctcccagtctttgaatgtcaaataccatctctccaactctagtccttcatgaattcttctccaatctcaatactgagagataacctactcctctttgaatgcccacaatgcaatatttgtggcagttatcactgtttagcagtttggatatgtacacattgatttactgctaaaatacagttgtcatgaagagtaggaactccaccttatttctctccactgcctctagaatagggtctgctacctaagatatgctcaataaatatttggtggaaaaatgaatgattcattggcattaaaggccaaagcttttggcttatgatgatatatagcaaccatgaaaaaaagaaacacctaaatccttcatagtttaaataaatgtatgccagagttcttactcagatcagcatgcttgctgaggtcacatcctcattgaagtatcactctcctccttttctcctcctggtaaacacagctggctccttatggtgccagtggtcactctctagaaaggctggacttggacgcctcagtaggcttctgcttcctgcatacttcacttggtagagagcgcatgtgagacagttcacattccattgaatggttgaggtccttcattttccatcttaccacaggggctatttgaatgtatcagactttactacagtacaaaggtatggagagggttacgttggagtaaggcaaacaatgtaaagtggacactgggcattctggatgctttatgctcaaagctccagtcccctgccatgttattacttccctttttctgttcccccagattcctgaccatcactcattcaaaacggttagatggcttttttgtttctatctccttataggtatgctcttttctttcccatgcaaagtagagaaagaaaaacagtttctgctcttaaatgtatttttgccactcaatctatagaacatgttcttccacaattacaagtaaatagaagacagactgggactctggaaaatcctaaagcattatagaacttggggcttgtcctttgacttcatggttttcaaacccagcatggtgacccagtagtgggctgtccaatcaactgagctcttgaaattggaatagaataaaatagaaatatgagcatattcccatctatagaaagggtgtggtggcgggcgcctgtagtcccaactacttggggggctgaggcaggagaatcgcttgaacccgggaggtagaggtttcagtgagccgagatcgcgccactgcactccaacctgggtgacagtgtgagactccgtctccaaaaaaaaaaaaaaaaagcataagtattgttttgtgagacttgtttcagttttgtgtttctgtgtgtgtctctgggcttataatatgaaatgtgcttcttacactgttagaggcacttctttgattttgctgagtctccttatcatctggctaatgaggaaaaggcaagttgaacgagaaatatcggtacatttttgcggtctgcttgaatcccttctaggtgggcttcttactgggctcagactaagacctagatttttgacacagttatagtgctagtcatttctagcttctagttggaaatgcaaatgatgtagcttaaaaaacaaacaaaaaaaaaatggagtaggggcacagtggctcatgcctgtaatcccggcacttgaggagactgaggtgggagaaatgcttgagcgcaggagttggagacaagcctgggcaacacagggagaccctgtctcttaagaaaaattagccaggcttggtggcatatgcttgtagtaccagctactcgggaggctgaggtaggaagatcacttgagcccaggaggttgaggctgcagtgggtggtgattgtgcctctgcactccagcctgggtgaatcctatctcaaaaaaaaaaaaaaaaaaaaaaaaaaaaaaaaaaaaaaaggagtcacttaatacttcctaaggtttttgcagaacttaaaaagaaagaaaacctgttcttttgctcctatataaggacaatggggaaagcagagcccattgcatttagggcggggggtggggtgactgttggcatagacacacatagccaggattcctggaaatgtatgagtcttcctaaaatataggcttgtttatttttcttaagaactgcctttattagtggcagccaaggaagcaaacatattggttgctgacacgcctatgaaatgtaaaagccaactcttctcccttgtctttctttctagatgcagcctccctcccagactctcccatcaccctgctcctaactccagccttggatgcaggaaaattgtgaaactagaggttatgttttgcttaccgggttggcacttttaaggcaatgagaagacagtattcctaaatcagtatcttacccattaggagattgtacctcctttctcagagaacctagtccttgaccaggacagacgttatgctttatgctgcctgcctgcggggtccatgttgcagacaggccactgcacagcattttctgggtttcctttacccctagccagtccttctcctcctacaatttctcctgtttcccagcaagcccagccgcttcacagcaaggttgcttccctgaggaaatcaggaagggaaggatgaggacagctgcccacagcccaggcacatggcaggcctggccaggaatgagaaagagaaaacgcagcccaaatctatcatcactcaacttctctgtgttccagagaggtgccaccatgctgaaaaatcagtggggatattaatattgggacccttctcctttcagcagctggtgtttcagtagaagggatattttcaggttaataagcaatgattggccccttaaaaaccaatttctaacagcaagtggagtagagatggaatggcagggctctctatttgttttcggggtgtcacagcaaaatattaaatcctttgaattagcacgagctctgtaatcctcttagagcgtgtttctgtagggaagagaccttggacagctacagtgcatcaagatgcctttgtgagcattttcaacaggcacaccggccacccgttcctaacgtgaagtctgacctagcgtcaacacggagcaagggaaacagacatgcaagcacattgatcaccaagtaaagaggatgagacgacatgaactctccctttgagattcacacatcaaatcaggcttgatgtgtttctagaagcagctgttaggacaataatatttaagattattttttaaagttcttttaaatatagttcttctaaaaatcactgagagaaaatttgaagattaggaaatataaacatttatttaatatttctctgccaagcttaaaacatatcaaatctctctaaactgcaagattttatgttgacatatccatgaatataatgctacaatatatgaatatgagaaaacaatgcgttccgatagctcagcacatcactggggaaaatgcgttattatttacttgtggttgataaatattaaaaccgagaataaagttaaaatagtcttctatcataaaacccaccattttctcttctctcctcaaaaactggttagactcattcttttatatatatgtcttgtattttataactaacaaaaattttcttttggcttttctttcttttgcaaataacttagatttaacaaatcattgccatgagctaagtcacatttgaatctagaaaatgcactggtattatccttctctgttcacatatatttgaagtaaattacatcaaattgtatttgaaataccaaactggcattaatggaagctttttttgctccaggcaccattttaaaatagatgagcataaaatgcagtctgcatcattaagtttatatgaaactagtgagaataaaaatcaccatgtaagttctaataagatgtgtttttcattccagtttaataacccaagactatattcatcttccagtataataaatatacgaagaggaatgagttcttttgtgggcttaacatgttgaggttccctttttccccccaagaagatggagttttctgggaagctgggtgaagaaaattctttaatatggcagtacagagtattattatcataaataattaatgtgcacagcagaagaaagccgggcttcattaataattcttatttttagttggcataagctagaggtgttgtatcttctttcatcctatctatgtcaatttccttgattttaatgtaatagatgttaaaaattttaaaggtacagtacattatgcagtgggtttttgtttttttgactaaataacatcctagtactaattcttacctgccaagatatttttagaaacaggcaaaaggaatgaggtgggggtggggggaaagtcatgataaggcaaggtagagtgggcctttcatctttcatttccctctgggactagttaagatgctcctttgattagaacctcaggaaatattaagaagctctgccatgaatttgagctcatcaaactcgcctgtttatttttcaaattcaaggctgatccaccttctatatcctgaaaacacgggttctccctgacacagtcttgcatttgtgatcaactaaatcacttgtcaaaacctccaaatctttgataacaggaatttgtaatttattaattcagcctctgagcaggaaagcagctaaatgtttctgattagcacaagggaggaaataaagagcctgctacagagggcagcagggttgcactttacaaggaacagtgagaagcatgcatgccattccaacttaaggggattgatgcacaacctggacaactgtgagagagccgatcaatgttatttcatgggagagtaaagctaggaagagggggcaatcaagcaaaccttggggaaaaataagtctgatatgaaataactcaaatcatgggtctatgcagttttgtagccctttctgctgagcaccagggctgagattcttatttgtggccactgagctctaccttgacctcacaggtatcaaatagctttctagacagttcagctaaggtgaggatagaaatacaagcagcacctacaatgtgatctgcgatgctccttcatccatctcctgtgttcaggataattcaagtgctcagtttaatcccatttgcctgggtatgtattattggtcctagaagtcacagccattgccagatgagcatagcaatccacatgcttccttaggttcccatagccctacctggcactcaacctcctccttagagccccaccatgagctatgaaaagaacctgggtctgagcaagatcctctacttgcttctgcagtggattttgcatttcctaattaactgtgaggcttgagacagaggattcttggttggtaaccttctctcggttcatgaactgagaggactgagtaactagcaaatgctttgctttttactgagcacgtattaagtgtcaggtgacacggtacttgctgaacacatggcatttatctagtcttcatactaaatcttcaatgggcaagttaatattactacagattaaattgttttatgtgtaaaatgggcaaaaatttagtttgttgagaggctaaataactttctttttcctttgtcaccttttattttagattcaggaggtacctgtgcacaagtttgttacctgggcatattgcatgatgctgaggtttggggtacaaatgatcctgtcacctaggtactgagaataatgcccagcagttagtttttcaatccttgcccaaacttccctccccctctggtagtctccagtgtctattgttgccatgtttatgtccatgagttcccaatgttcagctccctcttgtaagtgagaacacgcagtatttcattttctattcccatgttaatttgcttaggataatggcctccagtggtatcaatgttgctgcaaaggtcatgattttattttttaaatggctatatagtattccgtggtgtatatgtatcacattttctttaaccaatccaccactgatggacacctaggttgatttcatgtttttactattgtgaataatgctgcaatgaacatgtgagttcacgtgtcttattgatagaacaatttatttttcttcaggtatatacacagtaatgggattgctgggccaaatggtagttttaagttctttgagaagtctccaaactgcttttcacagtggctgaattaatttacatttccaccaacagtgtgtaagcattccctcttctctgtagccttgacaacatctgttgttttctaactttttaatagccattttgactggtgtgagatggtagctcattgtggttttgatttacatttctctgatgattagtgatgagtattttttcaggtctttgttggctgcctctaggtgttcttttgaaaagtgtctgttcatgtcttttgcccatttttaagtaaggttatttgtaatttgcttggcctatcgtttaagtttcttatagattctgtttgaagacatagtttgaagaattccttatagattctatagacctttgtcagatgcatagtttgtgaattttttctcccattctgcagattgtctgtttactctgttgacagtttcttttgctgtacaggagctctttagtttaattagggcccacttaacaatttttgcttttgttgtgattgcttttgaggacttacttataaatgctttctcaagtcccatgttcagagtgatgtttttgaggttttcttccagaattcttatagttcaaggtcttatatttatatctttaatctgtcttgagttaatttttgtatgtggtgaaaggtaggggtccagtttcattcttctacacatggctatccagctatcccagcaccattttttgaacagggatccctttccctattgctaatttttgttgactttgttgaagattagacggctgtaggtgtgcagctttatttctgagttctctcttctgttccattggtctatgtaagtgtttttgtaccagtacgatgctgttttggttactggagccttgtggtataaagacatgtaatgtgatccttctggctttttttttttccccttaggattgctttgactatttgggttcctttttggttccatatgaattttagattagtcttttgtaaaaaataattgttgttagtttgatagaaatagcactaaatctgtagattgctttgggcattatggctattttaatgatattgattcttcaaatccgtaatatttaatatttttccatttgtttatgtcatctatgatttcttttagcactgttttgtagttctccttgtagagatctttcacctctttggttagatatattcctaggaattttttttttggtagccattgtaaatggaattgcattcttgatttctctcgcaacctgaacattattgatgtatagaaacagtactgatttttgcacaaaagatgttggatttcattgaaagctttctccatgtttattgaaatgatcatatggtttttgtttttaattctgttcatgtggtgaatcacatttattgatttgcatatgtcaaaaccaatcttgcaccccaggaatgaagcctacttgatcatggcaaattaactttttgatttgctgttgaatttagtttgctagcattttgttgaggatttttgcgtgtgttcattagagatattggtctgtagttttctttcctcattgtgtctttgacaggttttggtatcaggcggatgctagctttgtagaatgagttagggaggagtttctatttgaaatagttttagtagaattggtaccagctcttttttgtaagtctagtagaatttggctgtgaatccatctggtccaggaattgtttttgttggtaggctttttatgaccgattgcatttcagaacttgatattaacctgtttgtggtttcaatttcttcctagttcaatcctgggagattgtgtgtttccaggaatttattcatttcccttagatttttctagttggtgtgcataaaagtgttcataatagtctctgaggatcttttgcatttctgtggaatccgttgtaatgttacctttgtcgtttctgattctgcttatttggatcatctctcttttttttctttgttagtctagctatcagtctatcagtcttgtttttcctttcaagtaacaaactttgggttttgttgattctttgtatggattttggggcctcaattttgttcagttccactctgattttagttgtttcttttcttttgctagctttagggttagtttgttcttgtttttctagttcttctaagtgtgatgttagaggaacatcattaatttgagatcattctaagtttttgagttaggcatttagtactattaattttccttttaatactgcttttgttatatcccagagattttgatatattttgtgtcttttcacttatatcaaatacttttttatttctgccttgatttcattgtttacccaaaagttattcaggagaaagttgtttaatttctatgtaattgtgtagtttggagagatcttcttcatattgatttctatttttatttcattgtagcctgagagtatggttagtttaattttgatttttctgaatttattgagacctgcttcatggccaagtatgtggtcaatcttagagtatgtcccatgtgcagatgagaagaatgtatattctgtggttaatgggtgaagtatcctgtagatgtctgttaggtccaattgatcaggtgtcaagtttaagttcagaatttccttgttagtttactgccttgatgatctgtctaatgctgtcagtgggatgttgaagtcccctactattattttgtgactatgtctttttgtaggtctagaagtacttgttttatgaatctggatgctacaatgttgggtgaatatgtatttaggattaagtcttcttgttgaattgaaccctttatcgttatgtaatgttcttctttgttcttttctaccattactggtttaaagtttgttttatctgatataagaatagggacccctgctcttttttgtttttttctgtttgtgttgtagatatttcttcaaccctttactttgagcctatgggtgttgttatgtgtaagatgggtctcttgaagacagcaggtggatgagtctcgttttttcatccagcgtgccactctgtgcattttaagtggggaatttagactatttacattcaaggttaatattgaaatgtgaggttttgatactatcatgaagttgtcagctagttgctttgtagtttctactgtgtttttgctttacagggtctatgggctctgtccttaagtgtgtttttttggtagcaggtattttttgtttgtttgttttttccatgtttagagttcccttaaggatctcttctaaagccgatctagtggtaatgaatttgcttagtgcttacttgtctagagaagattttagctctccacttatgaagcttagtttgatgggatataaaattcttggttggaatttattttctttaagaatacaagaacattttctgaaaataagcttgtaaagtttttgttgagacatctgctttttgtctgatggggttctctttgtacatgatctgccctttaattctagctgcccttaagattttttctttagcattgaccttggacagtctggtgactatatgtcttggtgctgttcattttgtatagtatctcacagatgttctctggatttcttgtatctgggtgtcttcttctctagcaagattagggacgttttcttgaattattttctcaaatacattttccaggttgtttgcttttcctccttctctctcagcaataccaacaattcataggtttggtcactttacataatttcatagttctcaatgactttcctcattaaaaaaaattctttttctttattcttgtcagcctgggttaattcagaagaccagcttgcaagctctgaaattctttattttgctcagtccagtctattgacaaatctttcaattgcatttcgaactccttaagtgagtttttcagttccagaagctctgattgatttcctctaaatcaatccatgaaatgaaggaagagatgaaggaagagataaatatcttccttcatttcatggattgatttagaggtttgtttgtgtttattttcaactttgtcgtggtcttattgagtttccttgcaattcatgctttgaattattagtctgtcatttctgagtttccattttggttagggaccattgctggagagctagtgcaattctttggtggtgtcactacattcagatttttcatggtgcagaatctttgtgctggttccttctcatctggagacattgacacttctaacttttgtaattgttttcacgcaggtaggattttttttttttttcgttctttccttttatcagtcagttaccatcatgggagctgcttgctggcattctcctctctgggatctggggtgtctttcacaattctggtggattcccattttccttcttgaattaaagcttacagaattgatctttgtgtactatcttgctatttccaagtggctgaggcacactgtaaagctctaatctaccatcatgaaaaaaaggcctaaataactttctgtaataggtcacatggccagaaatatttgtcaagctcaaagtagaagccacatgtatttggagatatatatgtatgtatgtatgtgtgtgtgtgtgtatatatatatatatgcacatacacacacatatacacacatgcctatgtctgtatatgttctatatatcttatatatatatgtctatctacttataatatatgaaaatgaattgcattttacatcactgactctctattaattcactattagccaaatgttaggtatcttgtagtccctttctctcatgcaccattcatttggactgcctttctctgccatgatttggtgtgctctcagtgaatgcaagattaatcttaatgtccatcagagataaacacttagagaaaagttaatctgatgccaaaaatatacgtaacaccatgaattccaagtgtgccctcagcaccttctgccaaccccagcatcccggcccctgcatcagtgggcaatcctcctgcaagaatggggccatcttcagtctaggctagaggtctgtggagcattggctgcccagcagcaagaagttgcacctggacagagagcagacaacctgttttatgatcagcctcttcttctttttctctctttctttctttttttttttctttttttttttttttttgaaagagaatctttgctctgtctcccaggctggagtgcagtggtacaatctgggttcactgcaacctctgccttccaggttcaagcaattcttctgcctcagcctcctgaggagctgagactagaggcatgcactaacacacccagctaatttgtgtatttttagtacagatggggtttgccatgttgaccaggctggtcttgaactgctgacctcaagcgatccacctgcctcagcctccccaagtgctgggattataggcatgagccaccttgcctagcccaggatcagcctcttctatcaggtgacatgcttgctattctaaacttaactgactctgaccctgcagattctgaactttaccagtggtcttcttgtttttgcagatgttccagcaaacacaggtcctagactggaaatactctgcatgctttaccccaaactgttcatcttgtctatatcacgacaccctcttcccacttcttccagataggcctgatgattggaatttgacttctggctgagctgggttcatgagctaggctacacattccttgggatcaggggatagtgcctgtcttactcagtgcttgaaatatagttggccttcaacagtatatttatatgaatgaataaatgattgagtaaagattgcactgtggaagatgcccggtctatcccagctagctcatcagtggatctccagctcccgtccctatctcatcaacctgatgctattacgactttgacccctgagtgatgttgattagaaacagattggggtctccactctatgggcttggcttagccactgtggtcctcctcatggaaaatgtcatcctcttacacaatgcttgtggtcagagaacctgttttacatactcctctttgcaggtgcccctgggctaggcacattctgggcttagtgtctctatttagacttccccatctctcctgttcagtaacacagcaagataacatgaccctgccttggtaatgttttagaatttccatggcaaagattctaataagacaaacacacctgtgttttaattgtatatttgcttcagagcagcaaggaagacaagtttttgtttactggtcccagggtcaataattggcaaaggagaaaagtaatataagaggtgaaagttgccggccgtgtagtctcagtatatgcactgaaaaacaaaacatggcggccaagttccaccctgcccttgctttatctggcccagacatgatctttgcattgcagagtatttaattactcctagtaaacctgcggttggaagtcaaggggttgatttgggaatgggtgtttgcaccacatgtgaaaatcctgacctcagacacatgggagttatgaaaaaagatgtattctgaataccaaagtcaaaccaggggggaacaaaaacaatgctagggaatgctattataaatggaaaaatcttgtttaactcagtagaacttttctctgacttctttggtcaatggcatatactgctcaataaaacatttatttaatagagagattttgtctagtaattgagaagatggactgaagatctaaattgccagagttcaaatctggactacgcctttcaccagctgtgtgatcttggcaatttatttaacttccctgtgcctctattgcctcatctgtaaaatgggaatattcttaggaatgccatgaagattaaatctatctatctgtctatacattaaaatgcatctatctctctatctctctgtctctctatctatctatctatctatctatctatctatctatctatctacattaaaacacttaaaatagtgcttggcacttagcaaatactcaataactattaggtattatttttattatttcaattatactttttaaggaattaaaatataatacaatttctatttaacattatttaatctttcttgggtaacaaaagcagaggcatcaatagtttggtaattctgttagtcagggagttgacatcagtgtaagctggacctcactgcataatgtgaattaggaatgaacatcccagctttgcccaggggccatccagcttgcgtgagataaatctggacctgaatgtcaatttactaatttatagtggccatcatttgctaccaaattgaatgctatatttgcatggttccatcaacttaatctcttttatcaaaaagtcgaattaagattccatggctgatttgtgcacatggggtgttgagtgtcctgttggtcattaccatagagcagtggtggcttattgaaatgccacagctcttctggcatcccagtgatttttatctttgcactagcatgacagtaataagaatttcttactctgcactctgtctttcctagattccgtttagatccatgcctctagggtacatttgccatggcaataccacttcaaatgtcaacctagaagactgttctcccatacaggttaccatttcaaatgtacactgactaaagttccacttcaataacatttaagggagtcccttaatccccagtattagaatgcccccagaatcacactttgcagtcctacaataaggagagttttcttctcttcaaaagtgtcactttctgacatttcctgaatctgggcgtctgctttggttgccatctgaccttttggctggtagcctattctcctctgtccatcatcattataagcgtcaactattattttgctgataaactcagaagtgccatttactagattattttggtcaataaaatgccagatagactagatttactatatcttttaaagtagtcaataaaataaaatcctctaagcgagatcagaaaatggcttaccgaagaaacagacctatgaaagtagacgagggacatgtcattcttacaataacttggggcctgtttatcattccactttctctattccagcaaacaaagaaatatcataagtaccatcccccactttttaaaaaagttccttattccagaaactttgttccagaaaagatgtagtaaaaatggggtgttaacaatatctgtgtcctaaagtgtttcgtttttgattaaaacgtatcacacttgagaaatgattgaacaactggttggaagtcacaaaaatattaactgtaatgagctcatttaaacagaaacagacgtgctaccccgctggttgtcaaaagttttcaaagacggtttctctcgagcaagcagggtcctgcagactgcgtccatctgtcttcatgaaagagcattttcatactctggaaggaaatgctcctgtaaaaacaccatttggaattattgatctcttgatcacttgtagatctcagtgggaaatcagaacagcaatgggctcagacaggaatcaccagtgccaagaacatttttttttaatttggattaataggtggctggaatgaaataaagtcatatttattaagaggaaacaattttctcttctctcattgaatcccataatgggatttttcttgttttcccaaaggcctccttgttcttcccttatcatagcgaaagatatgtccctttgttcccagttcctaaattcctgggctgtttctgaggattcacacgctgcagctaaacatttagtggggctttacaacaaaaattcgatgttcttgcttaagtgtttgtctggtgaattagagactagagacagcataatgactccaagagcaattgtaggatgcttgaacaaaacaaaacacgttatgttgctactgtttccttaaacctagaccacagaattccagggaaagaaaggatttgggtatcaaatttatccctccctcattttccatagaagagattaaggcacagaaagtgaagtgagaccttgtactttacgttcactttttcttgaggaaaaatctctctttatttggtgatacagaaggctgactttgcaaaataaataaaatataaagagatcagttttaagactgttgaaaaacaaccctgttgggttatccttagggatcctctctttgataatatataagtctctagtaactagaggtgctcagaaatatttgttgaatgactaaactaatgaaagactgagtttcgtattgctattacagataagttcgtggacaatggtgatgtacgaaaatgtgtgaaatcgtgttacatttcaaaaggaaaaggcaaaatagtatgtgtccaacaattctaaatgtgtacgaatgtgcttaagaatgttaccaaagcacagaatagaatttgaaatgacggataatttaaggttttctaaaatgttatttaaatttatgtgagaatgaatttggcttcaggattaagttgtttgctagcttaattgcaatgaccattgctttccttcacattttctcttttcattttgcttcagaggcacatattgagggcaaacaaactcactgggacaaactttgtgacgttgtttttgaggagcatgaaagacatttttgtgcagaacccgggtacatatgttcatctggtatctgtccccaccagcaaagtaattcatggcctgacttgttagctgcctttctaccctttgacactccggggaatggttcctactacgaggcttgtcagatatgctttcccctgagtcagctcagagcttgaaggaagtagtgtgggaataagagtatctgctggaatcacaactgatccctgtgtcagcccagatcaggtcctgggttctgctagaccaaggagggccttctgtgagctttcttcttatccagggctccgtttacctcacctgttcaaagactcatttatagtcagttctttccattcagatgctaagccaacgcgaaaactaaaacgacctttacctaaaatgagccacagtcaaggaagctttttaaacaaagcgaggcactgttaagaaattaataattgtggagaagaaggaagggctcagtttctaaatactttccatgttagatatggtgggtgccctggttccgtctgcttggcatagggctgtctatgtcataaagatgaaatggggtttggtgggatgaggacccaacaatgcttgagagactggctgggggaacagcctccaaggcagatccattcaaccgcctcagtcatttcctatttttaatattaaaggaatatggagagaaacgggacagaacatagcgttctgggaaaccagtaatcaaacggcctaaagctaatgtttactttttggaatgttttacgaaggcattacttggagatgtaaaaaagagagagagagagcacctaataatagcctttcagtcgcagaaagagaaaagcagcacagacatgataattgaatttggtttggatggtcaaaatctgtgtgatcctacagctgtattttctaaaccatctgcttgacttttaatacatgttctacgttttgtttcctttgcccattgctgcatttgaaaatggctaattaccttacaagcctgttccattttcctttgcttctattttttttttctttccctcttacaaatgaagatgcttggccttcattacttctcagtcctcagatctctcaccttatcctcaaagcaggccaacaggggatttgggtcaaagtaaaccctgaaatagtttttgtggaaaaaaaaatgagagaaaaataaataagtccagcttcatctcccaggaactgaggttgatgtctgtttgccctctgccccacataattaaatctggtgcacaggacaggtaaaccaaaggaatggcagagttttcgtctcatttcaagtttaaatactactggacttctgcagcctggattccaaagttgtgttataattttacttataaattctgagtcctgattatgttttttataaacatgtatgtccccaagccctttttgaagtcatccaagagaagaatctctatgtgtcccattagaggttcatttgaccttggattgctataaagagaagtgccatgcccttgctataatttaatagtgctctctaatgtttatattatgagttctggacatctgggaactcctaggatgagactggaattggaaaattggccccatacatgtggatttgcatagacttgctatattaagaaaataaaaaatctattttagttggactcataaaaattagttgtttgtcttcttttctctgtgttttgacagaccagaatagtaactcttaaaatttacataaaatgttcataaagtatttttatatattttctgttatttgagctacacaattgccatgtgaattaaggcactaactttagaatcctgaggcttgggtaggtaaattgaattactcaaggaaaaaatggctaataagagatagagctggaacaaagagccattcatacattcattcactcattcacacacagtcacgcaccgcatagcaaggtttggttcaaaaatggaccgcctacatgacagtggtcccataagactatgatggagctgaaaaattcccatcaccagcctccagggccatgaggataagtttctgtcatttaagtcacccagtctacgataatttgttatgatgaatacactcacagtgaggaatgaggatcatgattcagagcgagactctgagacctgacttcattttgggcaaagcctggcccaccatgatctgtggtgggtacaggggagtggtatctctgaggttttcagcttctgtgactgctccattcccactatcacatctttctgggtcctcctaattaaccacctccttacagggagcttagctaaagttggcatctttctgtgcagtggggtggggataggcccccttctctgggctggaggggaaggcagttaatatctacctggaagcccagcagagcctggggcccacattgaaagctgtcagtacccatcagtgacctaacagaattctcactatcttcttttaatgggtagaatttgggacatcttaaaaacaaatgacatttaatctatacacaattttttaaaagcctttattttcactttttatatctgagttctcaactatcttgagggatattctctttaagggaatgcagtggcctttctgggcacacataatttcaaaagaacagcagtttcctttacttttataaatttgtttttctttaatttttataagtccgaacagttttttgcactttcagtcttaaggagaatgcacaataatgaattgtatctttgtgggaagttaaagtctgtagccaatttcttgcggtcattatttggaaaatttcctagaatttagacagtttgatgatattctcatagagccatgaagccagtttcaaacagcttttagccccattaaattgttttaaagcatgtcagttctcctgtgtctatcagatacatgaaggccggggctggcatctatcctgttcactgtcctgtgctctctgccctaggacttattcaatgtttgttgcatgaataatagaaattgttcaacactcaatatcaagccagtaaaataagaccatttcctccttaaacacgatgtctttgagaaactctgggaatcttacatcttctagatggagttactcttggaatcctggaaatggccggagagactgtcatacattttcagagaagtaagcttgacctccacaaagtgcatcaaacaaaacaaaatgaaacaaagaaaacaatagcagaaataaaaggtgtctctgtagctctttgtctgcagagatgctttgagatccaaaacagtttttctccaggaaaacagcatcaaggccaaagtcctccttttaaagccatagaggaaatgcatgattgtcagtaggagagcaaaactctttggagtgggtttagaggcagtcgcagactggggagtttgaattgacaagttttcttgaattgagtcatccaaaggtgacctgtctcatcttgtaacatgagacactcctggtctgtaaatgcaaccctgatgaatttccacaaggatcagtggagagtagaggatatattcagaatgaaatgaggtagtaagtgggttagtggatgcaacacattattctgatcttcataagtaatattctgttgatcttatttttcttatgaaaggaacttcacctctgcccatcacctcctacttctaagagagttgttttgtctgctctataaatgaggtcatggtgtatgacgaaataaccaataattcttaaatacctctgggattttctattaactagttttcctatctggcagggacagcttctgtgggaaatctcttaagttttatgggaatttatttgggatatttttatgtttaatgatgatgtggacaaacccagtatgttctcatggtttttattctcaagtaaaagaaaaacgtaatcatttgcagtttatcagatattctctttgactgagacaaaatttcatttgatattatagtacccaagagtatgcttcatttgttagctaagaacacatgctcatttgatttatcattttctgacaagtaaaaagctatatgaccttcttcagtggatgactgggaaaacaaattatggcccattcaaacaagggaatacaattcgacaatgaaaaggaacaaactattgattcacataacaacatggatgaatgtcagatgcattttgctaagtaaaagaagccaggcccaaaggtgacataatacacgattccatttatatgacattctgtaaaggcaaaaccaaagggatgaaaaacggaccaatgggtgccagggactgggtctggggaaggatttgactataaacaggcagcatgagggaatctggggggcaatggaactgttcttattatgactgtagttgtagatagctctaggaatttttcaaaacctgtaaaattgtgcaccacaaagaatgaattttactgtatatgaattaacaaaaaaagcctgtgtaaaataaatctagaattaaattaaacattatcaagaaagcagggagcattgtgtgtcaaccatttgaactagttgaagcacaccaagaaatacatagactaatgtggtgttttctgaactgtgttctgtggaacacaaaattccctaatctgtcactaggagtcgctcaaagagtattccaaatcattcttcaaggccgggtgtggtggcttacgcctgtaatcccagcacttagggaggctgaggcgggcagatcacctgaggtcaggagttcaagaccagcctggccaacacggtgaaaccccgtatctactaaaaatacaaaaactagctgggcatggtggcaggtgcttgtaatctcagctactcgggagactaaggcaggataatcgcttgaacctgagaggcggaggttgcagtgagctgagatcatgcaattgcactccagcctgggcaacaagagtgaaactcactctcaaaaagaaaaaaaaaaaaaaaaaaaaagaatcattcatcaaccaaaagattctgtgtcaaatacatttggtaaatcttgcattcataatcctgtccttttctggagagtcgtggtatatatattaagattgagagatgtcctgcagcaaaaaaagaaaagcaaacaaacataaacaataacaaaggtttaactttaatagtctttgaacttgtttgaaactgttattcatggaacatcgattaacatctaatggacagggtttgagaaatgcgaatcataacaatagggtgacattttatcacagaatcacaaaatcttagtactggagaaagcctcaggaggtcatcttgtctttgggacagacatacaacttagccatctttttatagaacatagtctatttttttaacattcagttcctagtttcagctgttggtgggttttttggtaatacattccatgcttaacaattttctccagcacagtactctttcttagattcctcctctaatgtatacctgttttctctccctctctcttccctatgtgaagctttaatgcaactcatcaccatggactgccgtaccatgagcttgtcttagagagtagtggataccatgggggtggctcacaaagaaacctctcagctctggcaactgcacctaaactacagttgatgctcagctgccatgcctgtattgcatccttgttcctgctcttggcctcacaattgatgcagggctgaccagcagattcttccaggagcaagagagaaaaacctgggaatggtagacttaagtcaccataacagtagggtttcagaaagaaggcttatagattctgcccttcctggaacttgttttgatttgtttgtttgtctcagctttcttttgcattcagtgagttaccccagtatctttaagtaaatttcatttatagctaaaggcagtttctgttacttgcatcccaaagaaccttaactacaatatcttatctgtcttccagcagtgtctagtggcaaaatggtacaaatcctggccaaattttccagattgctggagaagagtactagggatatgaggatccattccaatttacctggagattaagtacaaaattggactcatgctctgttccttcccactcacccacatcaggtccttattccctgcacctggggtccttctgtgttccctctagtttctaggggccagagggggcttttcatttaagtccgccctagaagagctttcatttttacttagctctcctagaagtagaatggtttcatctaatcatttttccttgtaattcttcttttctaactttttagacatttccaacttctaaattctctcccaggcccttcacaccacactaaatagttaaagaagtgacttagtcatgtagagatgtgtatggaattctctggtatggagaccaagaaaggccttaattttatttcgacatctggataggtgcatttaactaaactatgcatgttggaatggttccaaagcacctgagggtagttgcagtaccttcgaggtttgcagtaatgcaaagatttatatgcagcatttaccccatgctgcttcagagtgttattctttttcatcatttgatttatatacttgctcaaagtttttccaattgtaggtgcagtctctgtgtcagcctctgcacataagcagctcagaggacataacttgtctttcacggtcccgcaatgcccagcacaacgtcaggtataggaacagggttaaggaactatcttcaaaatagtcattgtgtttgcaaagactaaaacatagcagccaaaactatggcaggcgcttgaggcattgcattatcaagcatcctggtgcttcacaatccttaaaagtaaaacaaacacacactcatgtacacaagcaaacctctttagatatggcaatagctttacagggagactttaaagaaatctaagtaatttcagtgcaagttttttagctcctgctgtgaggctcagatatgccctgctgtctttggagtgttccttcttccttccaccctagccaggtggaccacactgatgtttggtgatagtgccaggtcctggcactgcatccccctctgtgcctctccatccgcttctcacctctaatcctccaccggaatgacctgaagaagtttcataatcctgccaaggatcatattttgaaacttcgtgggaaattagccgtagtgttaaatttatatttgaactttaagtacttaagtgggaagaaatacaaatagatttaaatggtcaaggaaatttggggaaaacggttcattttgtaatataaatggaacccagtcagaggatgcctttgaagcttgtggatagacctggtcagttatctacagtaccattcctgtgctatccacatgccaacctgatggcccaggaggccagggtgggagacttgcactcccaaccataagtcccctctgtgtgtgaggctgataggctttgggccattggaggatcatttttccttttctgtggtaactgtggtgccagggaggagtgatggcctgtaccttccctaaatcccaatgttttggatgcccctttcctctgctcttgcagcactgagcgctcactgccccaaactgaacttctgtgcttgttgggattcctgacttgacctcaagccctctgtgggcaaacttgtgagttctttgtatgactggtggctaccttaaataggcgttcaatgactatttgttgaatgttggtattttcaggtatgctaggctagtttcatcatttagctttatgtattatttggggttgtattattgccagtgctacccaatgaagagaaacatccttacatactttcagtgccccagaatggctgctgtctttattcttaagggttactaggggctaagtgcagagagagagagagagagacagagagagagagacagagagagagagagaacaataggtaagaagcatcccaagaagcatcccagctggtggctcatacctgaaagctgttctttcatggttcattagacttcgaccttgaactggcagcacctctttgacattgagggtgaagctgacaaaatggaaatggaaactcaccaaggtttcctatggaagtgctgtaatagagagcctgggactcccagcttcatcatttattaagatagctgttatgggctgggcgcagtggctcacgcctataatcccagcactttaggaggccaaggcgggtggatcatgaggtcaggagatcgagaccatcctggctaacacagtgaaatcccgtctctactaaaaatacaaaaaattagccgggcacagtggcgggcgcctgtagtcccagctacttgggaggctgaggcaggagaatggtgtgaacccgggaggcggagcttgcagtgagctgagattgcgccactgcactccagcctgggcaacagagcaaggctccatctcaaaaaaaaaaaaaaaaaaaaaaagatagctgttatgtattgaatgcttgctatgtgtgaggcaagaggttaattacataaccactgtcttacttcatcctaataaccctctgaaattattttcatccttcttttccaaatgagaaaattgaggctaaggaagagtgagaaacttctccaagatgacccaacattatttctctgtcccagagcagagctaggatgaactccgacctgcagcaagtcctggaataacatcctttcttttgacaatgtttcactataatgttgaccaaaaaaaaaaaaaaaaaaaaaagatcccagccagggccactgtctgtgtgggttttctccaggtattccagtttccccccacatcccaaagctgtgcatgttaggtgaatcggtatgtctgcactgtcccggtgtgagtgagtgtgggtgtgtatgggtatgccctgtgatggatggcattctgcacagggctggttcccatctggtaccctgagcactcatgaccctgaactcaactgagcagactggaaaaaatgaataagtgaatgagtacaaattattgcaaaataaacgttcataaagcatacaataatcgtatagacacatgacaataaatgatgcagtacaaaagctctcggaggcccaccgtattcgtgattgtttctgaactgcatgcttataggaggggctccttacaatttttgcttggcagacatgaatttttttatctgacccaccaccactacgtcactgtcacttactgattcataaaaaattgggtaaatcattatcttgtttttattaatctttcttaaatgtatgtgtagctcacatttatttcagtgtttaatattaaaactgttttggtctttattaagaagtttgggctgggcgtggtggctcatgcctgtaaccccagccgaggccgaggggggcagatcacgaggtcaggagatcgagaccatcctggctaatatggtgaaaccccatgtctactaaaaatacaacaaaattagccaggcgtgatggcgggcgcctgtagtcccagctactcagaaggctgaggcaggagaatgacatgaacccaggaggcagagcttgcagtgagccaagatcgcgccactgcactccagcctgcgcaacagagcgagactccgtctcaaaattaattaattaattaattaaaagaagttcggtgtttttgtgaccagaaatttgccaagggaacgtcactcttgtttatatcaattagcttatggtcacattggttcctttatgtgattttacttaaagtcacagcctccaagaacttaccagtgacatcaagtgaggattccctgtacagactttaacctctaacccatatacctttcttggcaatggtggctgcttataagttccatggcatgggcaagttaacctctctaagcctcagtttactcaaaagaaatttgggaatggcaatgcctacctcataggtttattatgaggtttaaaccagatgacacagatgaaagtagacatatgatcatggcacgtggaaggcattacataaatttttgtctcctctttagagctgaacatgcattaggcattcagaaaaccaacagagtgatggatatgctggcagaaagacagaggtggcatgactgtccctgatcactgtggagctggcatgggtctggagatgacttctcttgacacttggggcacatgagggtcacaagtgtttagcacctgctctggagtggtttcatgatgtaccatgactctatagccatcactccacacctgcctctcccactcacaagtctgctattcgtgcagaatggacatctatgtgtaagcaaacagacatgtgtttgtgtgtacaaaacacattttcccatcattgttgccaatgtgcgctcactgcagacacatagtagctttgatgccactgaacatttaccttccactaagcatgcatttcacagaggcgaagtaggggctgaatcttaggacagtgttcaagttctagctctgactactctgctactgacctgctgtataatatatccataatttttaaaaaaaggaattcaagttcaagcagattaaaatcctgatttcacttttatctttcccctggggactatgaatgagtagatggggcagttggcccagttttgctcctggaatagcacctaacacatagtggtacccagtgcatatttgtgcagcgaatatgaggatgacagtgatggcgttggaattatctttctaaacatcctcctgcaggcaggcccctagttcaccttgacagcctcacatctcactcagtcactagcggtttctacagaagcccacgtgccattttgattactgacctctgcatgtgctgttctttcttcctcagttgctctcaacactatccacttaacaaagacctgtttattcttaaaggccaagtataaacaggacctcctttgtaaaacttccccagttcttccttggtagaataagctgcatttcttctgctcctgaggtactttgtacctgtctctcttctagtacttggttctgttcctaatgatgttgtgaagatcttgtgtgcatctctccctcttgaccatcacctcctagagggcagggagctttattatttttccagtcctagagcaatacctatggaaaccatttgttgaatgactaaatgagaaagagatggctacagagaggcaatgcattagatcaaaaatgtaaaaaaatagggaatattgtataagagaagatacagaacaaactacgaaagtcaaatgtctgtctttattggcattctttgatcacagaatctgatgaaaagaacacatctcctaaagaatccttttttctctgtatacaacaccaccaaacagataacatttggccttggaaaggcaaattacaggccaggcacaaaagcagctatagctttatcatttagatgcaccctaaaaagaggagagtcaaggagaaggaaattagatcttgagcatttctctagttctgttgtcaaaaaaggaaaaggtaaataggaaatatctgagaagaatggcaaagagatcccaataaaggaactaactttttttttttttttttgcttttagttttgggatacatgtgcagaacgtgcaggtttgttacataggtatacatgtgccatggtggtttgctgggcctatcaacccatcatctaggttttaagcccaacatgcattaggtatttgtcctaatggtctccctccccttgttccccaccccctgacagggagtgtgtgatgttcccctccctgtgtccatgtgttctcattgttcaactcccacttatgagtgagaacatgtggtgtttggttttctgttcctgtgttagtttgctgagaatgatggtttctagcttcatccatgtccctgcaaaggacatgaactcattcttttttatggcagcatagtattccatggtgtatatgtgccacattttctttatctagtctatcattgatggacatttgggttgaaaggaaccaacttctatttggaattttccgagcaaattagatcgataattgtaatatttgaagtttttgagttgcacaggacatggtgcttagtcccttattcgccgagcccttgccctccccagattctacaactagtaatttctacagaggccagcacctgtggtgaatgtgagctcatctgagtcctggaaaccttgggggctgctctggttcattcacactggttcaggaactcaggcttagcaatgaatcctcaggccccaacgaaaccccacttggccttaaaggagacaactggtagaccagatgtcctcacatggattcatatcaaagagaaattctgaaagacagctcaaagctaagcagatcttaatttgtccatattatctttgagatgtgactatcttcctcagcttcctggcagcttgcccagctctctgagggaaactcagttggccagagttcacctgggtttatcaggcctccaggggaatctgttttctctgtgtgcatcctttgttattctgcgggaactgggtcatcttttcaagagtggaaatgtcagaggaataaagaggctcccttgaaaagatctttgccaccacagaaaggaaacatctcagcatatcccttaaataacaacatacagtgtgacagccttgcttccgacccaaagaaagaaaagaggccgagaacactgggcaacatttacacacacccctttgctgggtggacagctggactggggctgtgtcatcccaagcactgaattaaaggagcggaaacatcaactctgtggaatctttttggatggcaaagtaggctagaaagcagacaaaggaaggctttcagcaaaagcctgattttttatattgcagcacgcttcgaacgtaaggctgctgcctggagaagcaggaatctgtgactatctgggaaaagccccatccagactgcagtctcccactcaccccagcaacagacagaaagttattgtagagggcagcgagctgtggctgcaccagtcctttcagttgttctagagagatgccacggtgtgtgaaatagatctcaccatgttaattgactgctagaaagacaacttatgcaaaagtctggctgggagaatcctaagataaggcacattattgaccacgtgtcctaggatttgggttgcatcatgagctaccaaaagactcaaccctgagtcacaaacttctatatggcaaatcccttcccaattacaaaatcattcaccatgcccccaagcttagcactaccctcaggcaaatataccatctcccaatcaatgccccctaacaagcagaactgatcatgattaagacagggcacattgatggtgtgtgctttttagggtctcggctagtgttcttttttcctcttatgaacccagataagctatgacatgcagtactggcctgcttgatccatgaaaagacttgtgtgtcgggattcttccaaaaccttggactaatcctggctctgccactcaggagcccctgcatggccttgaggaaatcactttgttggcctcagctatccctatttgtaaagcccctgacaccaggggctccactcaaaaacatccatgttcacccttctattcactgttaattacattggagataaaacagacatcaagattgcatagacagagcaaataaggggaaactaaggtatcttaacttcagtttagttctcctgagaataagggaaatgcaagatgtcacacaaaattctgcccaggcttgggaagagctgagatgtctgttatagacctttgctccctgcgtgcttgtgtcagcccaccagaacccctcctttcaaaataccctcctcattgtccattcttatcctaagttttattaatcatgaataatgtgctactacctcaataactgaccatctgtgcatcaccgtatttctcaaaccccaattcattgtaagaattagctaaagaactttttttttttttttttttttttgagatgtagtctcgctctgtcatccaggctagagtacagtggtgcgatctcggctcactgcaagctccgcctcccgggttaacgccattttcccacctcagcctcccaagtagctgggactacaggcacctgccaccacgcccggctaatttttgtatttttagtagagacagggtttcaccgtgttagccaggatggtctcgatctcctgaccttgtgatctgcctgcctcggcctcccaaagtgctgggattacaggcatgagccatcgcgcccagccgagctaaagaactttttaatggtaaagattctgggctgcagcttcaggatggggtagggtctgcacacgtccgatggttcagatgtttgggaattattgctgggcagcaggaatgtgttagagtcatatcagatcctaaaacaacttgaggggtgggaggtggaacacggcagcagtggtggtgctggtgtgattctatgaaaagtaattccatatgattctgatatgctccatctcctgcaatccctgctccctccccccactccccaccatttgagaattattggcacttgggttggatgaaaaatgccttggactaatcctagctctgccactcaggagccacacccccctactccatggccttaggaaatcactttgttggcctcagtgtccctatttgcaaagtaaaagcattggtccattcagtggttgtccaatgtcattgtgtatcagaattatcaggagagtcttaataacacatcaatgcctgggccccactcacagaggttctgacctaatttgcctggcatgaactctgatttggagtatctgtccagctccccaggggatactgctgtggggacagctctgaagttgtatgattagagtcctcacttttctggagcactccacaaatgattggcagccttccttctgatgtgtctacaagactattttgaagtccttgtgacagagttgactagctagcacttgactcaccatcttggaagttaacattaatagacaatagaagagttgctttatttgataagcaatgaagcaacaaagtgtttgtgatcggtaatttcatgtgtcaacttggctggaccaagggatgcccagatagctggttaaacataatttctgggtgtatctgtgaggatgtttccagaagagataagcatttgcattagtaggctgagtaacaagatccaccctcagcaatgtgggtaggccttatccaatcccttgaggccctggaaagaacaaaaagataaagggtggattcactctctctgcttgagctgagacacatgtcttctcccgccttcagacatcagcatttctggttcttaggctttcagactcagaccaggacttacaccattggcccctgattctcaggccttagaccgaattataccattggcttttccggttcttcagtgtgcagacagcagatttttatgggacttctaggcctccataatcacatgagccaattcctatgtctcttcttatataaataattatatatgtcctatccgttctgtttctctggaaacccctgactaatacagtgctgcataggtttttctgatccactttaatacattaaagattcatgagcagtgcagtttttcctgaagcgtttctcataggataattaagccatattctgattctaagcccactttttctcaggtggcaagtgtcaccactaggtctgttatggtttacgtatgtgtgtgtgtgtgtgtgtgtgtgtgtgcacacagcgactttcttgctatagaataaactgtctcccgagaggtggggctccatcagggcctaaatgttttacaccagggatgacttcccagtagttttctcaggttaggatactagggaagaattaccaagtacagcacttactgttggttgagtatggctttaagcactttattttttattttatttttttgagacaaggtcttgctctgtcacctaggctggagtgcagtggtgcaatcacggctcactgaagccttgaactcccgaggctcaatcgatcctcccaccttatcctcccaagcagccggaactacaggtgtgtgccaccaggcctgcctaattttcgattttttttttttttttttttttgggtagagataggatttcaccgtgttgcccaggctggtctcaaactcctggacttaagtgatcctcccacctcagcgtcccacagtgttggcattacagatgtgagccaccatacctggccaagcactttaattaataacttcagttatcctcacaacaatcctgtatgctatatattactaatattcccattttatagatgggtacaatgaaaaacagcacattgcagtaacctccaaagttacctcgtaaataacagagacatttgaactcaggcatgttggctcccgaacctgtgtcctttattactaaaaaacattgcctcccccgtaatcagtagcttaatgtttgtaataaaaactgaaaacaaatccaggctttatcactgctttccaatatcttggttactctcagctattctcaggagatgaaaatcacaaggcttcttaacaaccagttttgcccttgattttctgaagagtggaatgagatgcaccagctgtgagtgagaaccttttgtgcctgtgtacttgcaaatttatcatcacttccctgtttctgtgtgaaacctgaaccagactgtggagcagctgatctgctctctttggcccacttcacaattcatacctgtttcgaggcggctggatccgcctgcgggctacatccatcacaaggcggctgctgtggtgactcagccgggctgaaatccggttcttccggccgcatgtccctggacatctgcctgctggaaagccaagacaagcaggttcacacacctatgttcactgatgtgagctgtgctgttaccttatttttattattaattattattttgaggcagagtctctctctgtcaccgaggctggagtgcagcggtgtgatctcggctcactgcaacctccgcctcccgggttcaagcaattctcctgcttcagcctcccaggtagctgagattacaggcgctcgccaccatgcctggcattttcttttcttttttcttttttctttttcttttttgtatttatagtagagacgaggtttcaccatgttggccaggctggtttttattatttttttaattcagaaaacttcggcgttctaaggcgcaaagtgacattatttgcgcgtttcctattttatgagtttttgctccattctttgcactgtggacccaaatgcagccagcagcagcactgaggatatgataatatattactttctttttcttttttctttttgttaacggcaccatttcctatatgtcccattaacttaaaagctccatatgacagcatattatcattttataaagtgcatatttttcttgtttctttattatataagtcataaaatgtatagctggtttcttactgaaaataattttacgatgtgttcaactgagctagggaaagctggttaatggatgatggggaacatggggtcattctgtgaaagggagcagctcaaagaactttgcaccataaaagttaatgagaaaaagtcaagagttaggcgtgtgcttacgtgtaaatcttgatgaactgtgcattaatttctctcttgggtttaggcatcatttggtccagagagcagctatagaataaattcacgtactattattcagaaatttgtcacttttcctttcagatgtgagaggtttggatctgattcttagtcaatatcttcaaaagtaggtcgagaacttattagtttgggtaatagtttactgcacactctgaacagaatccactggggaagaaaaagtttgtaaacatataattaatgtggatggtccctcatagtattacatgtttattacatgtgcaatatatattacattacctataacacgtgtagttatggcatagacacaataaggtaaaagataatattttcccaattagactttatcttagggcccctgcactggaaatttccccgcattggaatgctcttccctccaagtaggaagcatggattcctccttcagtcatttcaatcataactcaaatgtcatctcctcaaagaggcccttcctaccacccatttaaagtatccactgaacattcctcatcccattaactatccatacagtcactatcgcatatccgacagttttcctgtttatttatttaatagtttattgtctgtctccaccctctagaatgtaaacttggtaagaacaagaccttgtctgtcttgtttactcctgtaacccagttccttaaagagtgagtgcctggtatacagtgggaggtcattaactgtttgctagaaggaaggaaaggaaatgggaagaagggaagaaagaagggaaaaaagagagggagggaggaagggaggaaaagaagaaggagaaagggaagaaggaaggaagaacagatggacctgagagagctgagcttaggtattagatactaacttgcataaccaggggaagccaagagacgtgatttgagttagatcttaaaagatggcaggggtgtggtttatggctggtaggaggaggagaaacagatttttctagttagaatctctgaacaaccagttatactagagagagtatgagtacgcactgggtgttgtcccaggttcagaaaagatgttataggcagtggatttagggaagtggcaggttatagggactttaaaaaatgtaactcaaggcttatgtgaaattgtaggaagcagtttgagatgaggagggggatggattaggaagtaatctgaagcaaactgaaggagagacatagtgtgatcaatgaatgccaagaagattggaagtgtctctcaatcatttgtataacaccgttttgtaaagctgattgatagatggacagaatctcagtccgggacatctgctagacatttggtggaaaacgggctctcgcctcccaggctgggaagagactgctttcatgtgggtactatggtgggatagctcattctgcccttgctatttggagggtagaaagtaccagggaagatgtggcatgggcagagttgaaaggtaaaagatggtgggaagcttggaatgaaaattgttttgttaaaagcatattgtcagaaaaatacaatttctgtgatataattattctaccctttctagctctctgtaatttactgtatgtttcttgagataggaggatagtgtctcttgatcatttgaaaaatccaggaagaaaatggaaaaggccctgaaagtttagatacgcagctcttatcatgaactgttcgaggatattgacctgcagcgtatgcagaatttgaagtagctttcaaaatcctgttagttcctttaagaatcaggggtggtggtagggatttggcattgcagtttaaagatgcatgccatcactgagtgggtttttaacaagtggtctttgacttccactatctcatattgtctcatacctccaccttccatgtggtctgtcattatggattccgctgattctcattcttcaaatccagatgtagctattagcctctaatccaggaaataggcctctctcttgtaatccagttgattctcagtgctcttctggcatctggccttctccactggattctaaattgccctgtacattgactcctctgtcccaaccattttatagctgctctcaaacgtgactctaccctggcccatcatttgctaccagaagcccaggggtccccttagaatccatgtgtgcactgatttagcccttcctctgaacttggtagtgaagatagtcatttaggccatagactcaactgactgtcaattccttcacacattttgttctcaatccagtttattttggcgacgaccatttaaagagtctcctctcttgtttcctttgtcacgctcccctggacacagaagagccttttctgtcaagaacagcaagtatcagcattgttttctgaaccagtgtagtcttatcttcatacctaccatgaaaagccaggaagagaaagaaagtaacctcttaaacgtccattatcatagtagcagtttcttttcctttatgctccaagttggaaggttgctgctttcatctcacttggattagaatgaaattatttacattagctatgctgcatctccaaaattagttaatggtaaacgtcacttgtgtcacaaaaaattaattttgtgttcttctgaagttatcttcctggctaaccattgtgcagggtgccactggcattggctctgggagcggggaggggaagccatgctgccttccacactggggccttggcaggttgcatggtggtgcgcacaaggaaactgaaccgcatctgcatggctcactgcttatcaggagcgcacactggctgccatgctgtagggcagcgaaggaaaacaaaacaacaataaagggaggcctttgtcatggattaaaagggtttagaaacatctgagccatgcagttttcgaacactaacactgccaatgacttcatgacaaaaatgctagaaaatgtgctaactgggttagatagagttggtggggccgccaacactcatgcttttgttaatggcctcttatctgtgtgagtgtgtggatgcacagttcacagataaagttaccttttgtagaatgagaggaatgaggttaatgacgttacagtattgctgcttgtgattgcagctaagggtgtccctaaagattgtcattcccggacaaatttttcattttcaagtgggttcatctcatacgtctcaacttcctccattagaaaattcatagtgggaactaatggaagggtcctatctttatgcataagtacaataggtggttacctaaacgactgcttcagggatcagcaaagatctcctcccatgcattcagttctacacctactgattcattcctttatgttaattgatgccccattccccaaatttttcctttaaaaatataatgatgtggttttcttctttaatttggctactcaattatctaagtgtctttggatggatttatttcaaaatagtctgagatatcaatacctgtctgccactggttgataaaatcattagacaggcaagcagtaaaatataaaaaatttaaacaacactatcaaccaacttgatctaattaacatttatagaaaactccccccaacgactgcagaataaacattcttttcaagtgcatatgaacatttaccaaactataccatattttgggccataagacaattctcaatacatttaaaagaattcaagtcttataaagtacatttcgtaatgacaatggaatttaattagaaatcattagtagaaatatctctagaaaatccataaatattggaaattaaatagtgtacctctaagtaatataatgggtcaaagggcaaatctaaagggaaagtagaaagtattttgcactgaatgaaattaatatataatgcattgaaatttgtgggatgcactaaagcagtgcttaaaagaaaatttatagcactaagtgccatgttagaaaaaaagaaacgtctcaaatgaatgactccagcttcatctttaaaaaaaactagaaaaagagcacattaaactcgaagcaaatagaagaaaggaaataataaaaatcaaagcagaaataaagaagcagaaaacaggccaggcgcggtggctcatgcctgtaatcccagcactttgggaggcctaggcgggtggatcacttgagttcggaagttcaagaccagcctggccaacatgagaagccccgtctctactacaaatacaaaaattagccggctgtggtggctactgtggtgggacctgtagtcacagctactcaagaggctgatgtatgagaatcacttgaacctgagaagtcaaggttgcagtgagctgacgttgcaccactgcactccagcctgggcaatagagtgagactccatcttaaagaagataaaagtagaaaacagaaaaaaacaatatagaaaaattaaggaaccctgaagctgtttctttgaatggataaatgaaattgagaaagttctagccaggtcgatcagaaaaaaagagaaatgacacaaatgatcaatagtgtgaatgagtagtatgaatgaaagaattatataaatacagaatctacatatattataaagataaactactttatgacaataaacttgacaacttagataaactggacaaattccttgaaagataaaaactaccaaaactcattcaagaaataaaagtaggtaacttgactagccaaaaatctgttaaataaatgtttagttaaaaaccatctccccaaaagattcattctccaggtgactttactggtaaatttaccagacatttaagaaataacatcaattctattcaagtgcttccggaaaattgaagagaggggactactctccaatgcagtctacaagacagcattaccctaataccaaaatcagacacacaagaaaagaaaactgcagaccactgtctctgatagacataagtgcaaaaaaatcctaagtaaagttttagcaaattgaacccgacaatgtataaatagaatcgtgatcaagttgtgtttaatcccaggaatacaagataagtttaacattcaaatattgtcatttaccattttgagaaactgaaatagtgttgcctcagtagacaccaaaaaacatttgacaaaatctaatgtccattcctgataaaaactctcagcaaactaggaataaaagatagctttttcatcctgaggaaggacatctacaaaaaaacgtacagataacattatatttaatggtgaaagacttaatgttttcaaaatcaggataagggtaaggatgtctgtttcaccacctctattcaacattgtaaaatgtaatactttttcttactatatacaaggcaatagaaaagaaatataaccatccgtattgagaaggaaaaagtaaaactatttttattcacagatggtatcactgtttaagtagaaaatacttagggttttcttcttacaatggaacctacaaaatgttactagaattaatacgtgggtttaacaagattgtgggatccaaaatcaatatacaaaaattaattgcatatgatagcaatgagcaatctgaaaatgaaatttaaaatgaatgacatcaatttaaataacatccaaaaaaattaaatacttagggataaatatggcaaaacatggaaaatatctatctgtacactgaaagctacaaaacagtgtttagagaaattaaagaagacttaactatatagagtccaaagactcaacagtgttaagatgtatactctccacaaattgatctatagattcactgcaattccaaggaaaattaccttcaatttttttttggataaattgacaactgattgtaagattaatatgtaaatataaagaaccacgaataggccggttgtggtggctcacacctgtaatcccaacactttgggaggccgagatgggcagatcacgaggtcaggagatcgagaccatcctggctaacacggtgaaaccacgtctcttctaaaaaatcgacaaaaaaaattagccgggcgtggtggcggccacctgtagtcccagctactcgggaggctgaggcaggagaatggcgtgaacacgggaagcagagcttgcagtgagctgagatcccgccactgcactccagcctgggtgacagagagagactctgtctcaaaaaaaaaaaaaaaaaagaaccacgaatatccaaaacatctttaataaagaataacaaatttagaagaatagcacaatccaattttgagattattataaagctatagtaatcaagactgtgatattggcataattataggcgcacaaatcaatgaaaccaaaacagacatatatacatatgaccagctgatttttcacaaaagcacaaaggcaattcagtggaaaaaggatagtttttcaacacatggtgttggaaaaactggtactagaacacatgcaaaacaaaataaaaacaaaaaacttcatactttcaccatatacacagattaacctaaaatggattatagacttaagtgtaaaacataaaactataaaagttctacaacataaaataggagaaaacctttgtgacctgggattgagaaagttttcttagatatgataccaaaatacaatcaataaaagaacaaattgacaaattgaacttcatcacaatgaaaaagttctggcctttgaaagagactggtaagagaataaaaagacaatccacagactgagagaaaatatttgcaaagcaaatatctcgtaaaggacttgtatccagaataaactcaatgataagaaaacaactatttgaaaaaatgggcaatagatttaaacagacacttcaccagagaagatacatggatggcaaataagcacaggaagtgatgctcaacagcattagtcattgggaagatacaaattaaagccacaagataacacttaaaacccaaatttacaaaaacttaaccaaaagaattgaagaattctctgtgaaaagtgttttgtgctgtttaagcacttcagcaaaacagaagaccaagcagatgaaatggcaacaacactacaaaagattaaaagggaacttgaatacgtagggaatatattgagaaacagaacacctacattacttgatgtaataaacaattatcggccaggcgcagtggctcacgcctgtaatcccaacactttgggaggctgaggtgggcagatcacgaggtcaggagatcgagaccatcctggttaacacggtgaaaccccgtctctactaaaaacacaaaaaattagccgggcgtggtgggcgcctgtagtcccagctactcgggaggctgaggcaggagaatggcatgaacccgggaggcggagcttgcagtgagccaagatagcgccactgcactccagcctgggcgacagagcgagactccgtctcaaaaataataataataaataaaataaaataaaataaataattatcagcaagtaacagaataggtgcacctagaactgtcttaaagaaaagacttcagaattaactgaatatcgaggagaaaaaaaataataatgaaggcaatagagagagaattcttgataggaagggctaacaaagatgattcaacaagaggataaacagcttccttaaagtagaaaaatgtaataaatgagtaacaagtatattatgcttcaattgttataaagttacttttgtttattaggtatccatttgtgtgttacatgcaagagaggtgtctggaaggaacggcacgaactagtcaactatttctgggtggttgaatttgaggtcttttgttgatttctttattataattttcagtgttgtttactttcaaaaaaaataggcaagcgtaatttttttaaataatggtaatttatattatttaatttctaaggggaattaaagtagtggaaaatttttaaataatttttgtttttcagtctgtggattgtctttttattgtcttaccagtctctttcaattttaaaataattattaacaatgactcaatatatttaatttttatatgatgtatttgaattcaaattaagcaaaatagtttatcttttttatttctggcagattcataatacgatattatggggttatttttattatttggggttaaaacttacactgatttcccctaaagccttataattatgttactttacattgtatttattgttagtccagttggcttttaatatactcctgtgtctgtaaagacatgtagtcagttcagttattccaataaaggacaacattggcagagataatcaaataggaccgtaatacagtccaatcacaagatagacaatggggaaacggagctgggccagaggactgaccccggttgttgaggtttgtggataattaagaccgaggggatatcaccaccctgaaaactataaaattaaaccaaagttagatgagtagatcaaagatcagtgattctgtcctcggctaagcaaaatagcacccaagcctataatatatatctgattagtgaaaattaactaaagacatgacagaagagacataactatatatggttatcttgtggcagttgtgtgtggagctggcttctccccttagttgcgctcttctccttggtgctttgtaaacattcaggatcttagttaaatagtttaggcccccagaaactaaacaaaaaggatggaacacctggctttgaagcttccaaatgcagattgatatagacatttaatatgacaattttaaatttaatgggaaagaataaatgagtaggaaagcaaattactcagtcacttgaatttctttcaagagtttatgttagacaaaggcagagtggaaatcctaggtcataaagatatgacgcttttggggttagtaagagatcacggcagtgctaaagctgattaattcactcaatccctcccatatgtctctatttatccatatgtatgtctacattgacatctacagatgctccccagcttacaatgggtttacatcccaatagacctatcataagtcaaacatatcgtaagttaaaaaatgcatttactatcccaataaaacgactgtaaagttaaaaaatcataagttgaactatcctaagtcagggactgtgtatatctacctctgtatctgtatataaacagatacagagtgttgattttgtggaaaagattttgtctcattggctgcttggcaccatatcgataaaacaatcgattaatggaatatttcactgttcagccggtggttgaagacacaggagagactcagagaaacacaaatacagtcagacagacagacagaattgcctatttatctttctcaaacagcccaaaatgtcttgataaacctagcagctccattcagtttgggattaaaacagctggagcaagaaaagtgttatgttgaagaaatcctgcaaatatcgtccagagtgaccatagaaagcaaaagtagacctcagaaaccacggccacaaggcccccaggaagaagcatcactggcacagataggatgcagaagcgctccagcgggatctcagtctcctgctaagattgccacacagcctggcttcttctggccatactcaggtccttgcccacacaaaagtgaaagtattgtgataccaactgtatttaatgaagaatcataaagatttgaataaaactggagatgaaatggatagtttgcttttcaatcttgaaagactacatcacttagaaaacatgattacctccaagttaatatttagaaccaagatatggcattgactttgagatgtgaaaaagaagagggggctttgctttacattttgagaaatctccttgtgagacatgggttgtcctcagatcacactagggaactgtgaaggaactgagagagagaaccaagtaacccacggcccctgctatagacttaccactcatttccacaggcaggtagcattttcaatattggcagcttggccactgttctcctgatgtggtctacttttctggagattgtatctattgtttcaagccacttcaggatcacattaagctaacatctagttttcatttccaacaaagccagtcttacaggtaaacctaatgcaaggtacaatgttaccatctgggagtagtcttctcatttctgaatgatgcctgagattctaccatcagagcactatcttttttatacagggcttggtctctagtaaaattcaaatattcctggaaagggtctctttttaaatgttgtgtttttaaaaagtgaatctaatgatgtgttccagcacttaaaattcttcagttgctcccaatcctccataaactctaaaatcttacgcaagatatatgaggctctttatgttcaggacccatgcctgcatctttacgcttattcaacagactttacttctgtctaatacctcactctccagtcattttgcactgtcagagttttcctcagcacaccatgccattccagtcctcttgtttcctcacttctggtctctgcctggaattctctcgttcttccttgcctatcctgcaaacccttgactcaatagttgcctcgtgctctcatctttgtaaacttttctctgattcatttaggaatatttatgaactcttttctctacttttgtcctttgtgtgttaccttcccaatttttgtccatgtcatataccgcatatgctattatactcattatttttcctatgatgattcactgttcatcaaaataaattccatgaaaacaaaataatgttgttcattgaacaattaatttcaaacatgaatataaatgaaatgtaagttataatcaaattgatctgcaaaaatatgtaccaaaattaagttaatcatcgagtaaacttgtttctctttggcagcaataaaggatatttgatttcatatgactagttgaaggtgaaaatgagattcttagtgagtaagataactctaggctttacttttatgttaagcacatttcaactcccatgtatataattagaaagaagaaaaatgtttaattactactaattgtgtggatgggggttcttagttgcaaacaacagaattcaatgcggctacctcaagcagccaagaaatctatttgagggttttgagtaactcacaaagttcattaggataagaaagccagattttgaggctgcacagttgtaatgcccaattacactaaggtatcccttgagaaacatgagcactgctgatgggcaaccatgactgttagcactgaacactattgttccagaaagaacaacattttttgccctcgtgcttgacagaaggtccatacgcctgcccagccacttcttcatgatggttacttctgaatcaagcctctcatgggtgttatagttggctgaagccaagtcaatcaggtacaccctagttgcaaggcattctagcaatatgaattcttcatagattttacctatgtaggaaatttaaaatgttagaatggtacacaaaaatgttggcagccataaattttgaatgttttatacactggtcaaatatttccaggagacttttgtttcaagaagctattcaaagtgatcttcagtgtctatttttgtatggaaggtatcaaattacttggtcatgactgtgaactgctggggaacgtgttgtttatctttctctcattggactaggaaaatacttatgaaggtctttcctcaggtctttcaagggtttcttaacaaggttgaacacattttcagcaaatctgacagatgagtacataaccagctggttcagaccatggaaagaatccaactcacctccctgggggtgtataccctacagctccaggttagaatttccatgtttgctttgacttacaggtggagtactgaagtgagactgccttgtaagaataggcaaaagatgctaatttgcaaagtcattttcagtcatgcatacaagccacagattgaagctttcattcaaaaacacttgaagttttcactgactcagtaaggtgagtgggaaattttctttgtcaatgagcatcaatatgagacaatatgttttctcagaccttgctcatctccttgcctaactgagaaaaaaattctagaggtctgtacgttgcccttaactgattaacaattttaacacatttgttaagtgttcctcttaaaatttcatgactatcccaagtgaccaaggtttccctatgtattcaaaacagaacagattttgcttctgggacacatcgttaatacctggaacaagtccttggtttgaaccaaactggcacccctcatgtttctcatctgttttatttatcctatctatgttaattgttttgtccatttagttttcactaaattattaatatcatctagtttcaatttctcctaattttaacttcttatataaccatagtacacttgtcaaaactaagttgttccattgccatgagttaaactctcagctttatttggatttcaccagttttgggatgccacgttgcagttaggcatcatgttttctctggcctgtgagtttcttagccatcctttgttttcacgatattgacttgtcatgtatatttgtagaatgtgcaccaatttgggtttgttcgatgtttttctcatgattcaatcagatctgtgagtttttggaaagaatatcacaggctgggcgcggtggctcattcctgtaatcccagcactttgggaggccaaggtgggcagatcacgaagtcaaaagattgagaccatcctggccaaaatggtgaaaccccgtctctactaaaaatacaaaaattacctgggcatggtggcgtgtgcctgtagtcccagctactcgggaggccgaggcaggagaattgcttgaacctgggaagcagaggtcacaggtcacaaaagactccatctcacaaaaaaaaaaaaaaaaaaaaaaaaaaggaaagaatatcacagagtgaagtggcttttaagatcaggaagtacatgatatcaacatgtcttatcactggtgaagttaaacttgatcaattgggtaaggtagtatttgccaggtttctgtattgaaaagttactatcttcccatttcccaatatctattctttgaaagcaagttactaaaactagcctactacttttagaagggggtgtatcagcatatattatttggcaatttctatagagatgatttgtctcttttcccctatttatttatttattagatcattatttatatcaatatgacattatgtatatttattttatgctttggattgtaatccaatacaatattatttcttttgttactcaaattgttccagctttggcaattaggagctctttccggttggctcctatgacatactccaccatttttttggtagcacttccttatttttggcactagatcatgctctaagctcatcttgtattttccttgacccagctctagaatcagctatttcaccaaggagccctggttccttttattggagactggtgtgagtacttagaaattcaaatatgagtgttgggtgcattaacatattttgaaaacacatgaacaaaattatgcaaaaaagtcttcttagatttgtattattatcagacaaacaccaaaagattaaccaagttcaaagcaattttgaatcctcagtttgcaatgaatagtatcctcttggttgtacttgggataataatcgctactttatgttttctatgatgaattgttttatttcttcaagtccaagggttaatgggaaggaagggaaaagaatgtgagacctctgggtctcagggggaagggaagtggagtaagcaaggcccacggaggaaaggtatactctgtggggagagcggggttgccacctgcagccttcatgcatatttcatttctttcgtaagggtggctcttatcactgctgtgggaatatttgcaggcaattctagttttgtccatgtcaacgaatcaattcaagttttggtttttagtctgcattaaatcatcagtcatttttcattaggatcagatggttaagacaaagaattactttactattaaagagcaaattattcttattttagctctgccatgggtgtcttctttgtcttgaacaagtctttcaatcatccagcattcccactgccataataacataatgcatttattggcctgtgacttgcatagtatctaagaggacagacaaagcaggcactgcaacttccaaggtgtgcgatcttgggcaagttcctttcctttacctataaaaagataatgatagtaataaataacacctagctcgtagaattgttgtagggattaaattacaggatgtttataaacacttaatataataactgtcatataataactacttaataaaagctgctgtcatagctgttattattcgctaaatgttttcgtttcctattttagggagctgtgttatataatagagtgtgttaagtatttgatcttctcccatttaattcctgctctttgctgcttcttaaggagaggttgggctgtgcttactccttcctgggctaatgatatagatgctcagggcttcctgggggactcttggtggcctctgtctgtgcttgctgacaacagccaaaagacaagtgtgttgactctccaataaatcaaacctcaacctgaattttatgcagagaatgtcagctgacccttcatggtaagtcaccttacatccttcaaaatatcacgtgactctttaaaaatgcagcccaccctcttataacagtgattgtccagggacccgtgatacgtgagggttttctagctgatcattttgagctgcggaagttctcatgcttgcgataggagaggctatctggtttttcttctgttgcatgaataataactctctatgataataaagaaaaagaagtatctgttgcttttttcccattctatcttgaaagtttatgggttatttttgtctatatatgtgttttgtttgtgaatatgcatgcatgtgtgtgtgtgtgagtgtgtatttcaacattttatggtccactgttaaaaccttccccccctttttttttgccttaaggacattggctaatattgcagcccccaagtagtatgggtttgaggatagagatctgcaatgttcccaggtaggtctgctgttaacacaggttaaatatgtcttgaatcctgagagcaaactaattcacagaatagctacacaatccacattccatctgactgtgttttatttaaaatgttgcattcaaagaaacaactactctctggccgaggcaatgtcaaataaatgatatgcttagacttgccacttgtggacagaccattttggtattgtgcaagcttgaccatatagagaggaaacaagcactttaaatgcatccttcacctctaggagggaactagtaaatgtcctttctgaaaataaagaagaaatactattctatctcccaggttttctctttaatttagacttacgtcagattccaggaggaaattgctggttgtcttctaggtttctcatgaaaagaaatgtttccaaagtccacttctgaactgtctttatgcagggaaaactaatctatgatgttagaggacagggcactggttaacctttgggagcattgactagaacagggcagcaggggacttctgtggtactgaaatgatttgcttctagatatgggtgctggctacacaggagtgtccattttatgaaaatgtatccagttgtgctctaatggtttgtgtacttcactataagtgtgtcatgctttatcagaaagttttcttttgtggtatatccagacaatgaattcagcactaagaaaaatgaatttttcgtttttctctatagtaaaacgatcagcagttgccagggattagtgaggaggaagggatgaatgagcagagcacaaaggacttttcgggcagtgaagagactctgtacgataccataatggtggatacatgtcattatacatttgtctagacccacagatgtagagcaccatctgtattagtcagtttgcattgctataatggaatatctgagactgggtaatttataaagaaaagaggaatattttggctcccggttctgcaggctgtacaggacacatgatgctggcatttgctcctgggggagcctcaggaagcttccaatcatggcagaaggtgagtggagccagcatatcacatggcaagcgcaggggcaggaaagctgttttaaataaccagatcttgcacgaactcatagaatgagaactcactcattaccatgaggacagcaccaagcaattcatgagggatccactcccatgattgaaacacctcccactaggcccacctccaacactggtggccacatttcatcgtgagatttggagggaacagaatatccaaaccatataaatggtgggtacttgtcattatacatttgtctgaacccacagaatgtacagcaccaagagcaaaccctaatgtaaactatggcatctggctgataagcatgtgtcaatgtagattcatatatgtaccattttggtggtatattgatagtggtggaggctgggcatgtgggggcagagagtatataggaaatctctatactgtctactcaagtttgttgttaaatttaaaccactctaaaatataaaatatatgcatatgtgtattttttaatcacacacacacttttaaattttttaattctttatattaaaaaataaaatagatatgcatctatatatattttttaatcacacacatacttttaaacaggaacctttcttttttactttaaatcgaattgcctacttctcatttgaagggtgaaggctgatgggaagggaagatagcagagggctcttatagccaatcctttcctctttggggagggctgacctattaaaggggaacagatgtcttctaaaataagaatgattttactatggaattatttactaataatcattattcagagcagcaaacaaaagattaagttaagctgatacatcaccgtatgaattattggttgtagaagcccccagacttctgcttggtttataattatataacatggtttaaaattacctgtaagagaaaatggacaggaaaattaccacatagccacataatattgagttcttatgagtagtaaatgcctagaaactgtaaggttgtttttatcagctgagcatatggggacaatgtagtggatgaatttcactgtgggtaaatcttgatggactatgaaccattggctcttcatttatatgtaaaactacccagtgtgttccagtcatcgtacaaggtactgaggtccctgccccccagatctcacagtccagcggggaagatcagcaggaaagcacatgctatgacagtgtgtcagggagctcaagggggccccaacaccccaagggggccctaagctgaaagagaggtctcaagaggcctcttgggggtgatggcacctaagataggccttggcacaagagatggatctgagggtaactgtagattattccttcaaaacagcagatcaaggctgaggtgagaggattgcttgagcgcaggagtttaaggctgcagtgagctgtgatccggctgccggagcaacagagctagaccctgtctcaaaaacaaaaaatgaaaaacaaaacaaacaaacaaacaaaaaaatcccacagatcagacagcttcctatgcatacattttggagcacataaagaagatggttgaggagaaagtagaaatgtcctcaaaaccattaggtatttctatgtgtcctgtgtatagttctgcacagttcaagaaaaatatagcaaacttggagaacagagaagaataattcaagcaataacatatcaacttccatttgcacacactgcctattacaacgtaaaagccagtcttacagactgccatctgttgatagctgacccctcctcaccattcctccctccaccaccctctactccactccagtcaccagcaacagctccttcaataactgatggataaagacctgctaactgcaactttgtttaagcaacattctagaagaagacacccacacatcagggtcccagtagcaagactaaagttgatctatgtggcaaataaaggctgaaatctgaattttcaggattgagaatgtatgtctctatgaatagagcttatgtctgatagtgttgtggtaaagaaaaagtgggactcttcttaatctgaaacaatgaaagttgaaaggagggtatctggtgaaattgtataaaatcatgcgaaacagagttggcctgtctttccatgttgcacaacagcagggggcaccatgcatcattgacattgtgatcagcaccccctggagttctgcagtgtggcagccctggagcaaatctcacaatcccagaactatgggacaacggaggaagctgggaagatatacatttaagataaataaaataatttctacctaatatgactgatgagaacattttagactttaatttctgaaaaaaaatatgcaggctaaatatataaatggcaacaaaatgaataatgatagtattggattatagcccaaagaataaaatcagtatccacaagtccacactgttgacaataaatgattgaacagataaataactagggaagaagagactaatcttttttgcagaagaattccaaatactgtaggttgatactttctcctccagtgagggttacataattcctctccccctggagaagtatgggatggatttgcttccaaaaaatagagcatgagaaacaaaaagatagcaactttatagtggagaaacttggcaggcacaatctttaataaatgatcaagatttatatcaccagcaataagtcatgttaatatcatgtcccctcttatatgatgtaatgagaaggacatctcactctacgatactctttctaagactcacaatcctagtctacaaatgagtgaaaatgaatagaaaattaactgagcaattaactgttgagaaaaatatcagacaaacccaaattgagggtcattctgcaaaatacctgaccagtactcttcaaaactgccaaggtcatgaaaaacaaagcaagtctgaggcagtcacagaccagaggagactaagatgacatggcaactaaatgcaatgtggtatccccaaaagggatcctagaacagaaaaaggacattgctacaaaaattggggaaatccaaataaagtctggcatttggttaataattttttagtaatgttaatttcatggttttaaaaaatgtactatggtggctgggcacggtggctcactcctgtaatcccaacactttgggaggccgaggcgggcggatcacctggggtcaggagttcgagaccagcctggccaacatggtgaaaccccatctttacaaaaaatacaaaaattagccgggtgttgaagcgggcagctgtaatcccagttacttgggaggctgaggcaagagaattgcttgaacccaggaggtggagattgcagtgagccaagattgcaccattgcactccagcctaggcgaccagagcaaaactctgtctcaaaacaaaacaaacaaaaaaaattactatggtaacataagatgttaaaattaagggcatatgagtgatggttatatgggaacactttactatcttacaacttttctgttaatctaaaattatgccaaaataaaaagtgtattatatttagttaggtcagtaaatgatagatccataatgtaacatcatgagaaggcagagatatttgatgcaaatcttttacctttgggttattcttctagggttaaaactcagcccagtctgccacttatcaattgtatgatcttgcacaatttatactctttctctgatttcagtttccatgtctttaaaaacttggataccactatctgctttacaaaattattaagtgaattaaatgagataaggtatttaaaatgcttagcacagtgtttgacacacagtagacacttatcaggcaatgctttccttcttttctcataatacctatcttagattatcaccatcagacagggtgttaggtttttgtatcatgaaattaaccccaaaaagaagatttttgtagaagaatttttattgacataatagttgtacacactttaagggtacaagtgatattttgatacctgtaaacaatgtgtaataatcaaatcagaaggatattttaactatgagaaggaaagttggccaggtgtggtggctcacgcctgtaatcccagcactttggggggccaaggagggcggatcacctgagttcaggagttcaagaccagcctgaccaacatggcgaaaccctgtctgtactaaaaaataaaaaaattacctggagtggtggtgggcgcctgtaatcccagctactcaggaggctgacgcagggggaatcacttgaacctgagaggcggaggttgcagtgagctgagatcgtaccactgcactgtagcctgggtggcagagggagactccgtctcaaaaaaaaaaaaaaaaaagaaggaaagtcaacacaaagaagtttagtcctgtaagaagctgctttagtgtgatagaatttcctttaaaaatgagtggaaatgaatagaaaaccaactgagcaattaactgtggagagcatgtaggtgaaaatagaattagttaaagaaggctttgtggagtaagtgagattgggatagaaaaatgaggaatgtgttggtgtaggtttgggggagaatcacattggaggacggagaggtgagttccttctggcgcaagagttcaggtgtttgggccaatgacccatgggcagaattgcataaagttcaatgtagccttagtttcctttttttctttcagaagggctctccttattcattcttgtttggcccttctctctccccttagctccccgattcctcacaccacttcccagctgttaaggaccacaccttgtgccataatatctaggcctgctctcaaaagccactgtgcactcaaagcttcccagatctatggccatttatcacaagctttcagccaggtgccccattcccacaggtcttttctagactttagaaatgacctttcattgcaaatgtctgaaagtggtttatgaggctttttttttttttttttgagaagtagtttctagttttgctcttgccccccagactggagtgcaatggcacgatctgggctcactgcctcccggattcaagcaattctcctgcctcagcctcccgagtagatggattacaggcacgtgccaccatgcctggctaatttttgtattgttagtagagacggggtttcactatgttagccaggctggtctcgaactcctgacctcaagtgatccgcccacctcagcctcccaacgtgctaggattacaagcatgagccactacacccggcagaagctttcctattgcgagaactttgatatgttaagctcttttatgtcaatgcatgattgaagtagaaattttagtcactgtggtacagtcaaaagaaaaaaaaattggggtcagggtcaaaatttgtatatatatagcttggagcttggctgaagtctgggtcagagcgtgagaaagaaataaatatggtagatgaggcaggagaagccaggaagtgaagaagatgggaagggtagaatgttgctggaaacaaacaaacaaaagaactagtgagtgtagttcacctcaactaggctgagctttctcaacctcagcgctattgacattttgggctggataatgcttcgttgcggaaagctgtcccgtgcattgtagggggtttctcggttatctctgacctccaccctctagacgctagtagcaccccctggttgtgacgactaaaaatgtgtccagatattaccaaatgtccctagggggcacaactacgcttgatttagaaccactgggttagagtgtcaggctgttgtcattgcagatgcttgtctgtttgttctataggtaacctggatttaatttctgacagaatatcctgctcagggcaagtgtgtctctaagaccatacagtcgtggttggttgatcagatttctgtttttccaggtaggtttcatagacaaagagcagtgcagtcttttatctggagtctgtaacttttctgcaataatgagaagtagtcacagtgcctccccttattttttttcagtaggaggaataactttgtgggtcaaggtgagctttatgtggaacaggagacacgttctggcaaagcagattttcatgtacagtgtggggagtttcctgggggctgttctataggtcttcaaggagggctttgaaggaacacattccctttgcaagtaataagcaggtctactattgcatgattgatacatgttggggaaagcatcaccctttcttagtggggtcatgatgctctcatgaatgacaaactcccttctgccaggggaacaggacagaatgtaggaaggggaggcatggccacagtgtcctctgtgggctttcccttgtagggcgtcgtctcttgtcttcctccactcccatcaatattcaggaaacttgtatttgaagtggagtaggaaaaagtagtatgacattttgagattgtcactttattctaacacttagcaggtgacagctgtggtgacacttcttccccacccaagcccctattaacccctgtccaccttttattcttttcctcttcctcctccatcccttttctttaatatattattaggtcatttatttaagaatagttattgagtgtccattgtgtccagagcctgtcagacaaaggaccagctagtatctagagactttgtgctgccctcaggccaccagatgggacaggctacctgggcaggtggcagcaataggaataggaagtgtctgggagaggcgagcaggatgtgcagaagaggctggcgactggacatggcagaagttccagttttccaagtctgaactgggggtcaggaatctagtcttctgctgggaaaagaaccagagacgaacactggactaaatggggccagtcttcagtaggtgaaaccccagctccttgctgaaggtggggacactctgacaagacagaaacaccccagctgtcctcgccacagctcaccgtccatcaaggtgattggtacggagctattttagctcctgacattccagtggtccaggaagaggactggcctcaagccttcaggagttcaacattcaagtatatcctcatcctaaaggtggaaaaggataggggtttcgcacaaaatcggaaacaggagaatgctgatggcctgtgatcctcagaactctgtaattcacttgcgtcactacaaaaaagggcttggattatccagagagtgtgtgtgtgtgcatgcgcgcatgtgtgtgttcatgcgtctgtgtgtgtgtgtgtgtggaggactgggttgatttctcttctgatatcacataaagtctcacaacataccctttctctgtaacaagttttattaacctggggtccatggctggaagtctgtgaatctctgaaattataagcactagtgaatttttttctaagcaaagaggtcctcagcattcttcagatccccaagcaacctatgactgatgcagcttgagaacatccccaccaggaaaaacgggcccctgggagccagatgtacgatagaaagagcctctctgttcatgctaccccctgcttttcattagttgcctctctttattaaagctcccctcctcccttacagtgggtattccctcagaaatctatttttgaacacagaggaggataaatcagtaatatagggtctgatctgatgaaacaactttgaacactagcataccataccaatgattttcatttacattatcttaattctcacagccaggtgaagagggaggtgtcagtcctctcttcttacttacaaaacaacaacaacaacaaaaacagaaaaaacaacccaaaacccctgaggctcagagaggtaaagtgacttgcccaaagacacacagcaagtaaatattgcagctggtatacgaaacctatttccctgatactggaaacagcaagcactctttccactatcctgtaattctgtcaggctgcagcatgaagacaaagatcacactgatcagagatttacccaggatgctataaataccattgctaattactcataaccacaaaagtcaccacgtcttgccttgttgttcctttaaccaatacacaaagagccattctcagcaatgtcaaaaggtagaggagactggatttcttgatctttgtttctctcgaggcctttaaacaaatgacaacgatggagaacagttattaaaaataaaaatccagtgtacaaaaatctatcttgattatcttggagtctgactgtcttgcctctctctggttgagcagggatctgaatcctatatgaagggtgggtctacccggctgagaattgagagcatgatctgatgattccaggtgaaaaaacactgttgtttccatcacctggagacttcagccatcatgttttgcttaagggaaaatttctttggtctgacttatccgaatagtctcttggctcttagctttgttttgcttggtgtcactctggtcataaaggagctgatatttctgcagcaaaagcatttctgaattttatgaaaatggtgctatagaaacagtttcatcagggcaaaggcttctgttcaataggctcctccaacacacatgcacacacacacacgatcagggatttttttttttctgtgtgcagagagtgcctttatctctagccttcttcgctttcttcaccttacattggaatgctgcataatataaacatagatcatgtttatgatcagctaattttgctcctgttctgtgatctccccttctctctttttctctctcccacccatcatttctttttgctgtgcagcgcttctaaaagccccaacaaatatctgaagagctgtgatacctccagcaagtcctcgttctgttacgagctcgcaaaacacacaatgccggcgctgctcagtaatctccttgtcaaggctgcctctctaccttcccatcctcattccaggagcctattaaattaatgagatagaagtcagtgctacagcggtcgacatgttattggtgtacagcgccgatgctgttacagtgtgcctgttttctctcctgggacatttaatttccgcttctcaaatgagctgcgaagctgtgaggcctggcagtgttcgttctcggcactctgtgatgcagataatgagggtactgataggtgcctaggagacttcggtggctccaagctcagccatggtctgataatgctttatgccagcagtgtcagagcggagccactatcatccctcaaggaatggttcatctttatgtgtaatacagcagctgtcacctaaatggctaatggggaagcaaagtagaaccttagtgctagtaatctttgtcacttaataattttaaaggtatcagacttcagtggctcctgcaagttctaataaaagcgcacttgccgattttaggttgtttgtggcggattaaatttaaattgagaaatccatggtgttgttctgtgcaaatctaatttagtataacttgaataaccaagtaattaaaatgtattataggtataagatgctgggatggtggagtgcctacatttaagaggaagatttattgggctcgcagcatccacagtgaaccttctacaaccacattagctaacatctgttagaaaatgtcgagatctggggcagaagacatgcatgcagaatatatgcttttgtgcattggaacgacaaattggaaatacggggcagcacttggaagttaaattaattagtaatgagacctgcatccatgggcacacacatgcatgcgtgaggggtatatgggtatacaaaggggcatgtgtgtgtgcacataggtacatgcaaacacacattcattctaattaacacccagcccctgcagaatgggaattgaagtttgattggatttaaggagcagggcaataataataggacagttaatacaaacgatgtctgtgttgacactccaccattagtgtttcctggcagattattttgtttgctttgcctaagtgcacaagattataggaggtgatttagtaggctagggcactggattctgaagggaagccaagcaaatttcaatcacacctacaatcagactcttaatctttggggagttactgcacctgtgctggcaaaggttaagagacaacagattctagaaggcacagataaagtaattgtccaagggaagaggtatagatggaagggactcatgattctcttagaggataaatcagaggacatttggaaatctgaaagaaatatgcttgtggataagtgcaagatatactgcccagacaaacatgaaacatgttccaagaaaatattggtcaggagacagtcaagagtgctggctaccaggtgggtacatgggaaatatgtttaaatagcaatgcgtattacagttttctttcttcatcattgaatagcttgcgactattttcaaatgtaagtcctgttaagagaaaaatactattatcatggaggaactgaggttttggatgctatttgacattttcacctcgtctctgccttctgaattgttttactatccttttcctaaatctttggtcaaatatgagcatagttaatgagaaattttaatgatgtaatcaacttccctcaaaagactaatcctaccctggtgaacttacttactagggaattcacttattggaggctattatgtattgtgggtccacaggtataaatgtttagttcaggacccttaagcctctatcttattcacagcacatctcagaagatgcaacgatagctgagtgttttgaataaatatgtagattttaaataaggttttaaaaagcaccctctggtttgtgatgtctgagccaaatacaggtattgacataagtgttggaaacatttactaacacctgcagtctgtctcctcagtcatgtgcctctcaagtaagagaagaaacgcaaatacgacagagtcatcaaaaaaaattagactggtaatgcaaaaattttaaaaggttgcttttgcctaatataataataacaagatattcaacatagattaaaattgggcactttttttggtattcactagaaaggtatgaatcaccaagattcatacttttgggatccttatggatgtaattgataagctctatgcaaaatccacttaaatttagcattcattaaagtccacgtcatataaaatatcgtagattaggtcagatcttcagttcattgccgtttcaataggaagcactgttatttgtgctttgaaaatcacctaaaagatggcttttctgaggtgggagtttgaaagtcaatattgtcagcatgaaaataaaaaaaaaaaaaggaagctaacatatcaagtatctggctccttcttctcttatttattcaaaccaaaggttttgccacacatagagcgcagaggtaatgactgtgcatctgttgccgtaatacagtgaactgggaagaactaactctgtgcaattcaataaagtatatttagcatattttcattgcaccaaatatcagctgatccacctcttattagtataaatggcatagattagtgtcaggcattttcaacagtgaagaaattacaggagtctgcaaggctcattaggttccggctgcatgttaacgaggggccaggccttattaataagaagaggaaaagataaaactaagctgtgaggaaaaaagggaacaaaacactcctttagaaattctctgacatttagaagtgagaagactgcaccaggaggttcttttcttagctcatctcctaggacttcgtgaagatatgcttttctatattcttattattttttgcaacattaaaaaaattattttgtttcagttcatgacaattacatacagaaaccatgctttttaaatgggtaatatggttgccaacttttgcttttgaatagctgatctgaaggagagtctagattttgtatttacatcttcttttctctcacctcaatcaattaaggaaggtggtgagacctgcctgcttcagcctagagaaataataagatttgtgtcttgtccctgcttccatacctctctgtgctggataatccaggtggcaatattcccaaagcaatccgtccttgggaagacaggtcaagaagagactttctatagtgttatgctcaaatgaggccaatgaggactttctctgttaacccaaaggtcagtgtgatgaattctgattgaaaaacaaatcaaccaacaaactctgtttttagcattttgcttaaatgctgagaaattaatcaataaggccttacaccagagtacaggggaaaagtaagagctacacagggcacagtataaacaaaggtcctggctagaagctacattgatttggacccatgtcagaaggcaaagaactgaaagcaaaggaaaactctccaggttcagtacatgctatgaagtgcttttgaaaaaaaaaggaaaaagaaaaatcaggaattcatccaaaattctttaaaaattttgcatatgggtgtctgtgcagacgtatgtgtgtgtgtgcatatgtacacacacaatggagcaattttattgcaaaactcttatattttattttattatattttatattgagacagagtcttgctgtgttgcccatcctggagtgcagtggtgcagtcttgctcactgcaacctccacctcctggattcaagcgattctcccacctcagcctcctgagtagctgggattagaggcatgcacgaccatgcctggctaatttttgtatttttagtagagacggggtttcaccatgttggccaggctggtctcgaactcctgacctcaagtgatccacctgcctcggcctcccaaagtgcggggattacaggcctgagccaccatgcctggcctgcaaagcttttaaaagcaacaacagaatgtgcgtgtaaatggttggtttttaatgcaaaaattacaactgctcagattttgcacttctacagaatttctcagccaagaatatttcaatgtttctgttaggctatgttgttagaaaatgataagttttccattaaaagaaagataaatatgctaaagtaatagtctattgttgaacagtcaacagtaattaatttagagtttcaggttgttttgagtcatcctctattatgtttatattataatccccaaagcttagaaattgcatttcctttatacccattctgattcacctattgatttctcccactgtgtttaaaatgaaaatgaaatgaacttgactctggagatttgttttgaaccagcattatcaccagcatccttacggttcccaaacatggccttttttggcagatgacaattgcaaggtgaggtgagatgtccagttttcagcatcaaacccatttagtgattacaccatgtctgtgtgccgaatgccaacagggagatgcttgaattctgggtcatagtgtgaggggtatttagggctctctcaatactgctttgtctcaaactatttggatgattgagtcaatggtggttgttattttaatccgcattgaaaataataaagctttcttgcctttctccacctcacctagcctgtcttcacacagcaacagttggttgcaaattattgcaggcatacgataatatgtatagaaatgttttctcttgtaaaatattgtgtatatacacacttatgcccacacaaatttgaatatttgcttatataagcattgtggtttttaggcatcggataaggcattttccaagatagctaaatcaaatttctgggaggataatttttaaaataagatgtatctattttaaccatatcagtttcatcaaatcaacttctgtgaaataatgccacaaaagtctctcacagagtcagtgtgaagaaagcaattgtttcttttttctttttaatctttaatatggagacatagaaatattttctggccatcatctttcaaagcagctcttcccagtggaattggaatctggttcatggaaactttgcaaagctcaaacctccaaaatccccatcgtgaaagatcgtgtgtattacttgattttctaaagtgacaagacgtacattaaaaaatatttctcttattgttacatttcaggcacgtttactgttagctgcttggcttcattatgtatcatagtctgaatctacaaatcaagtataattagacttagcgaactgattggatttctaattaagctacattggaaacaatgcacaatcagtaaatattctgactaggtacattttaaagagcaactcttgggctttttgctgatgactagacaccagtgtcattaaatttgttggtggcaagcaaattttaaagctaaaatagaggcaattagtaaagatcttgaaatatttaatcacgtttgtccaattagtgtgcaattaggcagtggtgtggcgtgggacaggcattctgcttcactgcttggtgcagaaggatccctttgaaattttgctgtttagtttattgatatataaaaaggaagttatggttgtaatttccaatttaaaaaaaatactgtgcagatggtctgactatatatttaacaatgttaaacaaatccaaacaagggaagcatgttacctgaaattacacagctgtgatctgtgaataagctctggatcatggtagattacagctgtgcttatctcgatcattgaaaccgccaggcattttatactggaggaatcgggaacctgataagcttgcccaacaggtcttaaaatgattggcagctccttacttgtccaagtgtgtgcttcctggtggctagcttggctcctctgagttccaggggttttaattttatgcagagggagacatgggaagagatcttgtaaaaagttgatttggggagatggataaactgaacagccttggtacctgatgttgtcattgcaaaccgactgctcatatctgctgagttacagccttgagatgtgactgtgtgagggggaggtttggcatgcccagtgcaaaaaggaggaagaatgtctcttatttttaacacttagatggttttgcccagctgcagaagagttccactctctttacttatgctggaatgcaaagagtactttcctgaaattcttttttagatgatctctggaaaggcaataccatttccattttaaaaagatagggcttgcagggtgacggggatctcaggcagtggtcagacccagggtcgaatgacatcaaaggtgcctgggaaagggtcactcccggagtgactggatgaggcagtgagatgatgatgagagaattttagggaaatgaaccagggagaacctgacagggaaccaggtgcgtacccaggtaatctgtgagagaaatacttccatactcttctgggatattgacttcatgctcagccagactgaaccatctcaatatcatttgaagtggaacagaaacaatgtccctaagtacacttgattttctagaccctggtaacctaataggttgatgtgtattgcatctcaggagtccacggaaggatttctggacagagacccagttctcctaggcatactggcattacacattaccaggtgtaagtgcatttggtttggaaaagttttggaaactgggtgagaggaaattccctgggtatctacagatgtagaagcaaaggaaaagtgaaatgtaaaatgtccttgaaaaaatgacaggtgaattaatgtggaggttgggggaaaaggtataaaataatacaaggccttaaaatagatttactggggatttagggaagctttatcatacttattttcctatctcctgtctctccccagttttgaaggtttttttgttctgcctctctagaagcagcttactatcaccattaagtcaaaaccagatattttcaggcctttgagtaaaattgaattcccttttgagatcagattaaattctatatttagaatgttcacaaatttacaattctaaatatagcaaatgctaggtttaaaaacttagaatgttagtaaattagctgtggattatacctcttcctagttgttgctgaggcaggtataagattctaaactgaagctgtctgctgctggcgatggtctcagtggagttttgtgggattctagccaacaatgccctctgccatctaaactgttgggagaggagattctgttgattgcttctaacatgtggcagaatgcatacttagaggagttcaatagccaaaaataatttttgtgtttggcataaacattcttcgtcttgtggtctttccatggtgttcctcatgccctcttcgcagggtctccatgtctgtgtgccttttccaggctcccctcccacaacctgctctctggaaaccttctggataggattggccaagattagcaagtaaaaatacaggctacctagatagcccaatgttgaagtttcaggttgttcattaaggtacttgttctcaatcttggctgcatattagaaccccttggggagctttgaaactatcaatggccaggccaaaacccagactaattaagtcaaaatctccagggatgagacccaggcgtgtgtattgtttaaaactccctggtgattccaatgtgcagccaagtttataaaccactgaactaaggaagagttctcaacaacggtacacattagaaccacttagggaattaaaacacatactcatgtctggaccccaattccagacattctgacttcattaatcccagtgagtgactggcatccataatttttaaacctccccatgtgataggaaaccatttagttaggagataggcagaagggtcttttgaaaatcaatgagtcatcccagcactttataaatttgcaccagggtccccatctgcccacacataaagctatctgtgatgcctgcttactgtaagaaaagattccatcttcccctaagggatcacatgtatctgcttcccagtgaaaatcagggtcttctatttcaggggcacttaggatgcccatgacagttgcctcaaaaaaaaaaaaaacaaaaaaaaaaacaacagtcagatgtgactgtgcagaattgaaggcaatctttttaaggaataaaataaactgtaccctgctgggccatatgggtagatcagggagttgccatggaataaatgattatcaggagatcctgaagactgaagggagaaattaggtcagacatgaaaaaatgatcaaggggaaaagaatttcacaaaaagatagagtgggatgaatatgaaaatattaagaaggatcgagtgaatcctaaattaagcttattttggttgaagactatgttttggccataaaccaaagcaaaccctaagaatttgaggtgtttgggtgacaggcagcaacaggaaggccctcgtaactctgacagaagttggccaaacatcatactccaaatgctgttgagtaaactgacatgagacagttgatagacatcagctccgtatcgtttgtgacccagcatgccctgacagtaacacgtgtttgtccatctgtcatagactctgtggtttagaaaatgggagtcccttcaaggcacttgatgtgacaagagagtcacagcaaaaaacaattttggctgaggtcagatgctggggaggacatagaacaggtaccagagccctatagaaagaaaagctgagcagattcagagctagacagaggtcagggactgattgagagtaggagatgccaagtcccaatgtgtgtgtgtgtctgggtgcctatgcgtgtgtgtgcccatgggtgcctgtgtatgtgtgggcgtgtatgttgaggatagttctcaaagagggttagcaggagtctaggagctggtaaaacttggaaaacatacactgaaaaacttggaaacatacactgaaaatcaggggaaattgcaggcagttttctgcctccttccaggcccctgtgggcctgccccaagaacgtggccctgccgcctgaaggacagacttgggtctgaggtgcacctggccccattgtggcatgtgcctagacagagtgtctctgggcagaacctgccttgcccagagttactgatggaggagcagtcccaggcccctcttttttatcctgtgaccccacactgtccgtctcacagctgatggggatagaagtgggtaccctacagaagggcagaaaaccctcaggctgaacagcacctataaccctgttcagaaaaagactagctgggccaatcagattttctcttggaaatatgaacaaaagcatcctaagacatatattcagatgatgggaagggggctgcttagggcagagttggggcaggaggccttggtgggctgtatgtagggggattagaaactttgatgaagcaaagacagccaataagagaaagaggagaacacaagagatatgctgataaatgaggaggtgtggaaagaaagaaataatgccacctttgagaaaactagctgatccctagagctgccagactcctaaagcgcattgcagttcgtgggtcaactccagtctgtgaggggatcacttcctttctggaagagagatgcttaacgtagctctgtggtttggtcagcaggtttccttagtgtgatctccccatgagactgaacagggtacccgcaggaccacggttttcgctggtgtaaacttttcggtggggagatatttgttatctcagactgagtctctcattcagccatggcagttatctgccaatctgcccagctggtgcaggactcggctacttcaataagaaaaaggagagaagacagttttctccttcgtccttccccactcctgcccccctcctcctggcaccactgccaccactcctcctccctatattgtacaaaaccatgtggatttgctgaacaggtctgcaaaattaattatactgtgagtgcttggtaaccaatgaattgtaaattgtacattattaaaacagcatcagagctctgactgatctattattctttggggaataaacgaagataagagctttatgcattttagaggtctttctcgccaccgtacagcaggcatggagaggaaatatggagtagttattttgttttgtttttctgcaagttggattaaatagaaggagtgtcatttttttctgttattaaattgttatttgtgctctcacatgtcggtttgcagcatctaatagtgtagtggtcactcaataaatgctattctgtagtgattgtgataatatgtatccatatatgctcatccacaaacgcagcaccatgtcaacctaatgtgaacaggagatatatgatatgacatggcatcgtaataaaagaaattgtgttgatgtagtgcttctctgcaaaacctcaggaagaattcagagtaaacagtaggaaacataaagaacatcagctgagtgtgcaccaggggccttgtggcttcaattgaaaaggaagaatctggaagaaatggcttttcttgtctcttccttctagacacaacaagattactcctgggagttgcttatgaacctctctttttactgaactatctcctccgtgcagaatttctcagcacctttctacctgccatgatgattccttccaggcgcatcacacggttctccatggaaactttcactttctatgattgaccaagcctgtcgtccctgggactgtaactgccagtcagccacgcagcattgccccaacaagcaggcgttctagctaagagaaccgaaacaggtaccaggcaaaccacatgccatcccatccccaaaataaataaacagtgaaaaacccaccattgcagttggaaatcggatgcctcaggactgagctattcctcaatgctgtgcaggaccagctacataatctgaggcttatgcaaaacgaaaaggcaggcccctcgttaaataaaattagtaagaatttcaagacagtgatagcagaacattaaactaagtgtgggcccttcaatgctcagggcattgttcaattgcacaggttgtcacccaggaagctggccattgtgtacagagggacatttgcccactggtttgggaaggcgtctgtatttttttggtgcattttaatcttctagtggcctgattggaccatccgacaatttcagcatttgttttgctgggagaaggacagtgccattcattttttttcccctatttggagctgcagtgagatcactcctccctctcgatgaccaggtaatggccatttgcaatatgagactactatggcaaagagacaggtcaaaggggaatgatgttttatgatcaagctgaaaaatctatagggagtcgggggagctcaaagatgcctgtgagagacagatagacaaagagattgccatagaaaaatagaaatcaactttctgataagacattcttagactcagtcatactgagaggtgacagcgtgctggcagtcctcacagccctcgctcgctctcgggaccttctctgcctgggctcccactttggcagcacttgaggagcccttaagcccaccgctgcactgtgggagcccctttctgggctggtcaaggccggagccggctccctcagctggcaaggaggtgtggagagagaggcgcgagcgggaaccagggctgcgcgcggggcttgcaggccagctggagttccgcgtgggcgtgggcttggcggccccgcactcggagcaaccggccggccctgccggccccgggcaatgaggggcttagcacccgggccagcggctgaggagggtgtactgggtcccccagcagtgccagcccaccggtgctgcgctcgacttctcgccgggtcttagctgccttcccgcggggcagggctcgggacctgcagcccgccatgcctgagcctcccacccgctccgtgggctcctgtgcggcccgagccttcccgatgagcgccgccccctgctgcacggcacccagtcccatccaccacccaagggctgaggagtgccggcgtgagagtggcaggtagctccgcctgcagccccggtgcgggatccactgggtgaagccagctgggctcctgagtctggtggggacgtggagaacctttacctctagctcagggatcgtaaatacaacaatcagcactctgtgtctagctcaaggtttgtaaacacaccaatcagcaccctgtgtctagctcagggtttgtgaatgcaccaatccacactctgtatctactctgtactactctggtggggccttggagaacctttatgtctagctcagggattgtaaatacaccaatcggcactctgtatctagctcaaggtttgtaaacacaccaatcagcaccctgtgtctagctcagggtttgtgaatgcaccaatccacactctgcatctactctgtactactctggtggggccttggagaacctttgtgtggacactgtatctagctaatctggtggggacgtggagaacctttgtgtctagctcagggattgtacactcaccagtcagcgccctcaaaacataccactcggctctaccagtaagcaagatgtgggtggggccagataagagaataaaagcaggctgcgcgagtcagcagtggaaaccctctggggtcctcttccacgctgtgtaaactttgttcttttgctctttgcaataaatcttgctactgctcactcttcgggtccacactgcttttatgagctataacactcaccgtgaaggtctgcagcttcactcctgaagccagcgagaccacaaggctactgggaggaaccaacaactccagatgcgccgccttaagagctgtaacaccgcgaaggtctgcagcttcactcctgagccaacgagaccacgaacccaccaaaaggaagaaactgaacacatccgaatatcagaaggaacgaactccagacgcgccactttaacagctgtaacaccgtgagggtccgcggcttcattctttaagtcagtgagaccaagaacccaccaattccagacacaatattatgatttttctcagcactatattgttgctatcttcttgtcctccaaaaaaccccgcatgattttgaggaaaagttggcaatagtttctttctttttatttttaggggtcatgttcacctgttctttctcgtgtttggtaggcactaggaaataggagcgttgattatccagggacgtcagggtagcacagggagacgttatgagggaggggttgagggaggggccatggtaccaatggttactggagaatgctcccattgcagcagagcagttgttggggaggtctgcacaaaacctgggttaatgagccgtgcctagcccagcaggtttaacttcctagaagggctgcctatgtccctgtgacctgtcactgctgtgagaacctcaacctctactgtctgggaaggatggctatcttcagctggacaggcttgcaaatcgtattctggcatacttcttcatttcagtatctttatcaacagaactacatgcagacactttaggggaattaatagatcagcccagagggggcaggcggataagaaatgaaattacaatagcgaagttatggaaacaacctaagcatctgtcaatggatgaataggtaaagaaaatgtagtgtatatatacatactggaatattattcgaccttaaaaaagaaggaaatcctcctatttgtgacaacatggatgaacctggaggatgttaagtgaaataaaccagaaacagaaaactgtataacctcacttatatatggaatgtaaaaaggtaaaactcatcaaagcaggtttagaagggtagttatggggagaggctgggggagtaaggagatgttggtcaacgggtacaaattttcagttacgcaagatgaataagttctggaaatccagtgtacaacatggtggcaatagttaatgatattgtgcagtatacttgaaatttgataagagggtagagcgtttaagtgttgtcagcacacacatacacacacaaatggtaatgatatcaggtgttggataagttaattagcttgattgcgatgatcattttacaatgtatacatatgtgaaaacatcaagttgtataccttaaatatatggaatttttatttgtcaattatacctcaataagctgggaaaaaagaaaagaacaagtaatagcatgctttatacttcttttgctgcttcataaaattggttttgcttttgctttggaagaacaccagcagagaaagtagcactcaaaaggggagttaaagtgctgttccagtaggctctggattagccagaaggttgaagcagcccctagacagggaaaagaggctgtcttcaggcaataggccctatttaggagtgcagtgtgccctaaaattcaaaagagggcagcagataacttgcactgcctgtaggaccaggaaagcgtgtaacttgaggaatgtcagcaggaaaatttactggtttttcaaaactcacgtcatgcaagggttaggtgaaccagaaattgtgtttcataaattgtgtgtttaagtgtaaaagcaaatatttgatgaatgggatctaaggagctttggtgatgtggaggggcaagtgcaggcagattgtccaccatggcagcctcgtgctctgttatttagtgatataaaaccttgcggtggcaaggtcagcaaagttaaggccagagtgcatgagaaatagctgtggagtgtgaggtgaagaggctgcgtgtgtgcttgtacagtctcctcgttgctttcaccgagtctctccaatgagcgcgaccctcctcacaaagtgtgcacagtgcttctctcctgggtaaatttacaggatgtgggagacagtgagtctctctgagattttccagcacttccagaagaaagaaagtttgtgttaggaaggacaggccccagctccctgggacttcagggaggctggggggagctgcagtggagaagaggaggaggttgctgaaggagaagcagcctgaagttctcaggttgaaaatacaaaccttagccccatcctgcggaattttgggatttcattcctaggatcaccctatagacctctttatgattcagtttcctggaaaagatgatattatggtatggatcctaaacacagtttcacaaggaagttctgtgtcttttggcaggggaagaatagtgaacaaagtgcaatcttacttttaaaataaatcttgaaatgatattgcaagccttatgagatctctgataatctttttttatttgacctggttttaagtaattctttttattcttgatgtttttcttaaaagcattttagaatcattcaaccttctaagaaagcatcaaaccatataagcaatctaatctaaaaaatgatacctctaaaagttgaaacttttgtttattttgactactttttgattactggaaagaataaaaaaattttactctatcaacattggattatataaactgtaaagagcttctactaagacgtgtgaaaatgcacattttctttttttatataacttcaaaattaacagatactatactgtttagatacatacctgatgctagataaagagttcctgagaaacatgccctaaacttttggactgatttaatatgaaacaattactacagagctgagttaatcagcccctttatagattttggcgaagatgattctcttcatatgtataataatgaaaaccaaacttggcaaaagctcacaggtctacagtgactgtgtatttctttgcattctctagaatattgagggaggagattattttttactggtgttttactctcaggaaattagaattgcaagttgataaacaagttgatagggtctttagggcctgtgtgatcaatcaggacttctggggttcctgtaggtatccttgaagtctgcttgtgggttgtatagtccagagtgatcatgagatctttcacctcagaatgactgtagatgaaaagatacatttcttttgccagagcagttctctctagagtttcaaaaacaataattttgttctctcaggaacatagccctctcaggaataactccagtcggtcctcaaattacaaatacagaaagaatggctgtgtttacagaatttttataagagaaaaatgatctgtaaaaaaaaagaaatatatgcatcagaacaaataggaatttttaaaagaaacaactcctaagataaatactgaaaaaaagaaatgctctgataatataaatgattctactatgtactgaactcaataaagtctccttgactgtgagttggaagccctgaaattttgctggcagctctgcccctaagttaggtcatcttatgaaggacacattttattttatttttatttttttgtagagacagtgtcttgttccatcacccaggctggagtgcagtggcgcgatcatggctcactgcagccttgagctcctgggctcaagtgatcctcccaccttagctttttgagtagctgaaactatagacgcatgccaccatgcccggttatttttttaaattttctttatagagacaaggttgtgctatgttgttcaggacagtctggaactcttgggctcacatgctcctcccacctaggcctctcagagtgctgggattataggagtgagccaccatgcccagcctcaaaaggcatattttaaagcgtcacagcctcagtttcattttcggtaaaatgagggaattggattttatttcaaaattctattattttctgattcattgaattattgcaaagaacataatgaactcccaaatactggtgtctccatcctgttgaattaatctcagctttagtttatagggaagcatagccactagaaattatgttaaacataaattataaaaggtacatttttctaagtcatgaagaaatacataaattttatgttgttttcaaccttagtctgtctcttaaataccacatggcatactgtgtaccactctgttattatgtctttcgttttcagaattgttttctaccaggagactattattagggtagcccgatgacttggccctgaatatgggagttcatgtgtagagttcctccctctgtcccatcctcagcatttatgtcagtcctacagcacttagttaactatcagaaaatggatcaaaaagcaaacaagtatcccatctgaccgtgttaacagcaaaatcaacagatataaggcccccttttaatttcctggaggccgtcacctcgtttcttctgctgtttcactactgcagtcctttcttgttcctcagactctcgtccttcctcaaatccttctccttccatcaacatttatgtcatttatgtcttcggtgcgcacagaacttcaggtttattctgaagagaaataaatgaaacagaaaatagcttctgcactgggaaggcttaaaaatctcttctccctgaaatgtttgtgcatttttgaaatctttgtcctccatatggagtgaacacacacacaccctgctcctctattcttcttaaccctgttttcatactggaagagggcaggcacatgctaatcattcctgtccctattcagcaagcatgcgacttgctgaaaacctacctccttgaagcagcaggatgaatacagatagaaatgattagaggggaggaacttacaaatactgaatagctcatgtgcctgacactgtgttaggggagactctcagggctgagtagtactgtgtcatcattataagagaaagttttagaacggctcagagaggttaagtaacttgcctgaggccacacagtaagtgttagagctcagaatctaattctgcaaactttctgatttttcctttataaaagatcttattcaattttggaagaattgaagttattcttcattgttttttaattcatgaaaattgtatacaattctatgaagaaggaatctaatatatgaaattaaggtattattatattacagcatatcccaattttacatggatttagtatttttgtgttagatagccatgtattaggatagttctaaggcaaatgcagcagttgagataagaccatttagcctctttttctacatcatgttgtaggcaatcccttaggatgatatactacactaggggaaatgaaatttttttttctaaatttgtttttccagaagaatctctttaccattaaagcaatgctgctcatggctacctatataggcctactagcttctccaaacatcacatagaggtaaagagagaaggtaatgatttggaaggacatataagagggtgaaaaaaattctttcttttaggtttttgcttagaaaacaatgattgcgtgtgagaacaaagtgggttattataaatgttttgacacatagctagattggaatgaagatcaagggtatgaaggactcaacatcttgaccctagacctgtcccaggatcccactccaaggtctcatgtatgcagcagctccctcttgggcatctcctgttaccaacttcctcttcccatgagctgttattgccacttctgttgatattatattaaccttttctctttactcgataagagctcctggaaaattagaaattggtgtcgaagagtaggagaaacacaccgtgtgtggcataacaataatagcttacacctacataccattttggagcttacaatactgtttctcaatggttcctgggagacttgcctcattcaccaggtgaaagctcaaatgcagacttctgtgtcataccccacacctgatgaatcagaatctcagtggtggggggtacctggattagtggaattcagaaagtcatctcttcagattttttttttttttttgagatggagtttcgctcttgttgcccaggctggagtgcagtggcgtgatcttggctcaccgcaacctctgcctcccgggttcaagcaattctcctgcctcagcctcctgagtagctgggattacagtcatgcgccaccacgcccggctaattttgtatttttagtagagatggggtttctccatgttggtcaggctggtctcaaactcccgacctcaggtgatccacccacctcggccccccaaagtgctggaattacaggtatgaaccaccgcacctggcccagatgatttttatatataccaaaattataaccattgtcttgtaaatattttcatgtatgttactttctttttctcttttaagaaccacctgagctaggttagaattattatatactcattttacctatgagaaaattggaatctggaaaagtgacttgcctgaggggacacagctaacgaggtgcaggcctctgactagaacccaagtcttttggcttggccggacagtctctgccctttccccactctacactgttcccatagactgaagggtaggtctgtgcacacacgtggatataattgtggaggacaacacaggttgaaattctttcgtagaatgtgcttttgatgttgtattatatctaaagattcatcaccaaatccaagatcgcatcgatttttctgccgtgttttcttctagaattttcagttttgcactttatgtttaaaatgtaatggtctatgatccattttgagataacttttgtaagaggtttaaggtctgtgcctaagttaattgtggacgtccaatttttccagcatcatttgttgaaaagaccatcctttctccattgaattgcctttgctcatttgtccaagagctttgcaattcttgatccttgtaattaaagtactttatctctgctctctgttttaaaaggcagccagatcagtccagcatttaataattatttgcttaagatttgaaccccacttcttaggaaagaacatgaggcaagttgtagattaggatagggaacaagataaaccactgaagagtaaactaaaatagaatccatccacactgaactttgtggccttggcttagagatggggaaactaggttctagatctgactcttatcacttcaccttttcagcttctgtctccttccctgaaaaatgagaggaatgttgttagacatattccatgtttctttctttttttctttttttttttttcttttgagatggagtcttgctctgtcacccaggctggagtggagtggtgcaatctcagctcactgcaacctccacttcctgggttcaagcaattctcctggctcagcctccctaggagctaggattacaggtgcccaccaccaagcccggctaatttttgtatgtttagtagagacggtgtttcgccatattggccaggctgttctcgaactcctgacctcaagtgatctacctgcctcggcctcccaagtgctgggattataggcatgagccaccaccgtgcccggcctccaggtttctaattatatgattccactctagggcctcagatcatggtaggggtaatgaaaacttctatctgtgaaaggctttcccattcaggcagcaagcttgccctttcaagactgactcatgaggattcattgcatgaattgtaactgatccatcccacgtcacttcaccaattcacgagagtaaagaaacacacgcagagacttaactgtacaatttttaccaagtcccttgcttgctcagacccatcacaacctacgtcagtgggagtcatctccccttaccccacattttcatctcaggcactgacgtgtctttgtttccttattccaacatgggtcagtactgtttcttttatttttaatttttttctggggatacaggatcttctctgcctctcttccccccttctcagtctctcctttaaactctctttgccctaggctgaccacactccttcattctcaagaacacgcagcttatctgttttccatgtttaaggcagccaaaggcttttaaagataataaaaatctctccactgcaattttgagctgcaaagaatttgctagatttgctggcataaagagttacaggaatgttctcctagtacttgtggtctggaatctttggagggtcagggatctaccagaaacacagacatgtgaaaataattataatatagcagggggggcgtggatgctgtttccggggtgaggaggggaggcatcaaataatttttgctgaagaggtaacagttgagtcttgaatgatggtcgggtaggagtttagcaacagccaagagtgggaacgagggtccgagatcaaggcagggggtaacacactgcgcaaagaaagaaagagtgaaagaggatgccattttgaatgtagatggcttagctcttactcacaggtgggcaaggctgacttaggtggtttggctgtctggacaggtgccccctccttcactgcattgttctacagtccacgtgtgtccttcctgaagttgctcccttcttaactctcaggaaatcaagcatacactgttaagactaacaaaataagcatgctttgctgtctagcatatagggggcaagatcttagcataacatgtgtgcttgaagacagccagaagtggaagagacagaggacagctgggaatgactcttgaaggatctgtaggtccaggagggaatggctcttgaaggatccataggtccaggtcacgaggaggccttgcatgctgctccaagaaactggacttgcctgcataggcagagggtgactgttgaggagtcatgcagttagagcacatggaaggtagagaagataaagaaaggtgaggcaaggagactagaataggagctgactgcgagttctgatgtgaaatggagatacagatactgatagagtagcagtgaggctgggatgctggggaggatctgagagaatgttagcaggaattgttgtgctcagttgaatatgatggggcaggagaaagtcaagcacaatcccagatttctgacttgagtgatgacaggtggcattagccgagataaggaattcagaaagaggggcagttttggggaagaccatcagtcctatctggaatctactgcttttcagaggtggagaggaccagacgcagttagatatattggtcttaagctcaattgcaactcaatgcagatgaaagggcaaagaaggagtgactaaatactctgggaagagactcttaagggggcattcagttcagttagtaacaaatattttacaaggttactttgttaggcaccgcaggacaggcaaagaaaagtctcaaacaaagaaccctactttgttttaactacagctgtggactcaggttaaacttgtatgaaaagtgtttccaataattattgcttaggtaagttgtaaaattttggtctataagtttatgtctgttttcctggctttctctgaggtttgacctacaaataagaacttccctatttctctctcgctctctctgaaattaatcatgaggttaaaccagattctaggagatgatatatacatgacagttgattcacctgttctttagtttcggtcctgccttatgcttaaacataatatggttggttatagcagtccaaaaaaaatggaaggtacacctttatggaaattcccaatcttaggaactaaaaaaggagagaaaatagagaaaagtttacttactttttagagtaaaaatcccttttgaaagatatttttctgtatgtcggtgaactatttttagacatacacactcatacttaactacaatcactcaattaactgctaaaccttatgaaggaagtagtatttgaaaaacatttaaaatatttaagaggatatttaaataaatacttaagaaacagtctatgaacttgcatgaagaactctacaagtacaatactttccttcggaaattaaactttgaaataaaagatagcattttaaaatgtgacttgtatatgcctgcccaaagtcctgataggtattttatatcataaagaattgggaaacagtaactaaaggcaaataatagtgccttgtttcaccaggaatttgcatattgtgctaatattaatgtaatctcttagaaaattctcatctaaagtgtgaggtttcttattaaaaaaaatttcatgggttcatgtagaaaatttttcatgggtctctttatttaaacattttaagttcaattcctcttcagttatatcttagccagtggaatacagataatgcattttgttcttctttccccagaaactgaagtgtttactcttatggactcagaggggcttttcaagttacttcaatttttacagctcttttcatatcccatgtgtggatttactgtgaagacttatgaatgatggaactccagcagcctcaccatggccttactttggctttggtaagtatagaaaacctttggcaatgtggttgagacctaagttttaacacttaggcaaaactttttagcaggagccagaatatgaataaatatgaaggaggcacttgaatgcaaaacacactttacaaattcatagcaaatttgagagcattttcaattaagtatatatgactgcgggttgtctcccttgaacaaattagttctcgtttgtaagggttatatcttttaaagtatcgatcaaatcagtgctcaaggtagaactgtaagtaaagttacaatcctaaaaccttttgggcaatggttctaattaatataactaatattttagcaaaatatcctgggttgtaattgaaagaaatcatctgggtctgaagaatacctactgagggcagccctattaagattcattctgagacgggttaaattaatttcctggacttgcaaagcagaaacgggaaggttttccttcctcataagcctgcagggtttggtgtttggccctgtcgagacccaaaggctatctaggctgattaacatatatataattaaagtgcaccagctagaaaggcagagccagtttcatttggctctgtactactgtgaaataaattgtctgcattgtttaactttttttttttaattagttttccctggacgtcatcctgctgccttctttaggaatattgcttcctatcctaagcagggactagagtagagaagctttctccagcattcaaactagattttctttccattcatatcgccacttttcataacatggtaagaaacactgtaaataattgaggtgatccatcaagagacccattctggataatgaaaaattgcataactcagtaaaagtcaattaaaaaccacaaactccagagccttttgctcagtgaagatttattgttatagaaggcaactaatacaatagatttgtgggctcgaaattttaaaaagttctaaaaaggcagttaaagcttgacaataaacttgagtaaggtttacacaatatcaaagtatattagttctttgaaatgaaaaggtattttttttcttcctttaacattgagatgtctgagatgtcaggattttgtagcattcttagaaacaacatccactgtgtgggatactttttttccttctggagttttaaaccagtctgactctttggttgtgcctatacaatgaaaagtctacaaatgaaatgagagaagtcaggatattttcctttgttaaactaagtagctgaataattagaactacctagataaaagactcaaaatgtttttgttatctggttgcctggttaggacatagccaacatttcaatggaatgtagtatcttgtacaactgcatataattttttaaaaaataaacaatgactttgtttctttagatacatcaaatgctgcttgagtggccaaagggaaaatgccaactctttgaaatgtagtatctgtagcacttttcttctttcagtagtttttcatgccccaaatacaaactttaaggagtaacatctatcctcaaaacccaaaaatacccatttgttttgaggttcacagtccaccagtataagttttaaactgcgccaaaaggcttaggtagggttcagcagtcaggcatgacagatgcataattctaaccaacagtgcacatgtgacatgcttcctactgaaattaaactgccaaataaaaaggaaggattgtgccctttttaataacaaagaatgcagtcgttagaattcttcagatttggaattccagcagcactctagtgttttcttcttgatgtgtgacaagaatgaataatatcaaaaataaaaataaacctcatctaaacaagcagttctttgactttataacgttcaacatcaaattctcaaaatactcaagaccagtaaattatcagagctgaggaaataacatgctgaggacagaatcaatttttaaacattttgattgattttaacctgctagcattagttttgttcatttctgtttagacattgccacttcaactgactactagggaccatggtatttcatattcatataaatatctgaatttgacctcataagaagtcccttgggtctataatacttttattcttgtataatctgaaacaaatcctttccttttaaaaatcaaacagaccacgttatacacacagttgactatttacaaagcacccaattaaatcctacttaattctttcactctaaaaattccatctaacttgtgtgtaaagtacccataacattaaatgcataatgttcacaaaccctgatagtcctatctaacctagaaaatattaccttccttaaggagaaaaaagagccttaaaagaaaaataagagtaaggttttaaagaaatgagaccagaaatcacagtacaagacagagaaatctactttaatattcacatgtaaaagttacacatcacaagagattggacagtagcttagcgtaacatagctatagtgaaaatcatttttataaaaaaataatctagatgcggtcatcagaatttttggtctgcttaagttaatgtttgaagatcgacttttatccctgcttgaaggatttgccattatgccttttttttctcccactgttgcctattaattctttggaggaaggaaagcagaaagtgttcatttccaagagtttgtcctttggtagcaagcagagaacatttttttcatttccatgatttaaataatctgtacagacatgaaacttagtgacattaagctttagtgtaaaatgaagagtaataagcaattttttttcactttgataaaacagcagatttcgtaaactccttaaggatccaagcatttcctcatcccatatgcaaaatcattcagaatccattttgacctcagttgaaaaacaaaaacaaacacttactctgtatatattacactataaaaccctgtacttaaaaactgataaggtgtattttcaacatgtatgcttcaaatacaaagatttcaatctacatttaaaaaaacacatttgaatggactcagaacaagtttaatttgtgattaaacatctcatgcaatcatgcaagaccactagctataactgttacttccgagtctatactgggcaaaacaaaagcaaattaagagccaggccaaacagaaaagacattcaagatatcaagagctctgtaattgagctgaaaaatgattttccaaaagaaatattcccatagattaaaaaaaaacacacacataatatttacaaaaaaatatttaattaaaaatatcttataattacagtatctattaaagcatatactttctcacacttatagaacatctctatatatacatggtatgaaatgtcactcatttatctatacaatatgtaacattcttgcagagaaaagaaagttctctgccccgttataatcatctattttaaacaatagatgtaaaaaaaaaatatctacaatgctctggtagattagtaaagcttcaaaacaaaaattgagctccttggtcacaaagtaggcttctaaagtcggatctactcttgatcttctatttatcagtcctgtcacacttaagcttaaaagtttaactgcacctccaaaaaacacagaaatgtacaattcacagcagttataaatgaagagacaaaagagaatacgtatgtagaatgtttatgaacgtgcaaagaaagaatgaaagttgtatttttctttcctctctctctcttggaatgacgaatgaaaacgtttctaggttggccgatgttttttcctttcctccggtggctttttttctctaacttctgctcttccccctccctctctagtgctcctggctcgggctcaggcggccgcacacctgtggaagaggaatgaatagagggggtgtgtgaaccttctcgctgcagactaactggcgccaccgaccaaactcaagacatgcttgatcaacaacccaaaacaaaccaccaggtcagacaacacccgcccgcggccgggccaggcgccgagcaggcagctgcggccctcgggaagcccggagaggggacccactccggcgccctgcccgcgtccccctttgtgggtgacagactgcacgggaggacaccggggcagctcccatgcccacgagggtgccctccctcgggaactagggaaggcagaagagcccgctgaccaccagaaaaaacacggggacggcggggacaagggctgacccgtctccaccgagactgaacctcgagttctaaggctaagtacgggtttacttgctacttaggtggcagggagagaggggatttacttccttgggagtttgctctcagaaacgctgggggcaaagaacaccgcggtgcctggccccggaagccctcggggacgggcgtctctggtgaccggccacccgagacgggaaatgcgcgctcacctggacagcgcggctcagcggcacagaatgctgtcgccctgcttgttcaccgcgccggcctggaacagcaaccgaacaccaagggaaaggttagcaggcgcaaacaacgcgctcgacacggtcctggattgtcctcggaaatcaggctggcgcgccgacgcccccaccccagcctgtagccgggggggcccctccgggctcaggcgggacttgacagcccagggcgcccacagccccgagtcccgccctgcgcgttctcccggacccgcgctcgccgagcccggccggctgctggcggcccgggggagcccggaggagcagggggagggggctgtcattcctggcccgcccctgcccggaggacggtgagcgcccgcgtcccgccaccacgccaccaacctcccatcccccgcggcgtccgcccacggccggcgcccggcctctcaccgggtcggtgttgagcgcagtgagcggggtccgcggcggcgcggctggacaggtcccggccgggtggtgtggcggcgcgggcggtggtggctgcctcagcagggccgggtgcgtctccagcgccagctgcaggtccaggatgtagtcgataacgtgctgcaggatctccactttgctgactttcttgttgggcgggatggtgggcaccagcctccgcaggcggctatagcagtcgttcatatcgcactgcaggcacagcgccggctcgtcggccgccgcctcggccgccttacagcgcgctgccgccgccgccgccgccgcggctgcggagccacccaggctgtggccgtgctcggccaggcagcgcagcgccagctccccgccgccgcagcccgacggcgccttgcggcccgaggggcgcaccgggctcaccgccttcatcgcgcgcgccctgcgctctacgcgagcgaacccgctggggcgagcgagggaggcaggcaagctccgggccccgtccgcggccggctccgctccctttgcctccgcgcccggcgcgctcggggcaccgcgacactcccgagcccaacaattgacgggagggtcgctctgggttttacgagggaatctttgctcagtgggcgacactcagcccgagcccaaaggaaaaaaaaagcaaaagcaccggaagaaaagtagcccacccgggtgtcctagtcactcccttcggagctccgactaagcccgatcgcggccgccgcgctcccctagcccgggatcaccccactcccggtactactcacaaccgcgcctcctccactacgctctcgcccggcccgccgcgcagctgtatttatagagccgtgcgccccgggggcgggaccagcgcgcgggccgggtcgcagcgcgagccgagcggagcccgctgggcgcgcgggcgggggcgcggagggagaggcgagggcgggggctccgggcggtgctggggggcggggagtccggctacccgagtggaggagtgggcggggggtctggagtggccagccaatcaggcgggcagtgccacctcggggaatgacgctcgggccaatgggaagggcactccattccgtcaacgctgtgggtcggggttctgagaaaagagagctgagtgggagtcgggccaggctgatgtgtgcccaagggaggggaaaagagagagcgaagttcctgcgaagaactgcgggaatgtgcggccggaattcactctccaccgccccccttatcccgactaggctgctgagggagcgcctgggccctgctcgcggataccctgccactcctaatagcacggcgcccagggaccctccgccacccatcactccatccgtgggattccagtgccttaagaaagacgcgctgttcaagaaggcacgttcattctgttctatatttccctcctccgtttcattattcgccttttcacatttgccgaaaccataatgatggaatggaatgtgtagcctttccgttttctttttaaaaaatgctaaagcttagcaaaagtagaaaaaaaaagaaggaaaagaatgccgaatcgaatgcaggtttttggtgaagggaatataaataaaacaaaaacgtggggggggttcttttaccccatctaaatgcaaaagtgggctcaagaaatgcagttgccttgcgcattcaattagagcacgtaaagattaaaaatgcatggacacggaatatttaaaattccattatgacatataatattaatctgttttatgtaaaattcatacctgtaacttaatttaggccattaatgcacagcttcacgtattagtcagcgtaccccgctttaaataaggtgatgagaatgtccagagtcgcctcctttgacagcaaagcattaaaattcacacttccagtctctgggatcccgcttgggccccaccctgcaaaaaaaagcctgttaattaagggcgtttttgtgttagatttcttagagaaaagctgtccttcaagggttcaaaataaaattgcacaatgagctttggtggagcattgtgtgtacccttcaagaaaaaattgagcccttcagatgagaaaggtgcataaaaattctcagacaatggggaaatgaattttgagtgccttcactctacaaaccctcccacctttagacacgcttggagatgaattaacccaagaattttcttcattcgtgtacatgacatggattggtgtcttcattttcatagataattgaaagaaagagacatggacctcatttcttcctgtctacccctatatggactttttctacatccattcccagaactgaaatacctgcaccaggcagatattttgtttagctatgtcagtgctttatgactatcgcactattccccagagcacattcctttctcctgatgaaatgaggagcaactatttaattctggtttcacaggtagatgcaataaccctcctctcccctaatccttgtatgttactgcttctaataattgtttggaaacaagtgccattctcatttatttatgtgcatacgtagatggtctacatacacattaatcgagaaaatcagaattatgaaactcagaagggctttcttctaaagacaggcatagtcatatacatcattaaattaatgcaaatacagagaaaatgttgtaattttaaatgggaagtcggtgaagccagcactactggttgtaagctattatcttggagccagtcatatgagcacagacgataataataaatggatatatgtacagatgttttgttccattgatctttctctttcctagagtttaaaatttgcttccaaattcaaaacccaagactttcctctgtttggcaaaataaaactatgctaatatgcccaggacacacttacatttaaacattttacatatcctaacgattaaaattaaaatttaagttttgaatacgtaacacaaaggaagaatcatatcgacctttttggaatttgctaaatctcagaaagccatgccttgggtgtgacaagcgccaaatgcctaagtttcaggttttgttggagatgctctgtgtgactggcttaaagttagaaagactgagttactctgtgtggggtggggtggaagaggtggtttcaaaggaatgtacctcagccacaagatcaagaatacccaggaaagatgtgatccgtaaatcctgctagcagagtaggcagaggcagttactgtgctccttgttttgaaggttggaaggcatgaagacattaaaaaattaaagtgctaccatatactatgggaataaggaatacaatcctgcacgttttggtccatgaaaccagagagtactaggggctatgcaatgtatgtttttgtattcttagacatagacacttacatgacatcaaagctgcaatcatggaagattcctggcactgataattcaaaacagtttacccaattatcactcagattttggataaaccttacaagctatgttatttctactgtgcagagaaggtaacttagtctgttggtgactcttttacatcaaagtgtttcacttgcacttgtaaaagtaaaatgggctaacccaaatccttttgtcatggaaatgctcgagactcccaaaatatacctcagtaggaacctagaatgaaacattcataggagaattgctagaaagccgtgatgaccagagtcatggatacacccttcctccagacaaagaggtctgctgtcctccctgagatgtattctagctactaaatcaggccctcactgaactgcaacacccaggcctttagaagtcatagtcaccctgtgtttacatgaagcaagggtatggaagcatattgtgctcttcattcccagtgcctttttaggacttgatacttgtttctccatagcctccagggaaacagtgagtgtactcatacacagataaacgtgaatgttccaatgccttggtcactctgtagatttgtcgtcacagaaagaggcacatgcattctttgagggcataagaaaccactatgtactctgcagcaggactgtcccttgctcccaaagagtaagttgggcaatgtggcaattcaagctcaaggctgctttatcaggcactaagtgttacaaaattacttgtgctacccttggattgctgatactagtcccggaaatgctgataaccccttagtttgctaggtcctggaaaaggcttgtaggaagaggacgttgtacgttgaacatggctgggcagatgtggctgtcaaaaatgccttgtttggggagttttaaaggtagttggtttaaataagaagtgactttttgaaagccccccttagattaaaagacagaaaaatggggagaaataagtggaatttgtttttaccttaggagatataaacagcatggactctgaagtgagacagcctaagccccaattttggcctctttgcttattagttttatatcattcagctgggttcttaaattcctatacctttcatatttggaatgattaaaattgcatttacttcataaggtgtttatgagatacacatattatatatatggtctctgtaaaagaaattcagtaaagttcttagaacagtggttggcacataagtgggcaaaccatgttacaatgtattaccatttttggcaaatatctctcagtctgtggactgacttttcatttacttcacaatcttcttttagagcagaagttttgattttttttttttttgagacagaatttcactcttgttgcccaggctggagtgcaatagcatgatcttgtctcactgcaacctccgccttccaggttcaagcaattctcctgcctcagcctcccaagtagctgggattacaggcgcccaccaccacacctggctagttatgtatttttagtagatatggtgtttcaccatgttgttcagtctggtcttgaactcctgacctcaggtgatctgcccaccttggcctcccaaagtgctgggattacaggtgtgagccaccatgcccaccctaaattttgttggtgtctagtttatcagtttgttcctttatggctcatatttttgatattggatctatctaagaaatctttcatagctcaggtaacaaaggttttctcataggttttcttctagaatttttatatttcttaggtagggttgcttgcatggtgtgtagcttatgcagtcacacagggtcctgcactcagaagagctgtatgcttgggttagtgctcttgccttcttgaaattcttagtaatttttgaacaagggaacctgcattttcattttgcattaggacccacaaattatgtctccagtctttgttttctgttttatgtgtaggtctatgatccattttgaggttatttttgtatgtggtgcaagatatgggttgaaattaatattttgcatttgtagatccaattgtttcagcactctgtcgaaaagtctacctgttttccaaagaattgcctttgcacctttgttaaaaattaattgtgtatggtgtgtatgtgtcactctgtttctggctgctaccacattttcttgattactatagctttataataaggcttgaaatcagatagtgttgaggcattgatcctccagctctgttctttttcaaagctgttttggctattctggggatattgcatttccatatgaattttagaatcagtttgtgaatttcttcaaaaaggacttgtatccaaacatataaagaacctgtactcagaatactgtatataaagagctttcaacacaataataagaaaataaacaacttaattaaaaagtaggcaaaagaacatacaatccaataaagaagaaataggccaggtgccatggctcacccctataatcccagcattctggaaggctgaggcaaggcgaattgcttgagcctagaagttcgagaccagactggggaacatggtgcaaccctgtctctacaaaaaatacaaaaaattagctgagcatggtggtgcacgcctgtagtcccagctactgggggggcggggtgggtgaggtggtggtggtggtgctgaggtgggagaatcgcttgatcctgggtgggtagttgaggctgcagtgaactgagatcgcaccgctgcactccagcctgaacagtagagtgagaccctgtctcaaaaaaaaaaaaaaaaaaaaaagaggaagaaataaaaatggcaaatgagcacatggaagatactaaacatcattagtcatttgggacatacaaatccaaactataatgatacaccattacacacctgccagaactgccaaaattaaagacggaacatactgagtgctggtatatggagcaactggaactatcgtacactgctggtgggaatgtaaaatgaggaaaattactttggaaaacaatttgacagtttcttaaagttaaacatatagataccatatggcccatctgttcttctcctaggtatttacccaagagaaatgaaaccttctatccaagggccacaatggagcctgagaatgatgaatgtgtttattatcttactaactctgtatcatattgttgtcagctaggtatcacagcatgaactgaacggtagtgaaataccctccaaagcagtcatgagactaatttaatatttcagctattgtggttactcattaacatatttcatcacttgttggaaatggactacactaaaaaacacattcactctttcttggtttgtatggcatgacatggatttaaggcttcaaggaggaccctatctaattatttgaaatgtttctcccttttgcaaaaactaaagccatgttctgtactcttgcttctctgcttcactcctgttgcagcctctgctgccttggtacaaacacccactgggtggggaagataagaagcctcattattccatattgaagatggtctactgttttcttttcctctccacttttttcttagcaagaaaagaaaagaggctctcaagattagatatatcccactgctatttccagagcaaggagcaaagattcccaatgggtaacatatttttgcctttaaaattctgtggttcaatccgtgcaagcacagcttctccatctagcaagaggttcacagggatggaatgaagattaactgcttttgaaagccccaggagaaaggcagtaaatgaatgatagggggtaatacaccagaatctagtgaatactagatactgaatgtccactgatggctataccattgttgaaagggggcttgtaataggtaaaatggttatgaagatgccaaatagatcaaattggtgctttaactcataattatagtttagtagagaaatgcgagacaagaattattattattccttaaaattcattcccatagtgatatgcatttgtctgctacattctttctttcagcagataataccacaagtgaagtcataaataaaagctattctactcatagcagaaattatttctagattcacattaatgaaaaagttttaattttatttttctttcttttaaggtgaatgcaaaataattccaaaatatagaaaaagcgttattaaatgtattttaattacttagagaaaagacactaaataaacagtaaattgctttgcatcttcaaactgaatactgaatgtgggtccatcacagtaaatcagccttcactgagagaaaagactttcccattttattgacatctaggtcatggttgctaagaactgatacaatgttcaagaaacagctgccttttttctcccacaaagaggaatttctgagtcatttttgtagctccctacacagttgtcatcagttgttggataggctgtgatgtcagtgaccttcgtaccagtagtggaaagtgactgtgtgtaaagttgatgaacagtataaaaagtcgtatgtgaaataattgaactagtacattttttctactatcataacatgtgcaacaaagcactaaaggaatgttaaaaatcacaattaaaggaaaaagaactgggttaactttgaactttatcaacattggcaattctatattaaaagcctccagtttaaacaaaatcatctctttgcaggggattacaggtataactattttcccttgaatagaattaaatcaaaagtataatcttaaaagactaaaagccttaatgaaatatattttcaaatataactgttcaatagaaaaatctaaaagtttggtcaagctgtagacaatacttggtctgataaaaccatacttaccattttaaaaatattttgttcattaggtcaacattaaaatacgaatctgtttatattatgttctaaaaataagcaaaatatatgctatcaggcaaaataagacaattactgtgacaacattgcaaaaaatgcaacatatattgtcatcaaggcttgtggcataggattgaaattgtatcatatgaaagtaacttgtcgaatatatttttaacattgatcttcaacccactgttcagtctttatcaggaatctacaaactgtaataaataaaataagtgtaccctttggcagattgttaaatggatcatttttggcaccttccaacattgtccattagcagcctttccagaactgccaactcccaactctggagaacacggttgaaaaatggtaatacatttttaatccagcttctagaagaaccatcctcctataccaatgaggtatatgcttaacacctctatattatgaattctagcaaccctatctcttcagccccacttttcaggctctctgctaaccaatcttctccaaaatggtttcagttcaattaaagtcaattcaagccaattccacacaaacatgtatggtacatttactatatgacaagactgtgttcaagaaaaataagtcctttaccctcatggaacttgttacttagaaaatggcttaaacaaattaaaaatcagttgatgcaatacagtgtgttctgttcaacaatactggcatgcagagggcacagtggggacaaaaaccaaagcctgagtcaaaggaaatttaatggaggaagagttactggagcttgattttgaaagagtacttcatcagcagaagatgttccatggtagtgaaaacagcatgtgcagaagcttggaggagtgaaactgcaaggttctcgcttgttctttgctctgcttcagtttaaacactcaactttctttttttttttttttttttttttttttttttttttttttttgagacgcagtcccactctgtcgcccaggatggagtgcagtggcgcgatctcggctcactgccagctccgcttcccaggttcacgccattctcctgcctcagcctcccgagtagctgggactacaggcacctgccaccacacccggctaatttttttgtacttttagtagagacggggtttcaccatgttagccaggatggtctcgatctcctgacctcgtgatccacccgcctcggcctcccaaagtgctgggattacaggcttgagccaccgcgcccagcctcaactttcgtttccttatattcaattagtattttaccttatctcaggacactctatctaaaacactttccactctctcttcttccaaaccacagtcatcaactcttgaaaaacaacattgtaggatttagtgacgcatggttcttcattcaggaagccatctatcattaactctctggcaatgcttattttaaaataactttaatgattttctgtcttttaattatttattttctatttatttatgtatttctattttctttttcatagacaaattgtaaaaatgtcaaaaaacataaagataaaaatatcagcaaaacctaaagatgaaaataaaagtaatccacaaatccacaccaaaaataacctctgtaactattttattgtgcatatttccagattttcttcatgtatgtattatgcatgtaaatattatttattgaacaaaaattatagtgtgtatttctttttttggacatcaaatttttcactttgcataatgtagagatatttccagagcaatagttacttttcattgtcatactttttatggttacataatattctattacatagacgtgccataacttatttaacaaatttttaaaataaatattttagttgttttcattttttttgctgtgtactcttacatgtctgatgtgcttattttatctcaatgttgcaggacaatgtgcatttgttgacataatactagacaattcttttcaagctatgtcaggattgtgtgtttcagatctttgattagagcaaagcatcttagaggcaaggccatttctttcttatgtttttacaggtcagtaaagagaattattcatataacaaggctgtccaggtgggttggcacaatctactaggatgacatcccaatatacagttgtttagagatgacctgcagattttgcgtatgttcagagagtggctggcctgttgacatgggaagcaaaagggctggagcagagtagtggtgtatccattagatcagatgatgtcccaggaaggttctagtacacttagcaaaaggctttaggagagcaactaaaactttaaattataaatttgctagatattttctcaggtgaggaaagtagtgggaaagagaggctatcggggtagaaagaagagcatgtgggggttctgcaagagcaagaacaggaactgtgatgttcatgatgagtcggatcatgttaggacctctgctgcccctgttggttctctctctactcagcgttcttcgctaggctcaacttcctattctttcctttcaactctttattttcttgctcaatcatctcctacaaccagaacataaatgcggctacaaacaatttggcaatagagtttatatctttcctgcacaccagctaatcactatatttacccttattgacccaaatctttttattcccctaggttggaccagttttcttttgaaatcgtggtaactgctaaactgtaatctcatggcaaaagagaaaccctctgtcctattggtaaaaatgtaaatgaggcctaagtaaatagaaaagcaatttttatcaagaaatttcttttttgataaaaagaagtttctttttagagattcagatgctcatttagtttttggaatggccaaacacagagttatctaatttaagtaagtataagtgttctattcaacaatatgagttttaaaatggctataatctcaccaatacatgttgtttattttggcaaaatttgtcttggaataaaaatattcttagaataaaaatgatttctcctgtttccagttggaatatgattaatgttttaacttgttgatgaaacagcagttttataatccaggcaatcagaaatctattatttaatttctgaaaggacatgaaatggtgatagtatcctgcagtagcgtgtttgcctaggcatcaggctcctggagcatctttgtatctgttctggtgagctgaagaagattggctctaattttcttaaactgctggttctacaatatttatggcaggtgttataaaggggcctcctccttccttctgacttgagtagcctaaaaaataagtgttatctgtcttatgtcttgatcaaacttagaattgtttcaaaaagtagaaagatgtgatgaccatagttctatttctactgttcttgtcactaattttggagataatcctagatattaggggtgagtaaacaggtgaagctagtgtggtagccagctccaaagaccatttttcaacttgctaatgggatggtacatggcagagaaggggaactggctcagaatctccctgctattctccttcctgtgtcatgaataaaaatcacacatctagaacaatatgacttctctttgggcccatttaatttttatgattttaccaatgattgtaaaacatgctgaataaagggtattttatagttggtggtgggtggagaaaaagtagaatggatcagcaattcagaagtatcgaggcactaactaagcaaatgcccaaatttttcagatataacatagataagaaaatacaagggatgtggtcagggatccaggtatgacatttaggaaagcaaatacaaggaggcaaaaatattagagactgtattttgaaccaatgagctatgttaattacagttactagaacatgatctatttactaaatacatggaatttcccctacattcagatatttaaagtagaatattatgatctggctaggtgattgaactggaaattatctaggtctcttacaaacgtatgattctgattccacagccttcttacatcactgtgctggctatttcttcttaatgtgcaacatccaattagctttacaatgatagatttagtaaaatgcttcactggacttcacttctgaatacctaataccactttagtaaaggcagccaagagataaagaggcatcttggtgatgaaggtagttggcctatatcaataacactaatattttattttgcaaaagatttagcacttattttaaggcaacgagtttgctatgtgcatgtttaccatctaacacaataatgtcatctgcaacttgggggatattgagtagctgtgatcttaaaacacaaagtttggttctaaatgatcaatttttatttctataaatcatcaaagaaaaatagacccattactctatagttttatcatacagatgaattcttgttatcttccacaattttaccgacttgcttttttacggacactagaaagtagagtctgtaaggttctaaaaagaatttgcaacaacttacctcatatgcaacagagcattggcaaattcaatcttctaattaaagcaggaaaataaatagctaatttccctataactgtgttacttaaagtttacaatttagagaagtatatgcattatttattatttattgactatgtattaagcactatgaaatggctctacatatagatgtaacctttaacctcacaacaattctgaaagatgttatctcaaaatgaaagactaaaattagttagcagttgccatcagtaaaggtaggagaagaactttaaaagctgggtttggtgactcacacctgtaatcccagcactttgggaggccaaggtgggctgattgcttaagcccaggagtttgaaaccagcctgggcaacatggcaaaaccctgtctctacaaaatatacaaaatttagccggccatgttggcatgtctgtatagtctcagctacttgggaggttgaagtgggagaattacctgagcctgggaggccaaccaatatctatatagataggtatgcatccacagtatacttagtcttagaagtctaaccactaatcatttaaatactagtattcatgtgcatgctatactttcaagcttaatatcaagccaggcatggttggggaagaatttgtcaaaaaataaatataaaaaccccaagatgagcagggcaaactggttctccaaatatagcctcttaggagagaaaggaggagtagagtttacccagccaagtttcgctttggagtactcccaatgcagtgtaaccaccacagccgctttggcattgatgttgatcagagccagcaaaggcgagggtggagcccttcttctgacaatgaaaactcttcactgagtttggtgagaacaacatgagctcactccctaaaagatctcaaaattcaacagaattataaatcatgagaaacatattcttaactctggtacttcattttaagccgaagttacatacaacgtatctttttatgaaactgaactatataacttctgtaattagcacattatctgaagaaaaaatcagttgatctggggaaaatgtgactaatcctttgcaaaatattctggggaaaaaataaataaataaataaataaataaataaataaataaataaaacctcatagatccctgctctgagaagtaatgagacctgagacctaatctgactgtggtgctagctctaccatggactgagtgaggctcatttaatcttctctgcttcaactttgtcctcaatgcaacgagagcataaaactgattgatttgagggctgggtgtagtggctcatgcctgtaatctcagcactttgggaggcccaggcaggcggatcacctgaagtcaggagttcaagaccagcctggccaacgtgtcgaaacctcgtatctactaaaaacacaaaaattagccaggcgtggtggcacgcgcctataatcccagctactcgggaggctgaggcagaagaatcgcttgaacctgggaggcggaggttgcagtgagccgagattgtaccactgcactccagcctgggcgacagaacaaaactctgtctcaaaagaaaaagaactgattaatttgtaactttctgctcaactccagtattatatgcttccaattaattaattaacatgttcatatgaaatcttctttttaaacaaatttaagttgaacggtattatgatttgtcttccacgggaatgacagccattccctcaagcaagtttttaagcaatggtcagtaagatattgagagacataggggaagagcctctggcggctgtgttgagaccattctgtggaacaaaagaacagaaggaaggaggaggctactgtaatcatccaggctttgaccagggtgattctgcagaggtgttgagaagtaactgaatgtatttggaaggcatggccagtgggatttgcctatggagcgaatgtgggtcatagagaagagtcaaaaacgattctgcagcatttggtctcaacatctggaagggttgactttgatattgacagagaatcctgtgtgaggagcaggtttgggggaagaagagtttaattctgcaaatattaatttgagatgcctactaagcttaatatggcaatgttgagtaggtaattggacatctaagtctagtgttcaggggaggcatatgggctggagatatacatttgggctggagatatgcatttgggagtgattatctctacgtgaatggaatatgaaatggtaagactggagaatgtcttctagggagagagagtagttagagagggggtcccagagccaagttctgcatcccttcaacgttccgaggttgcggagaagaggaggcagaaagtcagcatgagaagagtggccagtgagaaagagaagagaaggaaagaaatggtttcaaggagcagggagttcctcagccaggtcaaatgctgttaacatgacacagcctggaagaaacctcacaagcaagggaggagcccattaaaatgggaggtgccttatctacatcatcttgtgcgtcgggacagcaagcacaggaaagaaagacgacttttaaatttgctatattcagaatgtagataggagcatatcaatttgtgtaaaaatattatcacctgtttctaaattcagtctgctaagataccatctagtaatttctttcaagaaaaaatgcttttctgtgttttcatactgttgatacagccacccaaagtgcctactttccaagtggaagaatgcattgtagaagaatcttttccaagtctttaagtcaaaaaatatatatatttttctctttttcttacttgtcatttgaaattattcctgggtttccttgtaaataggatagatgaaatgaatgaatgccctctaatagaatgtccgctgattaggggacacactccatgccccacttcacaaggctctttgtagcatgttcatcgccctctgagcctcctccttcagctagcacacactgatgctaagatctgtaatttaaaactcctcttatcttctaccctcctttcatctctgactacaccagagaacattcaggggtttgtcaggcggcctgtgaggtcacctgtgtcttttgcacttctctaactttggtcaggaaacagcgctgccagccacttggaaactctgattatggatctggtctgatttgcccagtcgctttgtgggggtcaaacaaaattattcccacttaggttagtcctttctttatttgatccatttgcctgtggatttcagaatctcatatattaaaatgatatttttgcatattctcagagagagaatactcttcttggtagcattaagaagaggccccgctagtagccagcagtcttggagaagaatgagtcacttaataactttattattaagctgagatgttccacagagcggattaggcagtaggttggctaattatctgatatttccttgtttgtttgtttcttttgagacagagtctcactctgtcacccaggctggagtacagtggtgcgatcttggctcactgcaacctccgccttgtgggttcaagtgattctcctgcctcagcctcccaagtagctgggattacagacgtgcgccaccacacctggctgattttcatatttttagtagagatggggtttccccatgttggtgaggctggtcttgaactcgtgacctcaggtgatctgcccgccttggcctcccaaagtgctgggattataggcgtaagccaccgtgcccagccaattatctgatatttcaagtcactggattcttacaagtttttgttctcatttatgtaggttgtatttatataggcgcaagccatggaattacccagcagaagatgcttcttgctttgttaagctatgtactgtttatgtgatattacttagaaacgtctgcttgtcataacaaaatctagcatttcattctgtttccacagtcatcttaacatgtaattacagtacattgaatgttctttttccttagaacaattaaatattaatttataacaataaaaacaaaatacacattttgtctttacttcctaaaatttccacaacaaacatgaattactgttattgatattaaaaatgaaaaagaaatataccaccaaagaatttctatggtaaatgttttttattttttatatttagctgttcttgtttagtagtagtattcaaagaatacagattacttcccagtgacttttctagcttaatgagggaccctgggaatatcagttctagatgaagacaatacgcacaacaaacaagatacatgtgaattttccctagaatatacatacaaatctaaaatccagaaagtctggaaggcaaagaatagcacagaagaacgtttgtaaaggaagtcattgattccctgcagtatgaggcgcctaagatatatcaggttgtaataatacatcatggggtcagtcttcaagtgaatttgatttctctgtaggtgacataatgctctgaacataattcttaatgttcttcaattttttttaaataaaatttttatttggaataattttaggtgtacagaaaagttgcaaagatagatccagattgttcctatacactctttatccagttttcccagatacttccatcttccataactatgccacatttgtgattatcaagaacttagttatattactatcaactaagctacaaacttcatttgaatttcaccagtttttccactaatgtactttatccattccagagtacaatctgggtaccaaattacatttagaactccaacttttgaggaaaattaggacccgagttagacctatgaagatctcagacccaacagataacaactgagatctgcaatcaggaagaataaacagaaatagcacagacaaaagccttagaaaaatccattcaaagatgtagctatacttatgttttactttaagtaatatacacacacacacacatacatagatatgtatgtgtgtgtgtgtgtttctgatgccactgtcagggtatctcaaattttcctttattattatggtccaagaaggatatttttttaaaccaaatgttactgaaaaatctgttgactatgatacactcttggacacgagtgaacaacagtatttctgagagatttagcagcagcatcttaataaaagtatgtatataacctgggatatagttatcttcatacatagtggtaccttatgcatctcatctcattccaggttctccctttaccctcgaatttcgccacactagttatggcagtgtctctttaattcattcattgatcccaaatatacattgagaaacagttgtgtgttaagtaatgggccaagctatatggatccagtggtcttttggatgaactcagataaggtaaataggttttactatatagtggataggtgctaatacaggcattcataaagtgctatggaaagaggcttagacaacatgcatgaggcagaggaaactcatgcaaaagacatggagacatgtggtaccatggtcttttaagttccattccacctgcagcacattccctgcctgggaggcatggcaggaactggagctggatgttgaatcagggcttagaatgacaaaggcctttgatgccagccaaggggtctgaattcattgtgaaaaggatgggaaatcagtgataatatttgtgatttggaaagatcagtataggctgggcgcagtggctcatgcttgtaatcccagcactttggaaggccgaggcgagcggatcacctgaggtcaggagttcaagactatcctggtcaacatggtgaaaccccgtctctactaaaaatacaacaaattagctgggcatggtagtgggcacctgtaatcccagctacttgggaggctaaggcagttgaattgcttgaaccggggaggtggaggttgcagtgagccgagatggtgccactgcactccagcctgggcaacaggagtgaaactctgtctcaaaaaaaaaaaagatccgtatagataatggattgctagagttaaaaatgtgaggcagggttactagtgggagcttctggggtagcacggttcaggtaagaagacacaaaaacccccttcctcttctgtactggaccagcaccaagattatccttttaagagcaggttgaaatgccatttgctctgagaagctttttttttttttaactcctcagacatacctagtcatttactcccatagctcttggttcataactcgattataatatttatcacagagtgttgtaaggactgtgtttcatgtctgtctccctaccacagtgagcttctctaggtcagggcttgtgtcttattcatcttggcatcttcagcattcaggacactgcctgcctggtacagggcgtctgctcaaatatttgatgagtgagaaatggaatgaatatttgccaatcatggatagaatctatgagaaagttaacctctcccctgaaaccttaacaatcactattattca

SEQ ID NO: 5658 - DNA, 47835 bp, Homo sapiens
  KCNK16 gene - 39390460 - 39398294 of chr6; NCBI Entrez Gene ID: 83795; Build 35; sequence includes 20,000 bases upstream of initiation codon and 20,000 bases downstream of termination codon of the gene
gtatcaggcactgaacagcaatgaacagccaatcagtcagcaaacactgtatatgttgggtgccttcttatgccaggcactactactagtgctggtgctacagcagagaacaagacagaacccagcacgtgagaaactgacattctagggggaggaaggagacagacaatgaacacgtcgacaaatacgtaagattgtttgaggggataataagtgctatgaaatagctaaactatgtaatgttgtagacagtaactgggaagactgcttttagctgggtaggttggggaggccttgctggagaagataactttaaactgacagctgcatcatgagaatggagcagctacgccgcgttctgggaatgcacagtcctagcagacagagcggaaagcgagaagcctgaaggggaagctttgcttggccacagggtgggaaggaagctagagtggctggagggcagggagcaagagcacaagggccaagtcacaccagccttatgcacaggggaaagagatttggattttattctggatagagtggaagcccactgaataattttaaccatggagtgatatgatgtgattgatgctttaaaaagctcactttgtctgtcacatgtagtgtagattgtaggggccaagggtagaccagttaccaggctaccatgaaagtgccagcaagggatgattgtggcttggactcaccagtagaccaaatatgagatgcaagagaaagaggagagtcagggcacctcctgggcttttgatctgagcagcgaagagaatggcagtgccatttactgaaatgagaaaggcagggaggcatgaccatcagaggcaaggagctggagggatggagagttctggctgccctttttgaagtttcagatgacatttgatgtccaagaggaggtgtcgagtagacaggtgagcatcagtggagctcagagagaaagtctaagctagaaaaagaaatatgcaagtcatcatgtctggttggtgtctgaagccacaggactgagtacaatgtcctctgaagaccagagatggaggtattcaaattgctgagaacagccccctggggttctccaacagttgcggagagagaggaagcagagatgctgagaaggcactgccagggtgcgaaaaggaacagcagataagtgggtatggcctcaggcacaagctggagaagcacaagctggagaagcacaagctccaaggggagacgggccagtagagtgtggcaggatggaatgtggaccactggccattttgcatgtcagggtgatcatggacaagcaccatttagccaggggactgggagtggctggggagagggtggaagggaaagaggctgaggcagtgagcagatacaacccctccagggggttgagcagtgacaggagcagagaactgggctggagctaaagggaagcaggagcccagagggatgctttaagacatgctcacgtgctgaaacatgcatagagagggaaactgatgctgtggtgggagaggggagcagagctgcaggaaaaacttccttgagaaagtagaggggacagtgtgtggggcacaagtggaggaaggcttggatacgcaggatatcctttgagctgagatatcccttcccctgtaacaaatccatagaaaccaaccatcattcctcccctcaagaagcctacaagcaagcaatatctttaagttacattcactaagcttttgtacatataagagatgtgatcatctaactctctccaaacagaagaggcggaagtccaggtccctgtcagagtggtgtcctcctgctaacactgtccccaggcagtgcagagagctggattgaagggcaggcacttttattaaaatatgtatggcaaactaccatttataaatgttttcatttttattgtttcatttgatgctcttaacgctcctgtaaggcatgcagggccaagattatgatcccctgtggacaggtgaggaaaggaaactgaggcacacagaggttgtatcacttgcccaaggttacacagctgataaatggcagagccagcataacccaggttttctgctctctccccactgggccacactgtcttgaaaagctgcaactaccaagatatgcccactctgctgtcaggagttctctcggcctcaggaacaggaaccagcattgacgaggggagtgaccgcagcctctacccaccctgcagctggggagctttgctctccaaataaacagcagcctggaagtaattcatcaaagcaaacaaaacttccacagctcaatttttattccgaaaggaagaatattcattctggcttttcagtgaccacggggccacaaaggaagccaaagacaggttgacacggggtccctctgccaccaggtcccaaagggccagcaggcgtgacctctcagacatacagcagatggttctggtcccaccatgtggcacttaatatgcagcccacttatcagggcacccaggcaaacacacaggccggggcccaggcaccttctcagccaaagcaaacacctccctctccctgcctgggctctcgaatcttaatttagctcacagcgctgccttggttacttcaggagtgctcattaaggggaatttgtgactgtcagctcaggagcaggagcccagagagggcaatttaacataagcctcgccagctcttaggcttcaccaagggccaggatgaatctatttgatttaggattcatggaacagcatggaatgtttaaatccctgccaggggcaggcgtggacaggtatataacacccgtaaggggcatcagtcatccgtggagtcaactctgctgtttccaactgccaaggacagtttttatgtctgaggaaatgaggttaacccctttctagagggcctttttgtttttaatcttgcttaatccctgagtttggaagtattcccatctggaaaggaaccatggtgcgacccccataaccacaagtctgtcttctccaagaggtgttaggaagaggtcctgcctctcccagccctccagccccactcagagaaaccctccagctctcttctgtgttcagaaaccctcccagggaaagagaaagagccccgagctgggagggaaaaggcggaaattccaaggccatctctgctctgcgtgacactgggcaggtcacctccccaagcctccctctcactgtctgtcatgtacagattccacccttgcccaggctctgatcctttcccagataatctccattaaagtcccttatcaactcccaagcaccaaggaattattaacagggaagtggcctctgtggtgagagctggcccaacaccatgaggtgtgattttgctttttcttaatggtacatctgtagtgtgccctcctttctgggagcccacggtaatcaaaaccccaatacagacagagcttcatcacttaactggggcccataaagtgaatgagtttgaaatggtgccttttgtgttgaggtctgtgcatgtaaggagctatgtcttggggcagagcgtgctctcccccctattctgtagcatttcttcccaggccccaccccacccaccccctgtcattactgcatgcaagtgtgtgaggggctcagagaccatcctgggtgggagatggctcagactccatgctccctaccaccggcagcgttcacaatcctggcccaggctgcatttcaacagtgcagcagaaacatcagagcccagatctcatcagcagccacgtgcccacgggcccccagctcttgccctgccagtccttgtactagagagacaaaagcagtgagtttcagccatggccatgcctcagaatcacctggacccaccccagtgatcctgactgaatggttctgggctgtggtctgggcaccaggatgtctagagattctccagagatttccgttgtgtagcagagctgggaaccacaagtccagagtgacaggaacacatgaccatcataggctcggtgtacttgtcttcttacttcccgttctagaattcaattcagacagatcagaatgtcttaaaaataaggaccatatttgtttaattaaacagcaaggcctgccagaggtcttgcacacagaattagaactgaaagaccaagggctcacagccgtgaattatttccaatctcttcctccgcactagctggccattcaatgtatcaccaagaattaccctttcttccacagcaatatcaagccaaccaagctaacactcgtcacccagtaccaggttcctgtggccgaacctggagggctgcagctgcctgctcacctgttccctgagcagcctcacccctcaggctctctgtccactgaaatttttttaaacattgtatttattacttcatccaagaatctcagaaattctctcttgctcttactaaattagccaaactttaagcaaaataactgcatatcactcttaccagttctcacattttaatgtgctaatgaatcgacaggttttgtcaaactgtagattctgatccagtaagtccagggtggaccatgtcttagactctgcctttcttaacaagctccctggaaatgccagcactgctggtccatggaccacattttgtgaagcaagaagccaccttgctttttccaggtatctcatctgctccagcaaagagaaatgttaggcccagagaactgacatgacttgcccaaagtcacaccgtgggttggggactgtcctggctagaacgcaagggccctggttctcaatccagagaaccctctccatgcccagccatgggagatgacaggataggggccacatggtcaggaggagccatcctggaatataattaatatctggaggaaaaagcaaggagagaatctgaggattaggtaggagcatcaatgaaaaccatggggttgtccaggtgtggtagctcacacctgtaatcccagcactttgggaggctgaggtgaaggatcacttaagctcaggaatttgagaccagcctggacaacatggtgaaaccccatctctagtaaaaatacaaaaattagccagacgtggtggtgggtgcctgtaattccagatacttgggaggctgaggcaggagaatcacttgaaccccggaggcagaggttgcagtgagccgagattgtgccactgcactccagcctgggtaacagagcaagactccgtccagaaagaaaagaaagaaaaagaaagaaggaaggaaggaaggaagaggggaagggaggggaggctggagggagggagggaaagaaaagaaagaaaaagaaagaaagaaagaaagaaagaaagaaagaaagaaagaaagaaagaaagaaagaaagaaagaaggaaggaaagaaagaaaagaaagagaaaggaaggaaggaaggaggaaagaaagaaagaaagagaagaaagaagaaagaaaggaaagaaggaaagaaaggaaagagaaagaaagaaagaaagaaaaaggaaggaaggaaaagaaaggaaggaagggagggagggagggaagaaaggaaggaaagaaggggagagaaagagagaaagaatgaaagagaagaaagagaaagaaaaagaaagaaagaagagaaagggaagaaagggaagaaagggaaggaagggaaggaaggacagaagaaaggaaggaaggaaaagacaagactccagcctcggtgacagagcgagactccatcaaaaaaaagaaagaaagaaaaggaaagaaaacggtggggtaggaaaacaggcgtcagtctcagcctagggagatggagcttctgcaaagggcaaagggggcctcttccttcagagcttggggtataaatgcagctcctgggaggcaagacacagatgcagtgcccaagacccagggggagtggctggtggcctcccctccccccgattcaatcctgggaaaagtcagtgtctgcatgcacagcctaaccaaaagcatcctgtctccctttcaggtttgggaagcaattgaatttccaggaaatatccatccatgaattatgccagcaagaatgaagcacagatgaaggcagcgcccctcacttgctctggcttcagaagtgaactatgggctgctgggagcaactagtgactttgattcccatggaggggactgtgtttctttaaggatgctgacctggaggccaccgagaggctggggctggggctgaccacaacatccttcctgtggttgctggagctgctggcagggccaggcaaggccagagtgctaggggcagggtgaaggcttcagctcactgttgtagtgacgttttgtgtagatctttataagcttttgagaatgtgaaatagcaccatcaaaatataatgtcagaggatgctcacaccagtggaatgtggggggaatatttttatttttaacgatttgccagctctctcccttggcccgtgctctggtttggaagcccagaaatggccatgacaggtccaggcaggatgtcccagccacaggcaaggcagtggaatgcagggcatcctgaaggccaatcctgatctcccagaccacatctttcaccatcagcctcttggccaggatgacctggaggcagtgcctgaacagctgtgtctccagggagccatctgccctgcagggtctaaggacatcatagcacccagagaacagtgggcagctcccaggggctctgctgagagcttgagagagggcagtgtgggtaccttgggcctcacaaccttcacccagccacttgggaggatttgggctgacactccccacttccacagggaaaaacatagctgcctgggggtcttgtctccatgggccctctccatgacagatccaagggaaggtgggcagccctcaaggaggttcttgaagaactgccccctgggccagggggttccaacccagctgcagccagggaggggcagcggagggtgagcaggagtggcacctggaaatgaagctaactggataaaagtgctggtccactgctcctggtgtctctgtcctataaatacaggacctgatgaccctggaggggagcagagtggtaatatagtataattggcttgattttctttttcgttttttaggactgggtaacaggatcatgcaggagaagattaaaccattacatttctaagctaggcaggcccatcgagctcctctaatccacacccctattttatataattagaaggccagagtgaaggggagattcagcttgctgttctatgccactgacaaatgtcccctcttcagggggcttcccctgaccactccatctcgagtcaccccctagttatcccctatcccattaccattttttctgcatcactatctgacatgttatccttccgaacttgcctatttttgaaatacctgcaaccccccataatactaagagctccaatgcaacagggacctgtttgtcttgctcattgctgtgtcccaagcacagagtcgctgttcagtaaacggtccttcagttcatgagtagacgagccagaacccagatgtgtttctcaggctggtgtcactctgacttcccccaggctctgactgaatcccatcgggacaggggccagcatctctggtccactcctggccctcacagttcaatggaacatagtaagccctctgtaaagtctgtagaaccagaggaagaccaaattctgattctagaagcctccccaagagtccatggaacacacatgtaactgcacacacacacacacatacacacacacactctcaagagccctgaagatggcatggcatttgccccagtcccctatgtagcagcagcagtattcttggcatgccttagtgccctcagccctctagagctgggtagagtctactaacttttattttcttttatttttactttcttttatttattttttgagatggggggggtctctgtcagccaggctggggtgcagtggtgcgaccatacctcactagtcagcctccaactcctgggctcaagccatactcagcctccaactcctgggctcaagcgatcctctcacctcagcctccaaagtagctggaactacaggcatgcaccaccacacctagctcgttttaaattttttgtagagacagggtctcactgtgtggctcaggatggtctcaaattcctggccttaagcgatgctcccgccttggcctcccaaagtgctgggattgcaggcatgagccacataccctgccagagtctttcaacattagatctcccactgagacatcatctcctggatccaaaggccttactgacagagatgtgtggcatggccccatgcggggtgtgaaccagcctcctggggcaatcactaagacaggaaaggaaatgaagacagaaaaacacacaacatgggatctggggccactggtgtccagagcatatgcaaagtgtgtgcagcaactggccaaggggccttttgctccgaacatcccctaatggaagcccagcctttgatatggacacatgcttgacagcagtgcaccttcccagagttcactggcctctgcaaatgggagaaattgatgcaatgttttgaaaagactttccagcaatccacctgggatcagtggagccacggatgacaagaagtatctgagttcactctaggccaaaatgtgggattttcaaaaacattttctggaaagcagcctagccagtgactccagcccagtccctgctagaattcaactggctctaccaatcccttgacaagaagtagggtggacggaggttggaggagggaagttaaaatgtagcttgcccagatcttgctaaaaaggagttttagaaagcagatagagaaattgtggtatactgaatacatcattttaattcttcaccaccagtatagaattacacatccaaagctttgtcatggcccactttgactaatgtggtgttggcaaacctgatccaggcagaggcttgaattgtgctctcatggttgagcttgcctcttgctccagtgatctctcttgggatgaacatgccatgggtagctgctgccccttcagcctggaacatccagagagcagacctgagcccagtctacagcctggagcagagcctcccaggcaagcccagcccagatcagctgaactatggctcacccaaagacctattggcatgagaatatatgctgcttgtcataaaccactgaggtttagagtggtttgttatatagcattaattgtagcaatagcagactggcacagaaattggaacccagagacagtatatgactggatctaggatttctcagtgcagagttcattgtctctccatgcagcctgtggaaaggcactgagagcatcctgtatatggaaaagcaggaccaccacctacagccatgatgaagcaacaaggacctgatttaccctcctgctttaaatgactaaaaatgagacaaaatcctctatacaaaccaatggttttcagccattggataacaagcaatatagggtatgattgatccgcaagagaagggaaacaagtgaggggagccctatgattgctccaacttactgcctgcagtgagttttcaggctgcagcccaggaagggggaaccaggtagagcccagtggtttccctgagttgaggaaatggagctgggaatccagggaggacaaagtggcttaaatttgcaaggcagagtcccagggatgagagagagagaaggagagagagaggagaaaaaagagagagaaagagagagagcatgctctggagatcttcagagggttacccttgagtcttcagctaactaccgatcaacatctgcatgtgaagaaattacccaaggcaggggaaagaaccaccaggaggaagcaggtggaataatttcctgagataacactgtgttgggaagagttcatgtttccaacagccagagtggagaaacctcccaaaacagtcattgtatagagacacataaggtactgcctcagaagtggggccaaattagtcctagatgatagattgctctggtcccacctaacaaagcttaaaaagccagccccaaaggagtcaaattgtttccagtaagtttccaagtaacttcaatgagtcccaaaacaaagcttcaaaatatctaaaggaatatgaaaaacaaaccaaaaagaaaccagcatccaacaatatagaatccacaatgtctggtgtccattaaaaaataatcaggcatgcaaagaagcaggaaaatatgggccatgagaggagaaaaaaccatcaatagaaatagaggccgggtgtggtggctcactcctataatcccagcactttgggaggccgaggcaggaggatcacctgaggtcaggagttcaagaacagcctgttcaacatggggaaaccccgtctctactaaaaatacaaaaaatagccgggcatggtgttgcgtacctgtaatcccagctactcagaggctgaggcaggagaattgcttgagcccaggaggcagaggttacagtgagccgaaattgtgccattgcactccagcttgggcaacaagagtgaaactctgtctcaaaaaaaaaaaaaagaaaaaacaaatagaaacagccccaggcatggcacagttgatagagtaaatagacagaaacattttttaaaatgcaatgggtgtgtgtttcaaatctaggcagaaaaaatgctccttgtaattccttaaacataagcatgtctcattcatctggtcattgttttgacaaggatgtgccatccattgtgctaagttctgaggagtcagaggtgacagagacagagaaagtgccagcattcttggaaccttctaacgaaggagagggacaagccaggcatggtggctcacgcctgtaatcccaacactttgggagactgaggctggcggatcacgaggtcaggagtttgagaccaacctggccaacatggcgaaaccccatcgctactaaaaatacaaaaattagctgggtgtggtggtgcgcacctgtaatcccagctactctggaggctgaggcaggacaatcacttgaaccctggaggcagagtttgcagtgagctgagatcgtgccactgcactccaacctgggcaacaagagcgagactccttctctgaaaaaaaaaaaaagagagggacaataaacaagtaagcaagacaatctgattaagaaggagttggggttagctgggcatggtagcaagcgcctgtagtctcagctactcgggaggctgaggtgggaggatccttgaacccaggaggttaaggctgcagtgagctgtgatcacaccactgcactccagcctggatgacagagcaagaccctgtctcagaaaaagaagaaggagttgggggtggggtaggatgggcttggactcactatcaaggtgggtgggagtgtgagaacccggcaaggtgcaaagagagaagcagggaagggaagcttaggacaatgatggcaggttgggtattgggtgatgggaagaggcaaaggacgtggagcttggcaaaaaggggacttgtggggatttgggccatgtgagcatgtgggggagacagtgttccttccataacacgtgtccagggactgccagggctccgaggcagagcaggtgtagagaggttggctgtgaatgttggatgttgaaaacatatgtgtcaaatgtgggaggaaaaagcagtgtttccttgaatacaagctcctcctcaccttgcgaaaagtggcctctgagtgtagccctgaatgcatctcccaaggaataggaggaagcagcaaccttttcagagttaactgctttatttgggttttccatggcctcgtgccagccagcagggctgagccagtttcacccacactgagagggaactcagcaaagagcaagcagcatgccagctggtactcttccctctccattcactcagctcctgatctcaggagggcagcccctccccaggccagcacccctccccttctggccccaggtgtgggatgttgttgttttcttttctccgaaacatctcctgggtttgtcttttccatcactgtctttagactgaggcaagcagtccccatgccttcagccccatgttttgggggtaacctgtgctttgacatgctttgctaaaaactttctaagtctccctctggtgctgggaccagccatgaccaacaacgtcatccatgcaggccacccctaacatagtccaggcctcatgtgggtctcagttcccttttcttctttcaggaagttctccagtgcatgcatagggttgaccagatgtcccaaggtgctctaggacttatgcctatgaagctgttttagggcttcctagtcagtccctggttccaggaaagcagcctgatgaggagatcattcccgctggctggtgtggcatttcttttatggcactacctgggattgggccaccagacctgcgctaacatgctgatttgatggactcttaacatcataggacaaagaatcgtcatgtgaaccaattagacaataaacaaatgcctaagtgcctcttctctgtcattattctaaatctacacaaatcaatcattatacctcacatgggctcatgaatttggtactaagtttttttcatcaaattgtttatacacacaggggtccatccacaaaaaaatatttgccaggaccctcacacaccaagagcagctggccctgtctctcctctggtttctgggctcagtatctctcccaggccctggggacgctctgctcctccctgtctcagcggcacccctcatctacatcctggctcacagcagcccaggcttcttgctgctgctgcagctccaatgactctcaaagctatgggtttttcttatagtctgaagaggtgaggggatgtagggagattcattaacaggggatggccagcagatcttttaacaatatctttcatggccgggcacagtggctcacgcctgtaatcccagcactttgggaggctgaggagggtggatcatgaggtcaggagttcaagaccagcctggacaagatggtgaaaccccatctctacttaaaatacaaaaattagccaggcatggtggcggctgcctataatcccagctacttgggaggctaaggcagagaactgcttgaacccgggaggcagaggttgcagtgagctgagatcgcgccactgcactccagcctgggcgacagagtgagactccatctcaaaataaataaatcaataaaaacaatttcttttttcaatttgagtggccatcaagagatgagggtatggtcttcccactcttgtcatgcttccaagggcaccggcctaatatgccaggacaagctgaccaccccttcattaaggttcacagaagagcaatttccctgcaggaatgacaaaaccacagtgacccagacaaaggagtggagaactagagcctgtgacagacagtgtcagtactctgccagatccccccagcccgcctggaggtcacatgcagcacttgtggaaagcctccatctataccagtagcattctgtcctaagcacctgcatctttctacccacagggactctctggccgcaggagtgctctcagcccacaggcagggcaggctggcagtgcaggagttaacctccccaggagcaatcttcaattaacaagggacaagagttggtagataaacaccccagcttccttgccactctgtggaacaactctacagtgtgttctgcacagtctcccagaggtccccagcgggatggggccccagttgcccgcaacagtcacctgtgcgaaaacacaccctgaatcgactgccttctgttccccactcccctgcttgcgcatcctggatcaggtcccagatgaaccacgcacacccgcattgtgtcttgggacctgcgctgagggaagtccaacttagacaagggcatccatttcagaattacgggtaagggctcttgaaatcacactctctgggctggtggaaatgggagccctctgcccctacttcaaccagagctccactcttaagtaggcttcagattggggctctgggaaagatttcatgtgcaagaggaatcctgctccttaaaaaaaagaaagatgcagtttctgagcaaaattagtaacaggtgtgtttgtttgtctgtttcaaggctttaccttgaatcacccttcagctttccctggtctgtctgctggtcacagcacgagctggcccacctctgagatcatactcacgaggacacacaaagacccctacaaacccgcgccaccgccgcctccacgtaggacgctgtgggggagactccgggagcccaggctcccacatcgaaagcttgccgctccagccacgtggtgcaaactatctggggggcacagttagggagctggcatctaaaaccagtgctctctgtctccacttgccctttctactacaaggcacacacctggggcaggtgggccttatcttctcccctgtgttctggtttggaaagtgtcctttttcacccatatggatatgtctattgaggggctccatagcgaatacctatgttgatggtgggatgggcggcctgtccagtccttatctccaggctcgttcagatggaaagaggctcgtgcccagctgctctgtttactctgcattctctgcccattgtacaccaaatcgattgggcagatggggagggggtgttgtttttcttctttttccccaatctccttattagttcagcctcagaaagtcccttatcacctccggatgtcaggccacactctgtcatcaggcctggccatgtcaggctctccattaattgattttgccctcccccttgggaagcataaattggctctgcccattagcagcaataattccctgaaagggattgtaaatcatgcctggtgtccacccagagctcacagcagagtagtgcccacgtagggagatgttggacagagaggtctctgcagccctgcagtttttctcctaatcttgaccaagcgctgacctcacaagaccacagtggactaggaagagtagctgaatcaggtcccagaacatggagggcgctcagtcagtgtgtgtagaatgagttaaggcaggaagcgagggaggcaggatgggaacatcctctctggtgcagagagcttttatcttctacaagctctctctctctctctctctttctctctctcgctctccctctctctctcgcagtctctcttttgttctctcctccttattacaaaaacaattgttgcttgtcctggacagaaaggccaccgtatctgccacggcgagtgccttccaggtggtacctatatgtgtgatgcccccatcccctgggctggggcaggtcagctgagggggctgtttgatccaaggctgggccatcctcagcccaccagacacctgtagagtagccaccatgaaaaggcactcttgggcacttagtccatccataaaggatttaagccaagagataccaagataaagaagcagagggcaacgggcatggatctgaccagatgccaggaggtcagccaggagtggagccccaaggcagagaaacggcagacgggaagcacctggggcgagtagagagtggtcaggccaggctactggtggaaagctaggaggctccagaaacctggctgctccccagttcctacagcacagtctgtgggcctcttgagctgagatctcccccaaagtccaccattatgttgccctttctgtggcttttgtggccctagggttttcagaagtcccccattaaactgaacatgcttctgagaaagactctatcctaaaccccagccaggtgaagtcttattgggcttgggtggtttgtgaaaaactgatgtaagagggagatgtgagggtgtgaccagaagagagtagagaggcagcagtggagagaaagagccaggaaaggcaggaggaagctgtgctggctgactttcccagaacatggtagagtctcaacagatagccccagcgcacagtaggttcccaacagatcattcataaatgaatggagtgtctgcccacagtgagcctggtacacttcctgcccaggacctgagggagggagggcaccttgatggctgattcatccctccctctaccccagcccatctcagacgtccctgtggcccactacgttcatccccttctcccatgcagatagtccattctcttttccttcgtttccgtcccccttagaacaaccgtcattacctgtggactgtgtccagactgctcaaagatactcagtgctacagagttactcagtcctgcctgaagccctgcagacatccacggatgagctttctaagtgatacacgagagagctctccatgtattgagtttctccagggcaatcgaatagggtttgactctcacgctgcctttcagatttaattctaactcttgcttaagccaggagctggtgcatctgtagcagaaatgagtgccagcactctgttgccccactgattccagatgcttccttctccctccaagacaagcccacatcccaacaaggtgccgtctgggaaagctcccggaccatgtgaagtggggcttgcacagaaccacttcagagatccccagatggcctcagaggattccagaagcagcagaattccagagaaggtgggctccatcacaccacccccagacagggccgtgcctaagccacagggtggacaaaagcctgcaggtttgtcactgcgtcgggacattcttaatgaacagcccacacaatgtgggctccacctccgctcactgtgatttgttgttgtttggtttttagcagaaccctatgttactaccaatctcttgatcacccacatacctgaaaaataatgtctccctcttgcttttatcttctacaaggtctctctctctctctcgctctccctctctctctcgcactctctcttttgttctctcctccttattacaaaaacaattgttgcttgtcctggacagaaaggccaccgtatctgccatgacaagtgccttccaggtggtgcctacatgtgtgatgtccccatcccctgggctggggcaggtcagctgagaaggccgcttcatccaaggctgggccatcctcagcccaccagacacctgtagagtagccaccatgaaaaggcactcttgggcatttagcccatccataaaggatttaagccaagagataccaagataaagcagcagagggcaatgggcatggatctgaccagatgccaggaggtcagccaggagtggagccccaaggcagagaaacggcggatgggaggcacctggggcgagtagagagtggtcaggccacgctgctggtggaaagctaggaggctccagaaccctggctgctccccagttcctacagcacacagtctaattaccagaaatacctggagtgtgttctgatcccttccaactcaaataagccttgaacagttttttaaaaagaactcaggccgggctcagtggcttacccctataatcccagcactttgggaggccgaggcgagtggattgcctgagctcaggagttcaagaccactctgggcaacatggtgaaaccctgtctctactaaaatacaaaaaattagccacgcatggtggtgcgcaactgtagtcccagctactcaggaggctgaggcaggagaattgcttgaacccaggaggtggaggttgcagtgagctgagatcatgccactgcactccagcctgggctacagagtgagactccatctcaaaaaaacaaagaaacaaacaaagaacaacaacaaaaactcataataacaattgggaagtaacataatacctaatggtggctgaaacaaggtttatgttttcaatataaaaagaaatctagagaggagtgtgcaggaattggtccagtgtctttgcagtgcccatgacctttccctcagggacacaagatggctcagcaggtccagacagaaagaggcagaaatgcggggccagctgcagctgaacccttggtcaacagacaacaattttgcccaaacctcctcagccaactctgcccaatcatggctggacctgggcacgtggccagccccagctgcaagggagcttgggaaagtgggtgcaggggacgcttcgaccctggggtctcctccccaggctttaatgtgtttttctcccagtggcctagcctgcacctggagctctccttcaggggtctctccacaagctcctggagccatctttcctgcacgtgcgcaaagccagaaatgcatgagtgacggactaatgtggggatatgaaggcccaggtcccctgctgggactcactggggtgcacttcacctgccagagctcccaggaaccaggctgaggctgggactgtggtgccttgtttggctttctcctcagcctggccctcttgcccactgtcttatgggtcttcagtgacttcactgctctcaggggctgagacagaggggagcaagattagcactatgacttagaccaattatgctcaattacctggggttaacacttacaaagccggggttctgctagctggggaggagggaaaggatactcagcaggcaactcacagtgtctgcagccacagctcattaaaggaaacagcagaaaacacagcagagatattggaatcctcgccctgggctagtgagaatataaaatggttcagccactttggaaaatagcctggcagttcctcaaaaagttcaatacagagtggccagatagtccagaaattctactcctaggtatgtacctgtgagtaatgcaaacacatgtccacaaaaaaaactcatacacagaggttcatagctgctttgttcttaatagaaggaaacagggacaacccaaatgtccatcaactagaaatcaaatggataaacaaatgtgttatagccacacaatgaaatattactcagccagaaagaaggaagaagtactgttacatgttgcaacagggctggatcttgaagaccctgtgaatatactaaaacccactgaattgcacactttaaatgtgtggacgatacagcatgtgaattatatctgtataaagctgttatacatgtacataaacaagcatgtgtacacacacacacacaggcaaagagaaaggaaagcactctcaattccatccactcagagacagcccctcttaccatcccaggatcaggatatacttatagtttctttttaattcacacatatatttcaccgacatatcctctgaaggtaacccactagagggcttcatgcaagacaaattagcaagagttataaaaccaatgaatccaacttatcagcagaatcaaccctgatactcttaccatcaggctgagtgagacaatcacctgtctatttactttgccctgatttgtcacgcagtttactcatcctgaggttcccccaataggcagttcaattatcctgccccattttgtagccaaggcaactgagtagaaggtttattcatacccattctgacctcttcccagctcctaagctggggtcttacagccttcaagggtgaagacgctgggggcggccgagagagcccactggggcctggacagagtgagcacacctatccgatttagcccagaaacatctatccaacttggagacagagagagagacatgaagcactcaggagaacctggtaggtctctttgaagggtccctgacactgacttgctgctgtccatggaaacaaaggccgggtgggggtggccggcctgtttgcactcacagcatagcacttagtgcagccaagctgagccgcactgttcaaacagtctccccagcctccagacacctgtgccgaggaggagggcagggcaggcggcagcctgggcacaggcccctaggtgcttactcctcacctgtttcccacctctcccccatagccagccccacggccctggcagggtcctggccacagcatgcccagtgctgggctctgcagctgctggggtggccgggtgctgcccctgctgctggcctatgtctgctacctgctgctcggtgccactatcttccagctgctagagaggcaggcggaggctcagtccagggaccagtttcagttggagaagctgcgcttcctggagaactacacctgcctggaccagtgggccatggagcagtttgtgcaggtgaaggggagcgatgtgggattgggatggagaggcttgggaaggttggtggaatggggttcctgtggcagatccacagtcctcacccaggagctgatgccccatttggaagaagagtgtggtgggaacagagagcctggtgagatctaatcctggattctggccccaggtctacaactggattgatgtgtgaccttgaacaggtcacttaacctctctggacccaaacagcctcatctataaggcaacaagaataaccatatcggtactgcagacatttgacagcagattaaaagcactctctaagctgtcacttgctggatgaatgggaactatatgtcagcgttatcaacgctatccaaatttcctcctcccacactttcatacttccccttccccaactccagggctgcagctccttctgccctctcccagctcatatccctgggcagacggctgcgggtgggagacacagataaatgccaggagcagccaccaccaagctgtcctttcctggcctgtttgcacctggagttgggtttggtgggcaatggccaaggtgactgagcttgccagcactgcacccaaatggggctctctcttggtaacagagtgggtcaccccctgcctgggtcctttctggtttcctctttcccagaaacaagacaaaaccaggtgttgtggagggaggtgaatgcatctgaaataggcactggagcgagtgacaacatcccctgcaaaggaacagaccaagtgccaaatcaccttgataactggcatttactgagcattcacaatgtgcctaaaacagtgggaagcagggtggtcatgaccagcttaatccaatcatgatccactcatcacctgacactgagcgtgttacaggtgttttctcataattacctattacaatccctatctccactttgtagatgggaactgaggtagaatatgttgaccaaggctgcacagctactggtagagacagcattcactcccaggcctctggctctggagccccgggtcttcaccacacaaattagcataagtgctgggggcaggatgcaacctgaagcagcagttctcaaagtgtagtcccgggaccagaatcagcatcacctgggagcctgttagaactggagatgtcaagccccactccgcacctgccgactcaggaactctagggatgggtcctgcaggctgtgtgtcaacaggctctccaggtgatgttgaggaccctgaagactgagaacagctggcctagaagatgatgcgtgggctgggtggtcacagacaacattctgtagctgtgagagaccaggaagtgaggcctccagcttcaggttttactctcttctccctgatggataaggttagtcaaagttgggggaccatagtaccacatcagggttgagaacagttcaggggcctcccaaaaccctgggagtaaggcagaggccctggagaagctgaaatctcctccctcagctctgcattggaggtgagagccaagctggagggcgtgggaagggttggtagctgcaacctaactcgctctgctaaccaagacgaaaggaggccatccgcttgattgcagccccgaagggattgccactgattagcccctggggcctccccagggaagacaggacatccctttccctgagagtcctcagcctcaggagagacccttccttgccaggggcagttgagctgggtggcagaagaacactggggtgagattctggaagaagacacattcctgttgaactctcagacgcacagggcgagttgagtaactagtattaaaagcagtattaaacattgcctctgtgacgaaacactgcttgcccaggttcacaaaactgggaagtcagaacccatggccacctgcatccgcccaccggcactcagcaccctcagcaggatgagggctgcaggctggcagtgggggatggcccaggactagagtactgcccccagaagtgagggtctccagagaacgagcatgttcgggaatgttgggccctggccactttgtggatgtgggaaagaaagggaggccaaagtccacatcttaagaggccagttcccgtcaaagtgaggagaagcagacagcctgtgaccgcagatgccctgactggcttggcccaccagggccaccccagccctgatctaagcacacccacccagccagcgggaactggttcccataggaattggaagccagaactgttgtgtccctggcttcctcctgcctttggggctcttcggtggcaaggctgtgctgctgctctgagacagtccacaattaaagaggagagggttggggcaggggaggagagagccctgcctattctccaaggcggctgggcccagggactggaggttgtcagcagtggggcagcgaagggaggtgttgtaggcttgagccggcaaaggttcgggtcttgtgaaaacacatgcaacacacatacaaacatgcacacatgtgcaacatacagttgccatgcacaacacgtgcatacaacacatcacatataaacaaccaccacacacacacacacacacacacacacactcacacgtgccacctttgtcttggcctctgttagaatttctcccataggcaagggctgaggctcactagagagcagcaaagagcaagggtgcccactcgcctggacacttagggaacacagggctctctttcccaccattagcttcatagcaggcagcccatggcttccctgtggtccctaaaccctgtgttccccagcaatcccttccagacatacccaacctgaaatcctcccattgttctaacagctgatgtgggtgccatccttttggccaccagcagcatctcccacgggacccctccctgagcatcctccacctcacccctcaggcccatctcccgccccagcccatgcttgcagcccacacctcagtcagccctggccagtggaacagacagtggaacagacactggagttggagtccagtcaccttgcacaggtcacttagccactctgagtcttcatttcctttttccatgaaatgggaacaatatcatctaagagtatcattagatgagatgacacaaaagcatgctgccaaaagcatggcaacaactggtgcccagtaaccatcagctccttcttcctcccctgccatgccaccccctacaggtcatcatggaagcctgggtgaaaggtgtgaaccccaaaggcaactctaccaaccccagcaactgggactttggcagcagtttcttctttgcaggcacagtcgtcactaccataggtaaagggctggggtagagaagagcttccccaaggcccctgtcttagtttgggctccccaaaagcagatgctgagacaaggatgtggtttgtctaggagattattcaggaagcccagggagggagtgggtaagtgaaacagtagggagaaggtggcaatgaaatttgcattaattagcagattactggcttgggtgactgagctcacttctccttgggaccctctgagaggctagatagagcccttcctcagaacggtccagcgagggacaagaatgaggggccatttagctaccaactcctgccctcaaaggttgagagctggtcccgagtatattagttccccagcattttgaaacttcccatagaccaagcatactcctttggccagaagaatctctcaggtagagagagatgtgcagaaactgggagcgggggttgatttgtatacaggaactgtccaccaaagcttcaggtggtatctcatgtgttctgagggaacagggcactgacagcagctgctacaccccctcggccagaaaactcactccatcccaccccaaggaaaccatcagatccaggtctaccccatccattcagttaagtccaattccacatactttccttgaactcaggtgacattccaggcagagtgatggagttgggggtgagagatacaaacttggatcagacccaggctcagcctgcaaggaacttccagtccaacaaagaggaacatgataaatacacaaaaaaaagtaatagaaaacaaagtcgataattacatagcaatgacataaaacactatggggaaccacacccagaagggagaaggaaatcggcagtcaggagggcttcatggaggcagagtcatttgagatgggccttcaaagatgagcaggagtcctataaataaaaatcattccagcagagttcatgggaacaggggagcttccccttctcacccccagaggtggtgacagacaaacctcagctagagtctggggaagaggagcagagggcgttctagagtctccatatttgcacacgccccccttcccttgcaggatatgggaacctggcacccagcacagaggcaggtcaggtcttctgtgtcttctatgccctgttgggcatcccgcttaacgtgatcttcctcaaccacctgggcacagggctgcgtgcccatctggccgccattgaaagatgggaggaccgtcccaggcgctcccaggtatgccccctaactcccttacaggcctgctgtgacagatctgttgcaagtggagttccccagaagccgatgctgagatggagtttggcatgcatggtgttaggggtagatgcctgtgaaagaggaagggtgaaggcagggttgggcagagtggggagttggatctctatgcatgctctacaaaggcttggccccaaggagctctacagcatgtgagagctgtcagagttgtcccacagtgggcggaaccagccaggttttcatacctgcctcaatcaggcactgggtgtggccttcccaggaagggtatgcccctaggccaggaggttctctgcagctgaacaccctgaaggagctggcagctggcccaccgtcctcctttaagtgagggatctctgtagcacatcttcaaggtcatcacagaactccaacatccttttgtgcagtagcaaacaagctctgcaggctgcccagcatgccctcagtgcccacccttggccagccacttgcaaggccagaaatacgcagacagttcaatgatacttttctgttccagatctgagtccccagggagcctgttcaagtgtgatccccaagtccaaaggggtctccaaatcgcttcttgacccactaacgcaatccctctgccgaaatctttccctgggtgggacaaggtcatgcacacatagatacaacctccacctcgagggtctgcagtgcaggaaagggtcctagctatggcccagtcccattcccatgtttaccccagactccccccaacctcatacaatcctggagactttcaagtggactcagaggccaactccctccctcctaggtactgcaagtcctgggcctggctctgttcctgaccctggggacgctggtcattctcatcttcccacccatggtcttcagccatgtggagggctggagcttcagcgagggcttctactttgctttcatcactctcagcaccattggctttggggactatgttgttggtgagaacaaaacagtcacattatctcagggtgggggtgcccactgggatttgggggatggagagatgtcagctgaggacaactattgaggataagatagcccttggtcattcaagggagccaaaccaatgatttctgggactactgtggattctaagcaacattctcagaagtttctggtctaggacccatcaccaccctgcagagacctacctcaactgctgttccttgttatgaggaagagggagagagcatcctggctggtgagggtccctatggaaactggaggtggctatgccctgagacccctggcattgatgccattcccttccctggcaggcacagaccccagcaagcattatatctcagtgtatcggagcctggcagccatctggatcctcctgggcctggcgtggctggcgctgatcctcccactgggccccctgcttctgcacagatgctgccagctctggctgctcagtaggggcctcggcgtcaaggatggggcagcctctgaccccagtgggctccccaggcctcagaagatccccatctctgcatgaggcccccggggggggcccagaaacccctttcatcctccccagtcccaccctatctgctctctggatttccagccctgctttctcctctcccaaccccctcacttctcagccagggctggtctcaggagctctcccaagagagaaaggagacaggtatatccaagaaagtaacagagaggagacgtgagataggattaaagacatgtgtggatggggaggtgtacccttgtcccagagcccctgccacagccttccacccaaaggtagtggccagatctccactgccctccccatgcccccttccaggagaccttacacaaacaaaggatgactttacttttgcctcatttgatatgtgcacagtgcatttgccaagcccctactatgtgccaggtgctgtgccagggtctgtgccagggtctggggatacagcagtggaagtgcctgcccttgatgtgcctttagttgctaggcaagcaaagaggcagccccaacacagtgcccaaaatgctatgatgggaatagccccagggttgatgagagcccatgggaatggctggcagggagcatcaaagagaggggagacctgggcagagactttggaacaatcttagtgaaaagaggatctctgccctcaggaagctctcagccgaggggcaggcgagctgcctctcaaagctcgccagctccccttgcctagaagtccagggctgtctgtgaacaaagcttaggacctcttgggtgtcctacccactttcctgaacatggcctcccctgaccctcacaggccacccccttaacttcatcactccctctgggctcctgccttctcaagagcctttccaaacaccccatgggaagccagagagccagcagatcccaggatccttccagaaagtgagctccatgaacgtctggcctctctcaggaatgcattctccaggtctggcctttcccctgccagactgcaacatccctgaccaggagagatttagaccactccatcccggggcctggaaattttggcctttgcctctcccatcatccaacagcaagtgggctcctatgtggctgggttcctctgcacaggtctgaggcaaggctgtggagccaaggcggctccaggcaggagacccaggagaggctctacagcagcaagaggagtccaagtcacaccccaggacttccccatatccaagaaaggactgggaagctgaggacccacggactcttcacacagcctagacgcttcctccactccaggtagagggatttcgggggccttctcagaagcaaggagtggacaagcctcttggttaaggctcctcttacctcccaagctcatggacaagtggcaatcagctggggtccctcttttggggtacaaaggaaaggacagaggtgtgggagacccaaggtggtcttgagattgacagacagcaagtccttggagatagcccccgagtccaagaacttaggcaggggccccaagacaataaagttggtctctactatctcctacctctgagtgcggtttccagaagtccctcccattgttcatttcaggaaatgtgagggggctctgggccccttccctcagcgcctgcggtcacccagcagcttcctccttctccctggcctaggcctagcaggtgggcaccccgcacacatttgaggcggggccagatgcccacagttcagagcctctttttgtcccggggattggatcccagggctgggtggggccaggctgtcccattccccaacactcctcctccccggcgaaaccgggcaccagcaggcgtttgcgagaggagatacgagctggacgcctggcccttccctcccaccgggtcctagtccaccgctcccggcgccggctccccgcctctcccgctatgtaccgaccgcgagcccgggcggctcccgagggcagggtccggggctgcgcggtgcccagcaccgtgctcctgctgctcgcctacctggcttacctggcgctgggcaccggcgtgttctggacgctggagggccgcgcggcgcaggactccagccgcagcttccagcgcgacaagtgggagctgttgcagaacttcacgtgtctggaccgcccggcgctggactcgctgatccgggtcaggggcgagcggcgtcggcctgggcgcggcgggatggggtagcgggccgcggggtgtacgggccgagggcgagggggcctattcaggccctggtcaggtgtttcctgttcagggaaacgtcgggaacgcagacgcgggcacaacgggggtgggcgttcctgcgcggggaccagagggttgggggacctcggaggaaaagaccctcgccctagcgagaggactgcgagaagccgggctgagtcctacttgggggcgagagggcatgctggcccggtgaggaggcagatgcctggggacacatccaaatttgggggcgaggacgactacggcagggggcgcgcgcgtaaccggccccgcccggcctgacccgggaaagggcgcgtttgagcctgcttgggggttggtcgcacccgcacccgtggcaaagagctaaacgccacacctggccgcttccagagggggaacccgggcgcacgtttgcgaactgggagctgggacggcaggggcgccgggtctaaggatgcgcaggagcgagggcgcggccgtaggagcctgggggaaggcgcgtttgtcccggagggtgggtggattgggcccgaggcgtgctggtcggggccaccctcaacgcagagagggggctcgacgtgcgcagacccgggttcgagaggagggcggacgcagggccgctctctggctgaacccgctttactccgagtcttcggacacaaggactgggcgcgccgccgccgcgcggctgcccagaaaggctgaaggcagggttcaggggaggactcagaggtaaatctgagcagaggctcctcaagggtggggcctagcagggcggaggaggccggggagggttctaggggtggcgcatcttaggactgaagcgacgccagactggcagctgctcgatttggcggaggcattgatgtcctgggtcctggcttggttccccaccccttcgtccaagagcccagagtccagacagctgcgcgccagcccagaatccccgtcttgcagtcctggtggcttatccgtccagagtctccagtccaaagccaatccccggaaggtggcagggaaccgtgccagggtgggaagggacccagcgcggagcggaagtggtgttctgaaccctcggactaggccgattcggtgaggtcaggaggtagccagggccaggcctatctctactaaggacctaaagtgattcctccagctccccacctgcggacttctgcaaatacagcccgactgctgggtcctggtgctgaggctgcctgccattacccttgcaaaggtggtgaacttcgactacaagcagcctgggcccagggagatggctatgatggtgattataataacagtaaatgcctctgtgcagcacttatcgtgtgccaagcactgttgctggtactttacccgtattcatttgtctcacctccctcacaggtgggtactgtttttatcatcctgtttcaccctcacaggtgggtactgtttttatcatcctgtttcagaggtgaagaaacaggctcagagaggttacatacgaatgcatggctacatagccaggagctggagctgttaaccagcataaatactgcctcagtgtggacctgtggatgtgggtgcttcccaagattcccagccaggctgtcatctctttgggctttcccttcaactccctccacccccacctcacccccttcctcaacactcctgtggcttcagccaactccaggaataaggatgtggtatccagcccagatctttctgagcaccagatgtggacatgcaacttctgaaattcctcaaggccaagagcaagtggtcctcctcctcccagccctgcttctccacctgtcctaaatctcgattgtctgccccatgtccacacaccctcacaatcctctgcaacatctcctttactgcccatactaaatagggccagaggcctgggcttctgaatatctcctctctgttcctcctggaccacctgtgccaggagacaggccagggcccgtctatcactcacttctgcaggagtctctcccctctggtcaaccctttctatactgccagctgccacagagcacacaaacctgatcctacttcccctttgctcagtgaccttggctgatacctgcgacttcatccctggcatggcaaagccaagcacagcttggcctcaatcacttcttaccagtctccctaatctaggtcccaggcagtctcacctcccaccttctgcactgctgtcccatctacctaaacatccttccaccagaagcaatcctacctgaccctcaaaggcccagctaaaacatcccattctccatgaggcctctgctcctacccaaatgagaatgaacatccttcttccccagagtcctacaacattatatgcctatataatgcatataggcaatatagcaactgctaacaccatgtgccaggtactaagtctacacataataccttatttaacacaacaactctatgaagtaggtactatttgtattaccattatacaggtaaggaaactgaggcacagagagaagttgagcaccttgcccaggattgtgtagctgcacttcctccttaatgcccaaagtgacattgactgcatcatattagagttaattaggtttatctatgtaccactgagggctggggtcatgtctcttgtggtcacgtcccctaaaagcaccacacatcacgcctggcctagtgtttgttgcaggaatgggagtgagcaggggagaaaatgagtcgctggtttactaggactccaacctgacctagccactgggtaaagggtggggaaggagctgtccccatggtagctgtcagtagctgtacctggtgagcccttggtgagaggggtagagcctccttgccctggtgggctgggatcgaagagtaattgtgagggctgtgtgtgtaggtttgtttgtgtgtgtgtgtgtgtgtgtgtgtgtgtgtgtgtgtgtgtgtgtgtgcatcttggggtacaggaaatccatcaccccacagagcctggtggtcattgcagcctcttccccaggatgtcgtccaagcatacaaaaacggagccagcctcctcagcaacaccaccagcatggggcgctgggagctcgtgggctccttcttcttttctgtgtccaccatcaccaccattggtaagggccagatggggccagggggatgggggtgggggaaggaggcagctccctgagaggcaacaggctagttgccttttggagggattacctggagtctcatgactccaagtgcagttcagctctgcagcatggacaccgcctgggagcagtctcgggcctcactacagacctgctgactcagcctcagcatctcacccaggtccccaggggattcatgtgcactgttcgagtttgacaagcactgctctaggggacttctgccccacatggcctttcaggaagcagaggtctcccagtacagcaagaaacatgtctctgggcactacaaggatgccagtctcctcagctgagcccacccaacactgagccccgggagtggtggtcgggagaagtggagggaaagttaggaaggaagaagaagtagaaatccaaagaaagagctttagaccccccgtttctcagccctgggggaggtggccattcctcccatgtccttgtctccagaccccattcccacagtcctctcttcagcttgcaaacagccccctccactcctcatcgccatcctccccacacacagggacacctggactaaccctcctctgcggaagagctgaggtagagcttgtctcaggagggtgctgaggggctgctgtgcaaagaagagcaggctagatccctgcagttctgaaacccaggaaatcatgcaagtcgagccacccagatccttctgccccaactcctgcatgacacaggacttgccaccaggtggcaggctggtatcactggtgacttgggctaccgcctcccagttcctggccagccaggatcctctctccaggacaccagtatcccagcctccccacagggttgggtaaggcaagagcacccagaggattctccatctagttttaaattggccagaacttcttgaaagcagacctcagagctacatgggagcttgggcaatccttgagacaagcatgcttgggaggcatctcagactccagcggccctgagcccctgaaggactggcaggatgggccgattcatctttacatccccaagggtctattacaaggcccagcatacagcagccactcaataaatactgccacgttaaggaattccattaaatatgcattcaccaggcatgtattgagttccagggtagcaggagatcttaaaacacagtcactgtaggccaggcctcccagatttgggggtcctttagtctgcaaaccccacacctcccacactcttctcagggcctgtgactttggcccaccaaattcagagttttgctacctctcttcccagctctaccacccctagcttggattatgcctctgtcctttcctctccactcagtttcaaccagcttgagggtgaggagggcaaagagaggagggccctgccccaccccacacacacagtacacctgaggaaacacccgaggtcttcttgtactaggcactgtgctgggcactttgacatttaagatttcaatttgtccctatggcaacctccaagaataggtcttattattttctttctttcttttttgagacggagtctcgctgtgtcacccaggctggagtgcagtggcatgatctcagctcactgaaacctccgcctcccaggttcaagcgattctcctacctcagcctcccaagtagctgggactacaggcacttgccaacatgcccggctaatttttgtatttcagtagagacaggttttaccatgttggccaggctggcctcaaactcctgtcctcaagtgatccacccgccttggcctcccaaagtgctgggattacaggtgtgagccactgtgtccagcctattttcatgacacagatggggacacggtggcacagagatgttgcaccatctcccccagatcatacggctagtgagaagcagagttgactagccattgtggagtgaacaggaggggagtgagggttctgtgatgctgaccacacctgtatgcacttacacatgggaggtatttggagagagaaggagagggagatggaagatgaggtacatctggaatgccacaagggaagaagggatattctgagaggctcagcagagggcagcctcttcggcaaacccattaccctgggaccagcaccctgcaagggcagtactttccaagccctaacacaaatacctctgggccagtaggacaggcctgagcccagaaatcactcatctatgaactccattcctggcttgctcattggttctttcattcatccatccatttgttcaacaaataaattgaaggctgggcatggtggctcttgcctataatcccagcattttgggaggccgaggcaggtggatcacatgaggccaggagttggagaccagccgggccaacatgatgaaaccccatctcttctaaaaatatgaaaattagccagacgtggtggcgggtgcctgtaatcccagctatttgggaggcagaagcacgagaatcgcttgagcctgggaggcggaggttgcagtgagccgagattgtgccactgcacttcagcctaggcaatagagcaagactctgcctcaaaagataagtacatacatacacacatacataccttggtgtgtgtatgtacacatacatatgtacctagtgtgggccagacactggtgctgaggatacaatggtaatcaaaattagcaagtcccagcccttggggagctgacattctagtgtgaggggacacacactaaacagatacatggacaataatcaggtagtggggtgtgcttagagaaaagtaaagctagttaaaggggtctcatagtgatgggggcacctattgtaggtggggtgtccattcagtaacattgaagctgatacagtaacattgaagcagagacatgagtaaaataatggagcaaactgatgatatctgaggagagaatcctctgccagcaagtgcaaaggccctgagatgggaatgtgacttgtgtgtttggggagcagtaaggaggtccaggtaggtggagagggttggaaacaggagctgcattcagagaaagtacagagaagaccaatcacagatagacttgtagggttcttgcaggatgcccagagatcccaacaagatgcaaagtggcagtgaggagacatgctgaagtgaaaggtggcttgggtggggctgtggctacccagcgttcaacaggtaggtgacatccttttgctgacctgagggatggctgagaatagtggggaggaaaaaaacccatttaatgtcagcctgagaacgctgcaggcctccatggggctcctctcagagctggaatcttagtgtccccatcccgctggtgaaaactgaatggggaagaaaaaccagtaccagatgatggaacttggcaggacctacagctggaggaggaggggttggtgaggaggcaggcagagaggtgggtggaaagtaagaggtttacctcgccctagatgcctacagaaaggagaactctcctttggaagaggaaacccataaaggccagagggggaggtagatggggactcaagaggcttctgaagtcctcagaccagaagccagttcactggagttctatcattcatttattcaacaaacatttagcaccttgtatataccagatgcttgcaagctcacattcccttctacagtgtacctccattcctcatttcatcattaccccccactgtaggtggatgtcagcatccccattttacaggaggaagcagcattcagaaaggtcaagccaaaagaaagagagagagaggaaggacagaaggaaggaaggaaggaagcaagcaagctgggcacggtggctcacacctgtaatcccagcactttgggaggccaaggcaggcagatcacaaggtcaggagattgagaccatcctggccaacatggtgaaaccccatctttactaaaaatgcaaaattagctgggtgtggtggcatgtgtctgtaatcccagctactcgggaggctgaggcaggataatcgctgaaaccagggagtcagaggttgcaatgagccgagatcgcgccactgcactccagcctggccacagagcaagactctgtcacaaaaaaaaaaaaaaaaacaaagaaagaaagatcgagccacttgcccaaggtcccacagcctgcaaggagctgagctgggatccaaacctaggaggtgcagcagactccaaagcacatgctctgtacttgtacatagtttgacctctcttgggacccctcagtaaggtgggggtggatgtaaacattggtttcaatatagtacagacgagtttagggtgtgtgggcacagtgaccccatctgggcaagcaagaatgttaggcagtgctaggaggcaaaatgagaggcatttgttcatttacttacacattcacttttgtatttcctcattcattcattcactcattctttatgcattcaacacatatgtagtgaagagcacctattaagggtcagatcctttgccagttgctgagaatatggtgattaagaaccagtcccaggccgggtgcggtggctcacgcctgtaatcccagcactttggtaggccaaggcgggcagatcgcctgaggtcaggagctcgagaccagcctggccaacatggcaaaaccccgtctctactaaaaatacaaaaattagctgggcgtggtggcacatgcctgtaatcccagctactcgggaggctgaggcaggagaatagcttgaacccaggaggcggagtttgcagtgagccaagattgtgccagtgcactccagcctgggcaagagagcgaaactacgtctcaaaaaaaaaaaaaaaagacccagtccctgctcttgaggggctcagagcatatacttgatatacttggaagaggcagacatggaaacaaatctttctcacacagtgcaagggagagtgctggagggggccctggatgaggagcagctgcactggagagtcgaggactggaagggtcatttatatttatgtgggtaaagaggagagactctcttcatagaggaagcattgtggtcaaaggtgcagaggcacgagtggacctggagagttctgcaggccagcaatgtggctagagctggggaagcgggggcaccagacgagtctcagagaaaggctgggcaagagcttggactttccccagcagacaggagactgaagaagggttataacctcaatgatgatctaatcagttttgcattttaataagacaagacagtggtggtgatcaagaagggtggaggcagagctggaggagaaaagaatgtccagatggatagaatcttttatgaacatcttttcctcccctagcttcccctctccctatcttgaggatcagagaccacccccccaacttctacctcctcccctaggcagctgatgacttactgtctgtccctccctcccactgagctttatgagggagccccgttgtgctagtttgggtcctccaggaatcagatatcaagacagaattagatgcgcaagagatatattgaggggagcctttgaaggataaaagagaaggagcaggaattaatgtcaaaagcctcagactgcaagcaggcctgatacctatgaaaggagagagggaaggaaggagactggtgtgggaagagctgctctctgcattgcagctgtcagaaagtctgggccaggccatggggatcccagagcaaaggttgaaagaggagtgccacactgggcagggatggccagcttcagtgccccactgtgcccaagcatggctgggagcagtgtggagacagcatggcctcagcctgaatggtgcagtagatcctaagagtgcaacagctggaggctctgccccctccagcatccatctgcccatccagagagggaggacatgaagagaggaagaggagactcacatttggtgggtttgagctcatgcatgcagcttagcctcctagagcttctccagcctgtaaaatatggcacataattctgatttggaagggtggtttcgagggtgaactgagggaatgaatgtacagggtgccctgcacagtgcccagcacagaaaaggagggccttggtaagtatcagctgcccacatctacagtgggttagaatgagggccctgggggttgggcccaggagtggggctgtggtggtgagtggacagggctgggctggaaatgtcccctgagtgccccctctcacctcaggctatggcaacctgagccccaacacgatggctgcccgcctcttctgcatcttctttgcccttgtggggatcccactcaacctcgtggtgctcaaccgactggggcatctcatgcagcagggagtaaaccactgggccagcaggctggggggcacctggcaggtgagggggctgctggacggggtggggatgggtcacttctagaatgaggggctgtggtgggaattggggttactaatgacaagaggtgggagcaagtgttactggtgaggttgtgttgggattgggggtcactgctcagaatagggtccttagtgaaaaagggcattaatggtggagatggggtgggactgggcagacaggaaggacatgaggcacaggctccaggcagggaacctggagaacacagaccaggtgaagagcccccttcttactggggacagctctggcctgcctccagctccctcggctcccacgcatggggtgaaggcctcaggaggcctggggacaatgttgcacccacaggatcctgacaaggcgcggtggctggcgggctctggcgccctcctctcgggcctcctgctcttcctgctgctgccaccgctgctcttctcccacatggagggctggagctacacagagggcttctacttcgccttcatcaccctcagcaccgtgggcttcggcgactacgtgattggtgagagttcctggcggttgggctggcggggacattcggctgcctatacctctcactcatctgctcccgcagctggcgcacctgctgtgtgcacgccatgtgggggcttttgggcccaaaatccggagacactgtcctacccgcttttgttgtgtgacgggtctgaggtcactctggcccttcttgaccaacgcggagaggtccaacacgtccgcgggcccacctattgtgcttagagctctccacatgacgggagtccccgcctccctccggggtccatgcttgccccagggtctcccttccccacttcactctctccctatggaaggccaatctgtcccacttctctggggctggagatcacagtacccggggatcagacagtagggtccgggagactcctggaaccccagcctccccagagccctgtgggaaaacagttggcaggcagattctgagtgccagcaagaaagggcctcatggtcagtggacccagggtgggtttaatcagtggcacaacccaacctaggcaagacaagggccctagaagccaccagccttgcataatcaggctgagtccgatgcccagcaggtggcagtggagggacattctgtgccgtggcggagtggctgcgccccagctcagcctcatcaccgccccttcctgtccctgaaggtgccgctggcaccactaccgcgccagcctcaagcggcttcatgcactccctctgatcccagaccctaatgtggggaggaggccttgcccttcttcacttcttcagcgacagaacccagcctggaagaatgaagttagtttcagctaactcctcaggcaacctacagcaacaattgtcacccccattttactgaggaggaagctgaagctcagagaggctgagccatctgcctgagactgcacagctagtaagatgtgaatcctgatctatttgactccaaaattcatactgtttccaggccacctaaaatgtctcctctctgggcctcagtgttcctgcctataaaatgaggcaatccctagagcccctcagtgccttctagcctctgtttgcaaggtccccaggaagaggggtcaggtgttggggcctcacactgcccccttctggatctccctcatcctgggaggtctgttgctctggaaggaaattcttgggaagatttcttccaactgggtcatgttcccacctttaccctcagagtagagagatatgtcccaggacagctgagcccagtagctccaagggccatacctgcaccctcgcagctcagagtatgattcttagatctgtcatttcttctctatttccactgccatttccctagttcaggcagggttgttgcatatagctgcacaggttgggcactgcacaatcctatagttttgctacttacacagagcataataaggatggcacccagggacttgtgcagcttctctccttgtcccctgttggctcttatgacctttaaaaattacaaaggctatgatgtcacctgcccagctcctctgaagaacttcattgttttcccatagttttaggataaagtccaaaatctgtaacccccctcctaccaatacaatctgactgaggagatctagtccaaattctgtaacccccctcctaccaatacaatctgactgaggagatctagtccaaactttaagcccagagggactgcccaggcctggggcaaggatgggcaagaacactcctgcccagcggccactgcagttggcagagcttctcccttcaccacatctatggagacttgctacctcctgggcccctctgcagtcatggcagtgcctcgtagcaggtcaccacaataagagccccaactgcttcacctgcaggggatcttccttatacagatggagacactgaggcctggaggagggaagggagttgcataaggtcatagagcaagtaagtcagggcaaatctaggataaactcccaagcctgggcccttcacaccacccatgtttcagagtcttccatgcctattcctcaaacctctcaggtctccttgtcctccagtaacagggacaacccctttcttggatggggatactgaggtccaccagttggctactgggtgttcacatccctgcatcagcagccacaagaggcgctgtcttcacagccactcctctgcctgaaggctgtggccagagccgcccccaggtcccatccggctactcctccccagccccatagcctggcgcctcccaattgcatttgcagctcagttgagcgccttgccagctgccaggtctcctgccacttatgatttcagcttaaaaaaatgaaataaaaacggagaagagcgcctcctcccctctgtcaccaggagcaagccaagctggcgggtggcagggccagagagccggctcagtgcctgatctcatttaggaccatcagcggaatcatagccccataacccaatcagcctaatccaatcccagctcctgccaggcagcacaggtcagctcccaggtggcagcctcatccccatgtgggggtcctagagaggggcccagccttgggggacctggagagagaggctgtcttggggccagcaggacaggatgaggagtagacagaggcatggtacagggagcaaagacagaaaaggatgacgaaggaataggaggggagagctctaccctttgaatgattccaatctgatgagggaggcagcacagacctccagggagggtactaaatgatagggcaaatccttggcaagatttatctaagactcacagcagctcccatcagtcccctccctcagctatacttacccagcaccaacttcgttgggggtgtccgatggtgagtgaaacaagcaaccacctatagatcttgggcacctgttatgtaccaggcaccattctgagcacttgagctgcatcagcccatgtgatcctcccaacagtcataggaggaggactcttactgtctccattttacagatgaggaagtaactttcccagcagacacacataggccatgaaagcagcacgtgtaacagaggaacccaacgtggtctgtagggagtgatgtctgaactgaggtctgcaggatgagggaaggtaaccaggccaagaaaaatggaaaatgaagagcatttggagccgagaggccataagtacaaaagcccagaggcagaaagaatgatagatggggaaacgggaaaaagaccagaatgaccaggcagtcagaggggagaggtgtgctgcagaagcgggcagagggccttgaggatttggacttcatcctaaaagccaagggggcgcagtcgtattccccatctcacaggtgaaggaggttcagacaggtggctgaagaaccgagtcaggatacatattcttatggttccattgttcatcccaaatcccctggctccagcaagctgcctcatttcagatacgagaaaaccaaacagagactggcaaacactagagcggacatcgaaatcctctgggggcttgttaaaatacagatttctggccgggcacggtggctcacacctgtaattctaacactttgggaggccgaggtaggtggattgcctgagctcaggagttcaagaccagcctgggcaacaatggtgaaaccccgtctctactaaaatacaaaaaaatagccgggcgtggcggcaggcgcctgtagtcccggctactcgggaggctgaggcaggagaatcgcttgaacccaggaggcggaggttgcagtgagccgagatcacgccactaaactccagcctgggcaacagagtgagactctgtctccaaaacaaaacaaaacaaaaaatacggattgctgggcctatgcccagagtttctgatccagtaggtctggggtaggggccccatcatttgcatttccaacaagctctcagggatgctgatgctgccggccccagggaccacactttgagaactgctgggatggagcataaacagattccctcagaaagacaaagaggaaatgtagctcctaaacccaagtgccaatccagggaggctttctggaatccttcggaggtgaccatgaggctaggagtctccatgttctgtcccattggcacctcaacttgcttatatgaatcaaaccatgtatctctgtttctgtttggggaatgtggtcctgactttcccaggcctccatcgtctgaccttgcctcttccccaggaatgaacccctcccagaggtacccactgtggtacaagaacatggtgtccctgtggatcctctttgggatggcatggctggccttgatcatcaaactcatcctctcccagctggagacgccagggagggtatgttcctgctgccaccacagctctaaggaagacttcaagtcccaaagctggagacagggacctgaccgggagccagagtcccactccccacagcaaggatgctatccagagggacccatgggaatcatacagcatctggaaccttctgctcacgctgcaggctgtggcaaggacagctagttatactccattctttggtcgtcgtcctcggtagcaagacccctgattttaagctttgcacatgtccacccaaactaaagactacattttccatccaccctagaggctgggtgcagctatatgattaattctgcccaatagggtatacagagacatgtcctgggtgacatgggatgtgactttcgggtgtcggggcagcatgcccttctcccccacttccttactttagcgggctgcaatgccgccgatatgatggctgggagctctggcagccatacggcaccatgaagtagcggcaatgtttgagcggcacaataagataggaagagtctggatctctgatgatcacagagccatcctaacaaacggaatatcacccgacctcctttatgtgagagagaaataaacatcttatgtaaaataccattatttgggtttttctgtcattcataaccaaacctaattctgagtatgcccagagacaaaggcagcatctgagactggaacctacacagagagaaactaccctctccccgtgtgagtttgtccagggctggtggcaagaacggattgaacgctggactgcgagccccctacaccttcagagagccaccaggtaaactctgtaaagatttgctgataactctcggggctgatgcagccagcaggcggctggtctcagtccagctgctgaatccttactctatggctcattcacaccacagaaaagccaggagcaagccaatgggctcctcctgccttaccctgccccactgcgtttgaaggccccatcaacggtttgcaaagccaggtagagtttgcaaaggctacttctgtttgcagagtgtcagtgaaggttgctactaagatagcacataacacagtggtttccaccatacatacatataagcccagccagagctcctggcagtaccagctaacacctaggttcacctggggcagctgggctcttggcctccgtgggcacctgtgattccgttccctccacccatcttgcaggtggtatcccagggacccagggagttccatgtggcctctccctgtgaccatcttggaactgggtcagggtcagccctttggccaacgaaggagtaaaggctgttacaccatctcccttgcgccatccatcctggccctgcgtggaccaaggccagacccaggagcagcacgagagagtaaacaacagggcccacgcccacttcccgaggcccccattggcttgcccctggcttttctgcggtgtgaatgagccatagagtaaggttcagccgctggactgagaccagctgcctgctggctgtatcagccctgagatttatcagcaaatctttacagagtttacctggtggctctctgaaggtgtagggggctggacagaggaaaatggaggggaggaagagattgctgaagtgtggaagtggcatgctttgtacttaacacactccagaaagaggacctagcattcaaaacttcctcctgggagcaaggagcaggccagtgtgttgggttaggcactgtggtcccaacccgagctcacctcggacctctttgtcctcatgcctggccccactgtgctctcccacgaagccttcactcccatgcccacacccctcatactcagaaatgcttgccccagaaggaaccaacctgggctgctggagtgcccagaggaaggctcattcttggccagttctttatctccttctcagccaatgaaaagaatagctgaaactctgaagtctacactcaggaggtgggagggggagtggggaggggacaaaagtgaatagggtagggacaggggtgttaagaagccatgttgggagccacctggagaggtctggatgtgggaaatacaaaaacagagtattagacctcagttcagaaaccacagaacagaatggacagtgaggccacagaacagaatggacagtgaggccacaagcacgagggagggaaggtaggagtgatgacaacatgatggagacagcccaagaaagctggtgcgctttctgcagtaaggaactcattgctattttccacctcagccaggccacccaaagcctggaggaggagagaaaggggtgccctcagagcgtgacccttaagggtgctgagtttggagccagcctgcctgtgttgaaatcctggttccacagcttgccagctctgtgaccctgggcaaatcttgcatctgcaatttatttcctctgcaaaatggagacaagagcagcttcgatctgcaggaacgaaatgagtgactgtgcgcacaaaggactgagaagtgtatatgtcagccttgaggaggtgccacatgcgtgtcagctgtcatcatcgttcccagccaggctgagtgaacaagaacaggaggaaagcagacgctctgggggccggcggctatgaggcaggcagcgccttggctgaccccctctcagggctggccaggcgggagggctgagcaagcggtgacgcaggatggggccctgcccttggggggctcccaggctgatactattgctctgctggccaggataaggcaagtggacatgcatgacccacagggagcctcgaggcagagactgggaagtgagtgcccagtgtgcaaatgcagggcccagggactgcccaccgcgggtcccaccatgccaggagcaggcagacctctggccccgggccacctctccccaccctctctgaccggtgaggcaagatcagactcaacatcgctgggttatcccctttaaaacagcagcatattttatccttatcatcattatttattattgttattattatttattgttagcatttattaaatgcttattatgtgctaggcactgttctaagctctttacttgtagtaagttatttactcctcccatcgactccataagaaaagaactattatttgtaatgctgttttatctcggggaaacaaggtcctcagtggatgttaaggccaaaggtagccacctgttcctgtgggtggtcacaggagttgccgctggccctctgcaagggataaattcccctggcctgagaggcagggacactcttcctttaagccctgtgtgatctcaaccagccactcccctttctgtgcctcagtttcctcacctgtaaaagggggctggcatcagggagtctgtatcttactacttctactccctccgccttggactggattgttctaataaacatgtttcagaagggcagtttccaaccccacccatgtcaatcctcctgggcccatgttaagcatttggatccaaggaaggaagtctctctttctcttgtctctgtatctgtctctctccctctcagttacatacacacacacactcacaggatgtggaggcagagaagagaaaatctgcacaaaattccccaggccctgagcccctccctcatggcctcgccgatgctgaagccctggctggaggaatggtatccattcacttgaggagccagaccagacaaagaaggacttgactccttggaagccagaggaccttcacatcagggacgacagctatgctgaagactcccatctccagttccatcggcccttacctcacccagccacgcccctgggctccaggcctggagtgtgctgccctgaagtaggccccactgaccccccttcctccaccctccctaaaccacacacagtgctggtctccacccacactgccatccccaggcctcccattccactgtctgtcccccaaccacccacacacagtgctggtcccagcctccagcctcactgatgctctctcccactccccaggagacagggctggatcctgcatctcccgaccctcctttgccccttgccagccaaaactcatccccagctaaaatcatcccttggggccaaggagacagtcccacccttcccccaaggccttctcatcccatccctagggactttccccaagattttcagtccctgccccactccaatcacaaaacctctctcaacctgtctggggacccatatcagctcatagcctggcggtaggaaaagcaaccagggttgggtacttcccaccctgtgacctgctccccacaccccaccagcacatcgtccagaagcatgaatgcaaaaccatccagacccctcccaagagccacagacaaaaccctctgccccctgcttccccatgggtttgggaccctgttcagcttttgctcacactccaacctttccacaactttataggccctcatgtattatttcctggactcaggcagttgtatgtctatattctgactctatcccttgctgtgtgacatctgagaagtcacataacctctctgagcctcagtctctccatccataaaatgaaaatcctgagaacaacctcgggattgttttgataagtgtggaggaagggaggtgggggagttggtaacagatgagaaagcatccatgtcctaccttatacttaatagggctcaaaaatacttgtgcccctcctttttttcttcctcttggtctcaaccttctccttctccaccctctttcatcaggaagctcatgaagcccaactgtaccttttcctccaagaagtccccctggacttgcctgtcttttagcctccaatgggcttgggaggggcagaaaatgatgtggggatggaaggaatatatttttcaaagctctgttttggagagggcagctcccaaccagc
